United States Patent Application Publication US 2023/0026259 A1 - sequence listing, part 78

SEQ ID NO: 181912 - DNA, 3996 bp, Homo sapiens
  Payload ID: 15817
  Gene Symbol: SIX1
  Gene Name: SIX homeobox 1
  Uniprot ID: Q15475
  ENST ID: ENST00000247182
  CDS Start-End: 274-1128
tagcagcatccaccgggcgggaggtcggaggcagcaaggccttaaaggctactgagtgcgccggccgttccgtgtccagaacctcccctactcctccgccttctcttccttggccgcccaccgccaagttccgactccggttttcgcctttgcaaagcctaaggaggaggttaggaacagccgcgcccccctccctgcggccgccgccccctgcctctcggctctgctccctgccgcgtgcgcctgggccgtgcgccccggcaggccccagccatgtcgatgctgccgtcgtttggctttacgcaggagcaagtggcgtgcgtgtgcgaggttctgcagcaaggcggaaacctggagcgcctgggcaggttcctgtggtcactgcccgcctgcgaccacctgcacaagaacgagagcgtactcaaggccaaggcggtggtcgccttccaccgcggcaacttccgtgagctctacaagatcctggagagccaccagttctcgcctcacaaccaccccaaactgcagcaactgtggctgaaggcgcattacgtggaggccgagaagctgcgcggccgacccctgggcgccgtgggcaaatatcgggtgcgccgaaaatttccactgccgcgcaccatctgggacggcgaggagaccagctactgcttcaaggagaagtcgaggggtgtcctgcgggagtggtacgcgcacaatccctacccatcgccgcgtgagaagcgggagctggccgaggccaccggcctcaccaccacccaggtcagcaactggtttaagaaccggaggcaaagagaccgggccgcggaggccaaggaaagggagaacaccgaaaacaataactcctcctccaacaagcagaaccaactctctcctctggaagggggcaagccgctcatgtccagctcagaagaggaattctcacctccccaaagtccagaccagaactcggtccttctgctgcagggcaatatgggccacgccaggagctcaaactattctctcccgggcttaacagcctcgcagcccagtcacggcctgcagacccaccagcatcagctccaagactctctgctcggccccctcacctccagtctggtggacttggggtcctaagtggggagggactggggcctcgaagggattcctggagcagcaaccactgcagcgactagggacacttgtaaatagaaatcaggaacatttttgcagcttgtttctggagttgtttgcgcataaaggaatggtggactttcacaaatatctttttaaaaatcaaaaccaacagcgatctcaagcttaatctcctcttctctccaactctttccacttttgcattttccttcccaatgcagagatcagggaaaaaaaaaaaaaaaaacccaaacaaacaaaagcacccaggcacccagtctgagttctgggcaactgatacgcctgtttcagcagcctttcttttttttcaatgaatgggaattgcaaatcaactggattttcattatttccttttaatttatatatggagaaatgtgaagagggaaaggaaatggaaagagaaagagaaagggagataaaaatagtgaaaataagagcctccaggctcagaagaactgattacattcttaaggtgaacaggaaaaatacaatctataactttctttgatgaggaaaaattaagtttacatttttcatatttagtgttaaacaatttaatgtagattaaaataaaagaccagtattaggaggaaaaaacaagtgcctaaatgtcttaatgctctctatgtgagacagaaatagacgtgaccattagtaatgcaactatttttgtcaaatttagtgggattttttggttgttgtttgttttcttgggttttttttttttaaatgacaaactctaaaaatgtaccaatgtgaaaaaacactttcctgaatgccattactcatgccctcaaagctttcatatctgtagcctactcctgtaaagggtttctcctgtttctagtttctagtttgcaaaggtatgccaacgaatctggcaacctggtatttgttactaaaacagcatgtgttttcaggtttcttttctattgtacctaaagcagtctaaattaaaacttagtagaacaccaggagtatgattctgtttctgaaaggtgagtggtgtattgctgtcattgggccctatttttttttttaaatatatttttctttcttacttaatggtggctgtgaattgcagggtactttgaaggccatcatctgaaccaagagtagtaactagattaattatatgacagaaagagtgaatttagccttggggtatttattaacttctattatttagatatgcaattttgtttaccactatctcttcacagcattcatatgttaactaagctcttttgtgttaacaagtttatgacaagactgtgaaagtaaaaataatttatctgcttgaagacaaaaaagggaaggagaacaaggatagaaacattgtgaattaatttgtacaaatagaaagcagaccagcaggacaggagctcttttgcagtgctgccggatggtgtctagaaaaatcccagtaatcatgtaggctccatattatttttgcctggggcaaaatgatgtatcttctgtatttagcttttaaaattagtgaaacaaatggcattatttattaaaattctactcaggataacaggattggcttgcttgtgctttgtaaaatattgttccccagggagaatctatttattttctgacatgacagtttcataattttgattttttcccatctataattgtcaccattaatatattatttctttcttactctttcctatttctgttctggtctagaaaactgaggtgtgcttggggaaatcaaggccttattttttaaaactgtcaaatagctttgagttccagggagaaatggtcactgtacttaactgtacacacttttacttataaagtcgtttttccccctcagtgatggacagatgtgcacacagccactcagagaccatcatttggtttgggagctcagggtcccaatctcccttgttagtgttttggatcattaagtcggtgtttatttaagtcactagggtgtttattctccctgtcttgggccacggagaaatgccaccctctgcaggaggggctctcacagggaatctcctcacattcttcacattcactccccaaaacaaacaccctgcacaaagatagctttcaatgaccctgacaggcttcaaaggacgctgcggaaatctctctggaaaataggaagggccaattactttaatttcttacatgccgtctcttcctactccggtgactaccctccactctcccagctccgcctgggataattttaggctcgtggaagttgtgtctcgcagggcgccccggcccacttcctgctcccttagttggtgaatcttggaaatgtctgcagatccggcgaggagcaagagcgctggtcctgtaaaagcccccgtgattactgcttgtaaacttgttaaaaggacaattttctgtcacagtcataaactctttgtaaaacccctggcactaaatccagagcgcgcatattccagatgtgtttaataagaaattgcacaatgtgcctccttccgccatcctcggctcagtctgggtaaaaggggcgagcaggaggaggcgagaaagctggatattgctttgagtttttttggcaatcatttcagagagatcattaggggaaactaaccatatttttttcttccctcgaggaaatcttcgagaaccagctgttaagggacctccagtttaccttctgggcgtcgcagtttaactgaatctaaagccacttttcgtttctcctctacagatgtcataacggtagccaaaagtaatgaacaacggcttataaatagtttgtaggacgaaaccatacagcattgtgccaagtgaaatgaaaaaaaaaaaaaacactcg

SEQ ID NO: 181913 - DNA, 1959 bp, Homo sapiens
  Payload ID: 15817
  Gene Symbol: SIX1
  Gene Name: SIX homeobox 1
  ENST ID: ENST00000554986
  CDS Start-End: 37-372
ctagtatctatgtacaaatcaggagggcctttaaatatgtccatgaatccagagcgacctttcaaggcagaagataaggagaacaccgaaaacaataactcctcctccaacaagcagaaccaactctctcctctggaagggggcaagccgctcatgtccagctcagaagaggaattctcacctccccaaagtccagaccagaactcggtccttctgctgcagggcaatatgggccacgccaggagctcaaactattctctcccgggcttaacagcctcgcagcccagtcacggcctgcagacccaccagcatcagctccaagactctctgctcggccccctcacctccagtctggtggacttggggtcctaagtggggagggactggggcctcgaagggattcctggagcagcaaccactgcagcgactagggacacttgtaaatagaaatcaggaacatttttgcagcttgtttctggagttgtttgcgcataaaggaatggtggactttcacaaatatctttttaaaaatcaaaaccaacagcgatctcaagcttaatctcctcttctctccaactctttccacttttgcattttccttcccaatgcagagatcagggaaaaaaaaaaaaaaaaacccaaacaaacaaaagcacccaggcacccagtctgagttctgggcaactgatacgcctgtttcagcagcctttcttttttttcaatgaatgggaattgcaaatcaactggattttcattatttccttttaatttatatatggagaaatgtgaagagggaaaggaaatggaaagagaaagagaaagggagataaaaatagtgaaaataagagcctccaggctcagaagaactgattacattcttaaggtgaacaggaaaaatacaatctataactttctttgatgaggaaaaattaagtttacatttttcatatttagtgttaaacaatttaatgtagattaaaataaaagaccagtattaggaggaaaaaacaagtgcctaaatgtcttaatgctctctatgtgagacagaaatagacgtgaccattagtaatgcaactatttttgtcaaatttagtgggattttttggttgttgtttgttttcttgggttttttttttttaaatgacaaactctaaaaatgtaccaatgtgaaaaaacactttcctgaatgccattactcatgccctcaaagctttcatatctgtagcctactcctgtaaagggtttctcctgtttctagtttctagtttgcaaaggtatgccaacgaatctggcaacctggtatttgttactaaaacagcatgtgttttcaggtttcttttctattgtacctaaagcagtctaaattaaaacttagtagaacaccaggagtatgattctgtttctgaaaggtgagtggtgtattgctgtcattgggccctatttttttttttaaatatatttttctttcttacttaatggtggctgtgaattgcagggtactttgaaggccatcatctgaaccaagagtagtaactagattaattatatgacagaaagagtgaatttagccttggggtatttattaacttctattatttagatatgcaattttgtttaccactatctcttcacagcattcatatgttaactaagctcttttgtgttaacaagtttatgacaagactgtgaaagtaaaaataatttatctgcttgaagacaaaaaagggaaggagaacaaggatagaaacattgtgaattaatttgtacaaatagaaagcagaccagcaggacaggagctcttttgcagtgctgccggatggtgtctagaaaaatcccagtaatcatgtaggctccatattatttttgcctggggcaaaatgatgtatcttctgtatttagcttttaaaattagtgaaacaaatggcattatttattaaaattctactcaggataacagga

SEQ ID NO: 181914 - DNA, 2205 bp, Homo sapiens
  Payload ID: 15818
  Gene Symbol: SIX2
  Gene Name: SIX homeobox 2
  Uniprot ID: Q9NPC8
  ENST ID: ENST00000303077
  CDS Start-End: 321-1196
acgggagggagaacgagtgagaagcgagcgagggaacggcgggcgggcgcggagcatgcggagcggcgccccgggcggcccccgggcttgggcgagggcttgggccaggcgcgcgggccgttggggttcggagcttcgtgggacccgcggccggcgcggggacgtacggcagtgactcggggctcaccgggggccagtgccgggccagggggccagccccgcccgcgtctcggcccggacggcccggcgaggaagctcccatgcgggaccgcgcggcccggtgagggcgcgcgcgggcgggcggggacgcagccggcaccatgtccatgctgcccaccttcggcttcacgcaggagcaagtggcgtgcgtgtgcgaggtgctgcagcagggcggcaacatcgagcggctgggccgcttcctgtggtcgctgcccgcctgcgagcaccttcacaagaatgaaagcgtgctcaaggccaaggccgtggtggccttccaccgcggcaacttccgcgagctctacaagatcctggagagccaccagttctcgccgcacaaccacgccaagctgcagcagctgtggctcaaggcacactacatcgaggcggagaagctgcgcggccgacccctgggcgccgtgggcaaataccgcgtgcgccgcaaattcccgctgccgcgctccatctgggacggcgaggagaccagctactgcttcaaggaaaagagtcgcagcgtgctgcgcgagtggtacgcgcacaacccctacccttcaccccgcgagaagcgtgagctggcggaggccacgggcctcaccaccacacaggtcagcaactggttcaagaaccggcggcagcgcgaccgggcggccgaggccaaggaaagggagaacaacgagaactccaattctaacagccacaacccgctgaatggcagcggcaagtcggtgttaggcagctcggaggatgagaagactccatcggggacgccagaccactcatcatccagccccgcactgctcctcagcccgccgccccctgggctgccgtccctgcacagcctgggccaccctccgggccccagcgcagtgccagtgccggtgccaggcggaggtggagcggacccactgcaacaccaccatggcctgcaggactccatcctcaaccccatgtcagccaacctcgtggacctgggctcctagaacccatttgccttgatgagcttgccttttgtgacttgacactggggacgtggagtggcggtgtccaggggcgccccgcccctgcggccccaccaggtactgaaagacccgcaggctgagcgggtagaacagccgggtagggcagatagctgtctatgttggttcttgtttgggatttattttcaacaagttacttttaggatccttttggggctggagactgagtcttgaaccacagaagggaataaattatacaccactgtcattctctctctccctctgtctcttccttttaccctctcttgtcttgccttttccccctttcctcttcctttcccttccttctcttttcttttttctgctttctgtctttctccctctccttgtattgctttccttctagatttctagcttgccaccgttcattctctccttctgtctctccctttctctctccttctctgtttctcctctcttctctcctgccagtctcttgtactctgtgtcctggtccctccgtatgtacccctgtctttctcctcctgactggtggtctatctgcccctacctctggccctcgctttaccggagtagggggtgggagagggaagaggagagaaaatacagggactttgaacctaggccatctcctgaggccttttccctcgcccatgtgggtcagtgggagctgcaggtgtcagcttttcgtctagtaacttaagtgagagagaaagggcagcgccacagaagcccctaaacgccgcctcgtcatacgcccctcctccttctctcttggcgaggccccgccacaccgcgctcttcctcccgggactgtgactacagcgctcccggctgagcgcgccccccgagccgccgacttgccgtctccccgtaatgccctcatgtgaatgttcttcgggaaatatttctgcttttattttataataaaattagaaatcataaatatataaatggttatatgccacaaggcccgcgggccgggagtgca

SEQ ID NO: 181915 - DNA, 2523 bp, Homo sapiens
  Payload ID: 15819
  Gene Symbol: SIX3
  Gene Name: SIX homeobox 3
  Uniprot ID: O95343
  ENST ID: ENST00000260653
  CDS Start-End: 208-1206
gcgggtgtgtgtgtgtgtggatgtgtgtggggtgtgggtgtcccttacgcccttcctcctctccctcctcctcctgctcccccctcctttccttctcctcctcccccctctcctctccctcctcctggtcctcatcgcccctctcctcctcttcctcccctctctcttcctctccctgaattttctcctctcctctcaggtcagtccatggtattccgctcccccctagacctctattcctcccacttcttgttgccaaacttcgccgattctcaccaccgctccatacttctggcgagtagcggcggcgggaacggtgcgggaggcggcggcggcgcgggaggcggcagcggcggcgggaacggtgcgggaggcggcggtgctggcggagcaggcggcggcggcggcggcggctccagggcccccccggaagagttgtccatgttccagctgcccaccctcaacttctcgccggagcaggtggccagcgtctgtgagacgctggaggagacgggcgacatcgagcggctgggccgcttcctctggtcgctgcccgtggcccccggggcgtgcgaggccatcaacaaacacgagtcgatcctgcgcgcgcgcgccgtggtcgccttccacacgggcaacttccgcgacctctaccacatccttgagaaccacaagttcaccaaggagtctcacggcaagctgcaggccatgtggctcgaggcgcactaccaggaggccgagaagctgcgcggccgcccactcggcccggtggacaagtaccgcgtgcgcaagaagttcccgctgccacgcaccatctgggacggcgagcagaagacgcattgcttcaaggagcggactcggagcctgttgcgggagtggtacctacaggacccctaccccaaccccagcaagaaacgcgaactggcgcaggccaccggcctcactcccacacaagtaggcaactggtttaagaaccggcggcagcgcgaccgcgccgcggcggccaagaacaggctccagcaccaggccattggaccgagcggcatgcgctcgctggccgagcccggctgccccacgcacggctcggcagagtcgccgtccacggcggccagcccgaccaccagcgtgtccagcctgacggagcgcgcagacaccggcacctccatcctctcggtaacctccagcgactcggaatgtgatgtatgatagccaaggccgccctcctccctctccttcccctcctcccccactccttcccctccgcctcctagccctcctcctcttcctcctcttccttctcctcctccatccccagaacaaaccgaaatcaggatacccaaccatacacacatacaagtccacacacactcccaccccagccaaaaatatataaaaaacaagaaaataacaaattaaccgcaaactatcaacaacccccaaccaccatctaccactacggccaccccaaaggaccccgacgccaacagacagtcaaacgctgatgttgcgggcagaaaacataaaagaggtgacaattgtatactttctaggacaagcacggcttctcctttcggttcccatggacccggcaccccacctgcatgacgatttatttgtatctgggaaaatattctctctagttaaaaatgatttaaagagtcgactatacaaaaatcaatcaccaccacgaggacaagagggcaaaagcaaaacagacaaaaagaaaaaaaatcgccgtctccgttccgaatttgttaaaaaaaaaaaaaaaaaaaaaaaaaaggacagggggaaaaaaaaaaaaaaagaactcctggagagggaaatagcaaatgtgtcttgccttttgttgctctctctctctttttttttctctcgctctctttctttctcttcttctctctgtttttaagtcaagtattggtcaaaaaaatgcaatcttctgttttttgttcagcagacaatcattttcttcgtaagcacctttttctctccactctgtcactgcctgtgtgggtactggttataaatgtggaaaaagaatagttatgactgtaacagatttttatttttatttcaaaattttatatgaattatgtatatcttaatgatcggtcattttcccagtttgtaatatatgtgtagaaattgcctgtatatgatattgctttttctcctctccctttctctttctctcctctccctctctctgtctttctccccgctcaactgtctcttttctttttggggttctcctcccactcggtgctcctggtgtcgacttggcagtcaaggagaggcatggtggcctgggttaggaagagggaccctgtcgctagcaaaagcggagagtgagattgtagtattcttatgcaaaagctatttccagtatttcttagcagcttcagaggtatctctcactccctgtagggcgcttttactgttatcttaaactgcgtgtttatctatatgtaaaaactttctaaagcaaatacagtattctccattttcttatcactccca

SEQ ID NO: 181916 - DNA, 6285 bp, Homo sapiens
  Payload ID: 15820
  Gene Symbol: SIX4
  Gene Name: SIX homeobox 4
  Uniprot ID: Q9UIU6
  ENST ID: ENST00000216513
  CDS Start-End: 61-2406
ggaaagaaagaggaaaagagtgcgagggagtgagggagggaggaaaataaacaacaaaaaatgtcctcttcctcccccaccgggcagatcgcaagtgcggcggacatcaagcaagagaatgggatggaaagcgcctcggaagggcaggaggcgcaccgagaagtggcggggggcgcggcggtagggctgagccccccggctccagccccttttcccctggagccgggggacgccgcgaccgctgccgccagggtgagcggagaggaaggggcagtggcggcggcggcggccggagcggcggcggatcaggtacaactccactcggaacttctgggcaggcaccaccacgccgccgccgccgccgcgcagaccccgctggccttctcgcccgaccacgtcgcctgcgtgtgcgaggcactgcagcaggggggcaacctggaccgcctggcccggttcctgtggtccctgccccagagcgacctgctacgtggcaacgagagcctgctgaaggcgcgggcgctcgtggccttccaccagggcatctaccccgagctctacagcatcctcgagagccacagcttcgagtcggccaaccacccgctgctgcagcagctctggtacaaggcgcgctacaccgaggccgagcgagcccgcggccggccgctgggagccgtagacaagtaccggctgcgcaggaaattccccctgccccgcaccatctgggacggcgaggagacggtgtattgtttcaaggagaagtcgcgcaacgcgctcaaggagctctacaagcagaatcgctacccttcgcccgccgagaagcggcacctggccaagatcaccggcctctccctcacccaggtcagcaactggttcaagaaccgccggcagcgcgacaggaacccctccgagacccagtccaaaagtgagtcagatggcaaccccagcactgaagatgaatccagcaagggacatgaggatttatctcctcacccactctccagttcatctgatggcatcaccaacctcagcctttccagtcatatggagccagtatatatgcaacaaattggaaatgctaagatatcattaagctcttctggagttctgttgaatggaagcttggtacctgcaagtacttcacctgtcttccttaatggaaattcttttattcagggacccagtggagttatccttaatggattaaatgtgggaaatacacaggcagtggcattgaacccaccaaaaatgtcatcaaacattgtgagcaatggtatatccatgactgacatactggggtctacttcccaggacgtgaaggaattcaaagtcctccagagttctgctaactcagcaaccaccacgtcctacagccccagtgtccctgtctcattcccaggcctgatacccagcactgaggtgaaaagagaaggcattcaaacagtggcttcccaagatggagggtctgtagtgacttttactacaccagtgcaaattaaccagtatggcattgtccagatccccaattccggagcaaacagccagttccttaatgggagcattggattctctccactgcagctgccccctgtgtcagtggcagcttcacaaggtaatatctcagtaagctcaagcacttcagatggaagcacatttacaagtgagtctaccacagtccagcaaggaaaggttttcttgagctctcttgctcccagtgcagtggtatacacggttcctaatacaggccagactataggatctgtgaaacaggaaggcttggaaaggagcctggtattttctcagttgatgcctgtcaatcagaatgcacaagtaaatgcaaacctgtcttctgaaaacatctcggggagtggcctgcatccactggcctcctcattagttaatgtatctccaactcacaatttttctctcagtccctctacactactaaatcccactgagctaaaccgcgacattgccgatagccaaccaatgtctgcaccggtggcaagcaaatctactgtgacatctgtcagcaacactaactatgcaactcttcagaactgctcccttattactggtcaagacctattgtcagtccctatgactcaggctgcccttggggaaatagttcctacagctgaagatcaggtaggtcacccctccccagcagtacatcaggattttgtccaagaacatcgtttggttctgcaatcggtagctaacatgaaagagaatttcttatcaaattctgagagcaaagcaacaagtagcttaatgatgctggactctaaatccaagtatgtcttagatggcatggttgatactgtctgtgaagacctggaaacagacaaaaaagagcttgccaagctccagactgtccagctggatgaagatatgcaagacttatgaactttatttcctcctcacctctttttggcatcagcggcaaatcttttcatgaagccccaaggacacaaaacattttcccatttaaaggaaaacactctagttttgcaagtatatgcatacaagagactttagattgatctgcatgaagatcacagttaagtatacaggagtagaactgcattattgcagcctttttgttcacttataaatttctcttttaaatagatggagacaaaggacaaggtgaaatgtatcaagtcaaagtgaatcatttagttgactctataattctaaggtcaaaatggaacttgatagttttttaaattaaaaaatgtatacacctaacatagaaaattaaagatagctgcagaccattagaaataatacaattgtttttgtttacttttactccatgggcattgaaaaggttaagaaacataaatggtacatatttttaaagttaagtagcatgcatatatatatgcacacacacctctttttcagcattttttgagaaagtcttgggtctcaaacacatttgtctcaacacatttccaaatgtgatttctaatagctcagtgtggctgagaaagtgcggaactccactaaaaactctgaaacttcagtataaatgtaaatatatcagttctataagcaggatttgagtaattacagtgaattttatttttaatgtatatgtttctcttcaggcgctatgaactgaaaaatatgttttcttactgtttaatttatttttattgtttgaacaggaagtgaacatagtcgtttccaacaaagttttactttttgtaggattttaaaaataatgatttttaccaggaatctattaaggtcaatattaataacactgaaacaggaaatctaactcccaatattggaattttggtactttttttcacatccttgttctttatttagcaactctgattcatttaaatatgttttttatagaattctatgtgcctttttacctcgtggcctttttattggtagtaaggtacagaagtgtcaacagaagcactgatggttcttttctactatctaacagggttaatttcaccacaaaattgctttaaatctgaagaacttaagtttcactaaataatatatatgacatttatcacacaaatggataaacaactaattattgttgatacttttcattacaaggaaaataagttataaataccatgtcaaattgattatacaggctatgaaaaccattttaaaggaaagaaaatatgtaaattctattgagcaaaattctgtcctgttgaaacttagttctaaaggttttgaatcagttgttacactctgacacatgactgttgtttgcactatattatcatgtcttctttaaaagtaaatatttttggtttctgtaagaagcttgtttaataatgttgtaagccgtggctatagttttatcaagactctgaacacaagatgtaacaatgcaaataaatttatgtagtgagtaaagttgctctctagtctctgaaaagcaaaaaaagtgagaaaataatttcttcagagataacttcaagttgttgaacataaaggtgttagatgttagcacatcttgctttttttttttttttgagatggagtctcgctctgttgcccaggctggagtgcagtggcacgatcttggctcactgcaagctctgcctcctgggttcacgccattctcctgcctcagcctcccgagtagctgggactacaggcacctgccaccatgcccggctaaatttttgtatttttagtagagacggggtttcaccgtgttagccaggatggtcttgatctcctgacctcgtgatctgcccgcctcggcctcccaaagtgctgggattataggcatgagccactgtgcctggccacatcttgcttttttttttatgatcagaacaaagggcccactctagttctctacatgtcaatcaatcaagcatgttgaataagggacatagaggatttaacttttgttatcataaatggaacttgcaggcatatatcaagaaccctatgaagaattcctctcccatcattttgataaagaactacatcatttttgatagaattggtgaatgttcctaaactgctgaagctacatgttttttgttttgttttacaaagtcaggtgtttgagagttcttttccactctactactactcatagagcttgttttttctttgggtgtgtgctgatcctgttactgagattaattacatggctctgcagtgtagtttacataaaaatgatgttttccacttgattgctgcagatatcaagagtttgttattttcaaatacccatccaacaagagagatggggaggtttttagttatatatgctatatatatatatataactggaaatgttttatatgttttccgaaaatacaataagcctctcttttattcagtgttcttcctcttttctcccttatgaaaaagaaaagatagcacaaaacttaagacttacctaggaaacccattcatattcccaccatgatgtaattataaccctacaattacttcaggtagctacacaatataccaggtaagaatcaatgcacagtataaagaacttattgttcttttctattctttcagttgaataagggccagttggtatgcagcccatgtatatgtgaatggagtaagataaaccccatgatctccttgcacagaattgcaaatgtcttttgccataccaagggccagactcagaacccttggagtcatgtggcagaatttccctcttacataaaccaatgcttgaaaatgctgcaaatgaccctctaatgatccctgaagatcaaaacaggggtaaatgactccctgcaaaacccaacccatgctgctggctgtgggatttttggtgtaagcctatctatgcactctatcagccagaatttggcatttagctcttagttaaatctagtaaaggacagtctattgtttaaagagaaggtgcatttgttcctcaatcaagcaagagcacctgtgttgtactgctttatatctcatgtatatttatagtaatgaaaagactttttaaattgtacacgtttcagtgcctttcttgtgttatgaaaggcaggtagatattatagccataggtaaaaatccatagttaaattgcacactgaccttaaatctctctgtgtatgcccttgtatcttgcatgttaaaagttggattattgggcatgtgtggcagcctgccctgctacatgctagacaagtgtgctttagtacatagccacaagttcttcattctttaaaatgttttgacagatcatctcataataaaaataattcaggaaaactatggggaaatagttacatttcacaaaagatattttaaactctttgtaaaacttagataatagagcctagcagttactttgtatctaattgatacattttatgttaatttaccaccatacattttattaatcaaaattgtatagcatgtgactcttttggctttcagagttctcaaaaatattattttgttgcatgtactgtatgtttagaggcaaccaattatatactcaatatggttttactgtgccttacacaaagagaaactctatacagaatgtatatcatggggtggggtaacagagtctttactgcactgttaggtgatggcacacagagcatgtcccagaacatttctgtgcttaattacccaaccaaagagatctgaagtatgtatgtcgtactgtaatgggggtttatgcctggacaattaagtgttttatttgttttctgaaatgatgtgaacttatttttctaaacactatgctaaataaactttatatttatacataccttgcattga

SEQ ID NO: 181917 - DNA, 1573 bp, Homo sapiens
  Payload ID: 15820
  Gene Symbol: SIX4
  Gene Name: SIX homeobox 4
  ENST ID: ENST00000556952
  CDS Start-End: 91-1573
atatagtatgcagcaaccggaggagtcacgttgggggaacggcagaaagcagctatccgtttacactactttgctctaacagctatcttaatgatcgcaagtgcggcggacatcaagcaagagaatgggatggaaagcgcctcggaagggcaggaggcgcaccgagaagtggcggggggcgcggcggtagggctgagccccccggctccagccccttttcccctggagccgggggacgccgcgaccgctgccgccagggtgagcggagaggaaggggcagtggcggcggcggcggccggagcggcggcggatcaggtacaactccactcggaacttctgggcaggcaccaccacgccgccgccgccgccgcgcagaccccgctggccttctcgcccgaccacgtcgcctgcgtgtgcgaggcactgcagcaggggggcaacctggaccgcctggcccggttcctgtggtccctgccccagagcgacctgctacgtggcaacgagagcctgctgaaggcgcgggcgctcgtggccttccaccagggcatctaccccgagctctacagcatcctcgagagccacagcttcgagtcggccaaccacccgctgctgcagcagctctggtacaaggcgcgctacaccgaggccgagcgagcccgcggccggccgctgggagccgtagacaagtaccggctgcgcaggaaattccccctgccccgcaccatctgggacggcgaggagacggtgtattgtttcaaggagaagtcgcgcaacgcgctcaaggagctctacaagcagaatcgctacccttcgcccgccgagaagcggcacctggccaagatcaccggcctctccctcacccaggtcagcaactggttcaagaaccgccggcagcgcgacaggaacccctccgagacccagtccaaaagtgagtcagatggcaaccccagcactgaagatgaatccagcaagggacatgaggatttatctcctcacccactctccagttcatctgatggcatcaccaacctcagcctttccagtcatatggagccagtatatatgcaacaaattggaaatgctaagatatcattaagctcttctggagttctgttgaatggaagcttggtacctgcaagtacttcacctgtcttccttaatggaaattcttttattcagggacccagtggagttatccttaatggattaaatgtgggaaatacacaggcagtggcattgaacccaccaaaaatgtcatcaaacattgtgagcaatggtatatccatgactgacatactggggtctacttcccaggacgtgaaggaattcaaagtcctccagagttctgctaactcagcaaccaccacgtcctacagccccagtgtccctgtctcattcccaggcctgatacccagcactgaggtgaaaagagaaggcattcaaacagtggcttcccaagatggagggtctgtagtgacttttactacaccagtgcaaattaaccagtatggcattgtccagatccccaattccggagcaaacagccagttccttaatgggagcattggattct

SEQ ID NO: 181918 - DNA, 3318 bp, Homo sapiens
  Payload ID: 15821
  Gene Symbol: SIX5
  Gene Name: SIX homeobox 5
  Uniprot ID: Q8N196
  ENST ID: ENST00000317578
  CDS Start-End: 383-2602
gcagaagctcagtctcggggcggaggcttcgcgcccttagtcctcctggacggcccgttaccttctgcgttgtcccgatggggaaactgaggccctgagccagaagcacacgctggggggaggcagaaagcgcggccagaggcggagggaaaacaaagggagaatcacagacagacgggagggggacggacacacacaaggggacagagacccgagtggagagctggatctcgccttcccggcgtggggcgcagggtcggccagaaagaagatcgagaagagcggggagtgggggcgaaaaggggggacaggtgggggaggaggctggggaaagcccgagggaggaagagagggagggaggaacttcccaaagttgcaaaacatggctaccttgcctgcggagccgagcgcggggccggcggctgggggggaggcggtggcggcggcggcggcgaccgaagaggaggaggaggaagcgcgccagctcttgcagactttgcaggcggccgagggtgaggcggcggcggcggccggggccggggcgggcgcagcggctgcgggagctgagggcccgggatccccgggcgtccccgggtcgccccccgaggccgcttccgaaccgcccacgggcctccgcttctcgcccgagcaggtggcgtgcgtctgcgaggcgctgctccaggcgggccacgccggccgcttgagccgcttcctgggcgcactgcccccggccgagcgcctacgtggcagcgacccggtgttgcgcgcgcgggccctggtggccttccagcggggcgagtacgccgagctctaccggctactcgagagccgccccttccccgccgcccaccacgccttcctgcaggacctctacctgcgcgcgcgctaccatgaggccgagcgggcccgcggccgcgcgcttggcgcagtggacaagtatcgactgcgcaagaagttcccgctgcccaagaccatctgggacggcgaggagacagtctactgcttcaaggagcgctcccgcgcagcgctcaaggcctgctaccgcggcaaccgctaccccacgccggacgagaagcgccgcctggccacactcaccggcctgtcgctcacgcaggtcagcaactggttcaagaaccggcgacagcgcgaccggaccggggccggaggcggcgcgccctgcaagagcgagtctgatgggaatcccacgactgaggacgagtccagccgaagtcctgaggacctggagagaggggcggccccagtgtccgccgaggccgctgcccagggctccatattcctggcagggaccggccctcccgcgccttgcccggcttcctcctccatcctggtgaacgggagcttcctggcagccagcggctccccagcagtgctcctcaacgggggccccgtcatcatcaacggcctggccctgggcgaggcctccagcctgggcccgctgctgctcactgggggcgggggtgcccctccaccgcagcccagccctcagggggccagcgagaccaagacctctctggtcctggaccctcagacaggggaggtgcggctggaggaggctcagtcggaggcccctgagaccaaaggggcccaggtggctgctccgggaccagcccttggagaggaggtcctggggcccctggcccaagtggtgcctggccccccgacggctgccacctttcctctgcccccggggccagtgcctgctgtggctgccccacaagtggtaccgctctccccacccccggggtatcccacgggcctgagccccacctccccactattgaacctgccccaggtagtacccacctcacaggtggtgaccctgccccaggctgtggggcccctgcagctgttggcagccgggccaggcagccctgtgaaggtggcagctgcagcaggccctgccaatgtgcacctcatcaactccggggtgggcgtgactgccctgcagctgccttcggccactgccccaggaaacttcctcctggccaaccctgtgtctggcagccccatcgtgacgggtgtggccctgcagcagggcaagatcatcctcaccgccaccttccccaccagcatgctcgtctcccaggtcctgccgccagcccccggcctggccctgccactgaagccagagacggccatctccgtgcctgagggaggcctcccggtggcccccagccctgctctcccagaggctcacgccctaggcaccctttctgcacagcagccaccccccgccgctgccaccacctccagcaccagcctgcccttctcccctgactcccctggcctcctgcccaacttcccggcgcccccaccagaggggctgatgttgtcacccgcggccgtgcctgtctggtcagcagggctggaactaagcgcaggaacagaggggctgctggaagcggaaaaggggctggggacacaggccccccacaccgtgctgaggctgccagaccccgaccctgaggggctgctcctgggggccaccgcagggggtgaggttgacgaggggttggaagctgaggccaaggttctgacccagctccagtcggtgcctgtggaggagcccttggaactgtgacccagtgtggccccgtggcctctcccgacattggtgctgaagacgcagggacaggaatgggaggggggagccccagaaatgcggttgctgaagaccccagtcaccacatccttctgcctgggtggcctctccaagccctggtggtgctgggggttgtatccccggccacctcctgtccaggtctccatccccctttggatgggaggcctctctgttacagccctccccatgctgtgccctgccatatacgtgggggactcagggtcctgactcaggggccctgccccctccacttggtactagctgtaagcggaacaccctgccccagggccggacttccagcccccagagccctctccctgtcactccctgaaacactattaatagctctgccgatagctggtgttgtcacaactgcctggaatccgaaggtggaggacaggcagccccgcgcccctgagactggagaccctccccagtgtggcatttcctgccaggggcggggggtggggcagctgtggggagacgggggtcttccttcaccagctcccctcgactcaagcccttgtcctcattatccggcccagaccaaagattccctcatccctgggggcagccctgccgctgtgtctcctttgtatcctaaatctttatttttctaggacatgttatgcctccattttcaattaaaataaagttatcggattacaccacca

SEQ ID NO: 181919 - DNA, 1975 bp, Homo sapiens
  Payload ID: 15821
  Gene Symbol: SIX5
  Gene Name: SIX homeobox 5
  ENST ID: ENST00000560168
  CDS Start-End: 12-221
agttgcaaaacatggctaccttgcctgcggagccgagcgcggggccggcggctgggggggaggcggtggcggcggcggcggcgaccgaagaggaggaggaggaagcgcgccagctcttgcagactttgcaggcggccgagggtcagcaactggttcaagaaccggcgacagcgcgaccggaccggggccggaggcggcgcgccctgcaagagcgagtctgatgggaatcccacgactgaggacgagtccagccgaagtcctgaggacctggagagaggggcggccccagtgtccgccgaggccgctgcccagggctccatattcctggcagggaccggccctcccgcgccttgcccggcttcctcctccatcctggtgaacgggagcttcctggcagccagcggctccccagcagtgctcctcaacgggggccccgtcatcatcaacggcctggccctgggcgaggcctccagcctgggcccgctgctgctcactgggggcgggggtgcccctccaccgcagcccagccctcagggggccagcgagaccaagacctctctggtcctggaccctcagacaggggaggtgcggctggaggaggctcagtcggaggcccctgagaccaaaggggcccaggtggctgctccgggaccagcccttggagaggaggtcctggggcccctggcccaagtggtgcctggccccccgacggctgccacctttcctctgcccccggggccagtgcctgctgtggctgccccacaagtggtaccgctctccccacccccggggtatcccacgggcctgagccccacctccccactattgaacctgccccaggtagtacccacctcacaggtggtgaccctgccccaggctgtggggcccctgcagctgttggcagccgggccaggcagccctgtgaaggtggcagctgcagcaggccctgccaatgtgcacctcatcaactccggggtgggcgtgactgccctgcagctgccttcggccactgccccaggtacccccatctccctccctcaggcctaggtgagagccggggaggggtgcagtcatctcggagagggaggggctgtccctgggctcctggagggcatctcatccctggcaagtcccagtgccccaaggcccaccacaaggctccctccgcccgccctccagctgcacagtctccacttctctctggcttggcctgctctcctggctctcacctgcgctcggtccctctctccccacaggaaacttcctcctggccaaccctgtgtctggcagccccatcgtgacgggtgtggccctgcagcagggcaagatcatcctcaccgccaccttccccaccagcatgctcgtctcccaggtcctgccgccagcccccggcctggccctgccactgaagccagagacggccatctccgtgcctgagggaggcctcccggtggcccccagccctgctctcccagaggctcacgccctaggcaccctttctgcacagcagccaccccccgccgctgccaccacctccagcaccagcctgcccttctcccctgactcccctggcctcctgcccaacttcccggcgcccccaccagaggggctgatgttgtcacccgcggccgtgcctgtctggtcagcagggctggaactaagcgcaggaacagaggggctgctggaagcggaaaaggggctggggacacaggccccccacaccgtgctgaggctgccagaccccgaccctgaggggctgctcctgggggccaccgcagggggtgaggttgacgaggggttggaagctgaggccaaggttctgacccagctccagtcggtgcctgtggaggagcccttggaactgtgacccagtgtggccccgtggcctctcccgacattggtgctgaagacgcagggacaggaatgggaggggggagccccagaaatgcggttgctgaagaccccagtcaccaca

SEQ ID NO: 181920 - DNA, 1809 bp, Homo sapiens
  Payload ID: 15821
  Gene Symbol: SIX5
  Gene Name: SIX homeobox 5
  ENST ID: ENST00000560160
  CDS Start-End: 1-767
cccccgaggccgcttccgaaccgcccacgggcctccgcttctcgcccgagcaggtggcgtgcgtctgcgaggcgctgctccaggcgggccacgccggccgcttgagccgcttcctgggcgcactgcccccggccgagcgcctacgtggcagcgacccggtgttgcgcgcgcgggccctggtggccttccagcggggcgagtacgccgagctctaccggctactcgagagccgccccttccccgccgcccaccacgccttcctgcaggacctctacctgcgcgcgcgctaccatgaggccgagcgggcccgcggccgcgcgcttggcgcagtggacaagtatcgactgcgcaagaagttcccgctgcccaagaccatctgggacggcgaggagacagtctactgcttcaaggagcgctcccgcgcagcgctcaaggcctgctaccgcggcaaccgctaccccacgccggacgagaagcgccgcctggccacactcaccggcctgtcgctcacgcaggtcagcaactggttcaagaaccggcgacagcgcgaccggaccggggccggaggcggcgcgccctgcaagaggaaacttcctcctggccaaccctgtgtctggcagccccatcgtgacgggtgtggccctgcagcagggcaagatcatcctcaccgccaccttccccaccagcatgctcgtctcccaggtcctgccgccagcccccggcctggccctgccactgaagccagagacggccatctccgtgcctgagggaggcctcccggtggcccccagccctgctctcccagaggctcacgccctaggcaccctttctgcacagcagccaccccccgccgctgccaccacctccagcaccagcctgcccttctcccctgactcccctggcctcctgcccaacttcccggcgcccccaccagaggggctgatgttgtcacccgcggccgtgcctgtctggtcagcagggctggaactaagcgcaggaacagaggggctgctggaagcggaaaaggggctggggacacaggccccccacaccgtgctgaggctgccagaccccgaccctgaggggctgctcctgggggccaccgcagggggtgaggttgacgaggggttggaagctgaggccaaggttctgacccagctccagtcggtgcctgtggaggagcccttggaactgtgacccagtgtggccccgtggcctctcccgacattggtgctgaagacgcagggacaggaatgggaggggggagccccagaaatgcggttgctgaagaccccagtcaccacatccttctgcctgggtggcctctccaagccctggtggtgctgggggttgtatccccggccacctcctgtccaggtctccatccccctttggatgggaggcctctctgttacagccctccccatgctgtgccctgccatatacgtgggggactcagggtcctgactcaggggccctgccccctccacttggtactagctgtaagcggaacaccctgccccagggccggacttccagcccccagagccctctccctgtcactccctgaaacactattaatagctctgccgatagctggtgttgtcacaactgcctggaatccgaaggtggaggacaggcagccccgcgcccctgagactggagaccctccccagtgtggcatttcctgccaggggcggggggtggggcagctgtggggagacgggggtcttccttcaccagctcccctcgactcaagcccttgtcctcattatccggcccagaccaaagattccctcatccctgggg

SEQ ID NO: 181921 - DNA, 1401 bp, Homo sapiens
  Payload ID: 15821
  Gene Symbol: SIX5
  Gene Name: SIX homeobox 5
  ENST ID: ENST00000622857
  CDS Start-End: 210-686
gacgggagggggacggacacacacaaggggacagagacccgagtggagagctggatctcgccttcccggcgtggggcgcagggtcggccagaaagaagatcgagaagagcggggagtgggggcgaaaaggggggacaggtgggggaggaggctggggaaagcccgagggaggaagagagggagggaggaacttcccaaagttgcaaaacatggctaccttgcctctgaagccagagacggccatctccgtgcctgagggaggcctcccggtggcccccagccctgctctcccagaggctcacgccctaggcaccctttctgcacagcagccaccccccgccgctgccaccacctccagcaccagcctgcccttctcccctgactcccctggcctcctgcccaacttcccggcgcccccaccagaggggctgatgttgtcacccgcggccgtgcctgtctggtcagcagggctggaactaagcgcaggaacagaggggctgctggaagcggaaaaggggctggggacacaggccccccacaccgtgctgaggctgccagaccccgaccctgaggggctgctcctgggggccaccgcagggggtgaggttgacgaggggttggaagctgaggccaaggttctgacccagctccagtcggtgcctgtggaggagcccttggaactgtgacccagtgtggccccgtggcctctcccgacattggtgctgaagacgcagggacaggaatgggaggggggagccccagaaatgcggttgctgaagaccccagtcaccacatccttctgcctgggtggcctctccaagccctggtggtgctgggggttgtatccccggccacctcctgtccaggtctccatccccctttggatgggaggcctctctgttacagccctccccatgctgtgccctgccatatacgtgggggactcagggtcctgactcaggggccctgccccctccacttggtactagctgtaagcggaacaccctgccccagggccggacttccagcccccagagccctctccctgtcactccctgaaacactattaatagctctgccgatagctggtgttgtcacaactgcctggaatccgaaggtggaggacaggcagccccgcgcccctgagactggagaccctccccagtgtggcatttcctgccaggggcggggggtggggcagctgtggggagacgggggtcttccttcaccagctcccctcgactcaagcccttgtcctcattatccggcccagaccaaagattccctcatccctgggggcagccctgccgctgtgtctcctttgtatcctaaatctttatttttctaggacatgttatgcctccattttcaattaaaataaagttatcggattacaccacc

SEQ ID NO: 181922 - DNA, 2787 bp, Homo sapiens
  Payload ID: 15822
  Gene Symbol: SIX6
  Gene Name: SIX homeobox 6
  Uniprot ID: O95475
  ENST ID: ENST00000327720
  CDS Start-End: 449-1189
gacactcgcatgtcttttcaacctccaggttctgcaaaatactgaagaaaagtccaggagctaacggcgggcgctgtcgagcacggggaggtgctgaaatagtcctggcgtgctgattcaagctttgattggcagagccacccggtgactgacagggggtctccatggcgcccgcgccgccaatccgcccaccccaatagcggagccagctcgcctgccggcgtgcctgagccgagccgagcccgaaccccaagccgcggagccagcacctcctccagtcggggtcgtccgctcccggccgttgagccaccgccgccacccggtagtgtgtcccgctgccccaatccgcctcatcaacaagcgcctggcacactcagccaggcccgcgggcatctgctgcgtgtcccgctccgggctcagtgccctcgccgccgccggcactgcctcgatgttccagctgcccatcttgaatttcagcccccagcaagtggccggggtatgtgagaccctggaagagagcggcgatgtggagcgcctgggtcgcttcctctggtcgctgcccgtggcccctgcggcctgcgaggccctcaacaagaatgagtcggtgctacgcgcacgagccatcgtggcctttcacggtggcaactaccgcgagctctatcatatcctggaaaaccacaagttcaccaaggagtcgcacgccaagctgcaggcgctgtggcttgaagcacactaccaggaggctgagaagctgcgtggaagacccctgggacctgtggacaagtaccgagtaaggaagaagttcccgctgccgcgcaccatttgggacggcgaacagaagacacactgcttcaaggagcgcacgcggcacctgctacgcgagtggtacctgcaggatccataccctaaccccagcaaaaaacgtgagctcgcccaggcaaccggactgacccctacgcaggtgggcaactggttcaaaaaccgccgacaaagggaccgagcggctgcagccaagaacagactccagcagcaggtcctgtcacagggttccgggcgggcactacgggcggagggcgacggcacgccagaggtgctgggcgtcgccaccagcccggccgccagtctatccagcaaggcggccacttcagccatctccatcacgtccagcgacagcgagtgcgacatctgagttgcccatccaggatgctcagaagcagattccagtgtaaaaacgagaaaaacaaaatgaaagaggggaagaagatgagagacctgcaaatccagcgccacagaagccaggtgaccagggacccgcgggctcgggttgccgtttcccgccccaccccgcggccggcctggcttcactggcgccctttggccgcgaccacgggaaccagcggtgaggcctgacccagcaccacgttcttcttgctttgctttttcctaaggattttgctgcaaagtctccttcggaacccgaactgcaagctgagcgcctgcccagattctcccatgggtatttcacgtcgaaaggacgctgttacatatgtataactttcgctttaaagtttttttttaacaaaacatatatatgctgtttatttacttatttaagagaccgccatggtaggtttctctgtagcttggggaacttgctgtttctaaacatgcaggctggtggtgatgggttctgtgtggagaagccaaacaataaaacaacctagtgggcaaccttcttaattaagggagctgctctcagattccttttcttcttattattattaatatcattcccttcaccaggcatgcagggacccttgagcaaatggtctccggaaggtcttacctatatatcttttgccttctttggtgcttcctggtatatgttttaaacaacctatggtaggtctataaccacctcccacgtcaaattacacgtatgtgcatatatgtatgtacctatacaaacatatgtatgtacctatacaaacatatgtatgtatgcatacacgtgatatatttaaggctagaaattggcaacatgtgagcgtcctctctaaggcaagtccccgcatccccagcacaggtaattatggcttgtccacttgacactcgtttacatgaagtgtcaacagctttcaggagcaatttaggaagccaaactatgggactcaataagtgagtcctattttctaaaaatgcaaaactatcctgactcaggctctgcagcaagaaaggctttctgtctccttcaaggccccctccaatacaaaagcagcaggcacccatgatcatgctagagtgagcatatactgcatttaggattgagctattattaaaataagacaaaagatgatagaagaggttgtaaataattagactaacatcttcttgctgcagaatttggttttaatcaaatgaatggtttttaacaagagggatactgagatgggggaaaggatgtaatcatgtcacatactgagggtaaaacaaggctgtagaaataactggcattttaaaaacctaatctccgaattaagcatagaacaagtcatcaagggcctcattgtcctggtaatggcctcgattaaaacataaaatatttttagcatttaatttttcctcgtgcacatgcatgtatgcacctatacatgaacaaatgcatgcatatacaacgcaaaaacatctaccatctttgcactaagaaaataaatgctagccagagtctctaattttgttcctagtgaaacagattgcatattataaaatttgacattgatctttaaa

SEQ ID NO: 181923 - DNA, 1313 bp, Homo sapiens
  Payload ID: 15823
  Gene Symbol: STEAP1
  Gene Name: six transmembrane epithelial antigen of the prostate 1
  Uniprot ID: Q9UHE8
  ENST ID: ENST00000297205
  CDS Start-End: 201-1220
gcggacgcggggcgccagcaggtggcgctggacgcgcaacggacaaggaggcggggcctgcagctggcttggaggctccgcgctctggaggctcaggcgccgcgtggggcccgcacctctgggcagcagcggcagccgagactcacggtcaagctaaggcgaagagtgggtggctgaagccatactattttatagaattaatggaaagcagaaaagacatcacaaaccaagaagaactttggaaaatgaagcctaggagaaatttagaagaagacgattatttgcataaggacacgggagagaccagcatgctaaaaagacctgtgcttttgcatttgcaccaaacagcccatgctgatgaatttgactgcccttcagaacttcagcacacacaggaactctttccacagtggcacttgccaattaaaatagctgctattatagcatctctgacttttctttacactcttctgagggaagtaattcaccctttagcaacttcccatcaacaatatttttataaaattccaatcctggtcatcaacaaagtcttgccaatggtttccatcactctcttggcattggtttacctgccaggtgtgatagcagcaattgtccaacttcataatggaaccaagtataagaagtttccacattggttggataagtggatgttaacaagaaagcagtttgggcttctcagtttcttttttgctgtactgcatgcaatttatagtctgtcttacccaatgaggcgatcctacagatacaagttgctaaactgggcatatcaacaggtccaacaaaataaagaagatgcctggattgagcatgatgtttggagaatggagatttatgtgtctctgggaattgtgggattggcaatactggctctgttggctgtgacatctattccatctgtgagtgactctttgacatggagagaatttcactatattcagagcaagctaggaattgtttcccttctactgggcacaatacacgcattgatttttgcctggaataagtggatagatataaaacaatttgtatggtatacacctccaacttttatgatagctgttttccttccaattgttgtcctgatatttaaaagcatactattcctgccatgcttgaggaagaagatactgaagattagacatggttgggaagacgtcaccaaaattaacaaaactgagatatgttcccagttgtagaattactgtttacacacatttttgttcaatattgatatattttatcaccaacatttcaagtttgtatttgttaataaaatgattattcaagga

SEQ ID NO: 181924 - DNA, 707 bp, Homo sapiens
  Payload ID: 15823
  Gene Symbol: STEAP1
  Gene Name: six transmembrane epithelial antigen of the prostate 1
  ENST ID: ENST00000412573
  CDS Start-End: 1-304
cccaatgaggcgatcctacagatacaagttgctaaactgggcatatcaacaggtccaacaaaataaagaagatgcctggattgagcatgatgtttggagaatggagatttatgtgtctctgggaattgtgggattggcaatactggctctgttggctgtgacatctattccatctgtgagtgactctttgacatggagagaatttcactatattcagattatccataagaagagtgatgtgccagaatcactctgggatccttgtctgacaagattcaaaggactaaatttaattcagtcatgaacactgccaattaccgtttatgggtagacatctttggaaatttccacaagagcaagctaggaattgtttcccttctactgggcacaatacacgcattgatttttgcctggaataagtggatagatataaaacaatttgtatggtatacacctccaacttttatgatagctgttttccttccaattgttgtcctgatatttaaaagcatactattcctgccatgcttgaggaagaagatactgaagattagacatggttgggaagacgtcaccaaaattaacaaaactgagatatgttcccagttgtagaattactgtttacacacatttttgttcaatattgatatattttatcaccaacatttcaagtttgtatttgttaataaaatgattattcaaggatc

SEQ ID NO: 181925 - DNA, 1709 bp, Homo sapiens
  Payload ID: 15824
  Gene Symbol: SSB
  Gene Name: Sjogren syndrome antigen B (autoantigen La)
  Uniprot ID: P05455
  ENST ID: ENST00000260956
  CDS Start-End: 175-1401
gctccacctcgtccgtggccctgcccacccaggccgcaagagctgccgggacggtccccatcttcttggagcgctttaggctggccggcggcgctgggaggtggagtcgttgctgttgctgtttgtgagcctgtggcgcggcttctgtgggccggaaccttaaagatagccgcaatggctgaaaatggtgataatgaaaagatggctgccctggaggccaaaatctgtcatcaaattgagtattattttggcgacttcaatttgccacgggacaagtttctaaaggaacagataaaactggatgaaggctgggtacctttggagataatgataaaattcaacaggttgaaccgtctaacaacagactttaatgtaattgtggaagcattgagcaaatccaaggcagaactcatggaaatcagtgaagataaaactaaaatcagaaggtctccaagcaaacccctacctgaagtgactgatgagtataaaaatgatgtaaaaaacagatctgtttatattaaaggcttcccaactgatgcaactcttgatgacataaaagaatggttagaagataaaggtcaagtactaaatattcagatgagaagaacattgcataaagcatttaagggatcaatttttgttgtgtttgatagcattgaatctgctaagaaatttgtagagacccctggccagaagtacaaagaaacagacctgctaatacttttcaaggacgattactttgccaaaaaaaatgaagaaagaaaacaaaataaagtggaagctaaattaagagctaaacaggagcaagaagcaaaacaaaagttagaagaagatgctgaaatgaaatctctagaagaaaagattggatgcttgctgaaattttcgggtgatttagatgatcagacctgtagagaagatttacacatacttttctcaaatcatggtgaaataaaatggatagacttcgtcagaggagcaaaagaggggataattctatttaaagaaaaagccaaggaagcattgggtaaagccaaagatgcaaataatggtaacctacaattaaggaacaaagaagtgacttgggaagtactagaaggagaggtggaaaaagaagcactgaagaaaataatagaagaccaacaagaatccctaaacaaatggaagtcaaaaggtcgtagatttaaaggaaaaggaaagggtaataaagctgcccagcctgggtctggtaaaggaaaagtacagtttcagggcaagaaaacgaaatttgctagtgatgatgaacatgatgaacatgatgaaaatggtgcaactggacctgtgaaaagagcaagagaagaaacagacaaagaagaacctgcatccaaacaacagaaaacagaaaatggtgctggagaccagtagtttagtaaaccaattttttattcattttaaataggttttaaacgacttttgtttgcggggcttttaaaaggaaaaccgaattaggtccacttcaatgtccacctgtgagaaaggaaaaatttttttgttgtttaacttgtctttttgttatgcaaatgagatttctttgaatgtattgttctgtttgtgttatttcagatgattcaaatatcaaaaggaagattcttccattaaattgcctttgtaatatgagaatgtattagtacaaactaactaataaaatatatactatatgaaaagagcaaaaa

SEQ ID NO: 181926 - DNA, 1782 bp, Homo sapiens
  Payload ID: 15824
  Gene Symbol: SSB
  Gene Name: Sjogren syndrome antigen B (autoantigen La)
  Uniprot ID: P05455
  ENST ID: ENST00000409333
  CDS Start-End: 248-1474
ttttttttttttttttttttttacctccaccgccttctagtctcaccgaaggcttgtggccatctctgtaaagtttctggggaggtgggcacggggtaaacgccggagggttctgtggagcctatgggactgactggaggccaaagaactttgggccgcagatgtacaccagcgtcactcttttggtctgttagggccttcatcgctcacatcaggtttcagtgtgaaacgggaaaacatagccgcaatggctgaaaatggtgataatgaaaagatggctgccctggaggccaaaatctgtcatcaaattgagtattattttggcgacttcaatttgccacgggacaagtttctaaaggaacagataaaactggatgaaggctgggtacctttggagataatgataaaattcaacaggttgaaccgtctaacaacagactttaatgtaattgtggaagcattgagcaaatccaaggcagaactcatggaaatcagtgaagataaaactaaaatcagaaggtctccaagcaaacccctacctgaagtgactgatgagtataaaaatgatgtaaaaaacagatctgtttatattaaaggcttcccaactgatgcaactcttgatgacataaaagaatggttagaagataaaggtcaagtactaaatattcagatgagaagaacattgcataaagcatttaagggatcaatttttgttgtgtttgatagcattgaatctgctaagaaatttgtagagacccctggccagaagtacaaagaaacagacctgctaatacttttcaaggacgattactttgccaaaaaaaatgaagaaagaaaacaaaataaagtggaagctaaattaagagctaaacaggagcaagaagcaaaacaaaagttagaagaagatgctgaaatgaaatctctagaagaaaagattggatgcttgctgaaattttcgggtgatttagatgatcagacctgtagagaagatttacacatacttttctcaaatcatggtgaaataaaatggatagacttcgtcagaggagcaaaagaggggataattctatttaaagaaaaagccaaggaagcattgggtaaagccaaagatgcaaataatggtaacctacaattaaggaacaaagaagtgacttgggaagtactagaaggagaggtggaaaaagaagcactgaagaaaataatagaagaccaacaagaatccctaaacaaatggaagtcaaaaggtcgtagatttaaaggaaaaggaaagggtaataaagctgcccagcctgggtctggtaaaggaaaagtacagtttcagggcaagaaaacgaaatttgctagtgatgatgaacatgatgaacatgatgaaaatggtgcaactggacctgtgaaaagagcaagagaagaaacagacaaagaagaacctgcatccaaacaacagaaaacagaaaatggtgctggagaccagtagtttagtaaaccaattttttattcattttaaataggttttaaacgacttttgtttgcggggcttttaaaaggaaaaccgaattaggtccacttcaatgtccacctgtgagaaaggaaaaatttttttgttgtttaacttgtctttttgttatgcaaatgagatttctttgaatgtattgttctgtttgtgttatttcagatgattcaaatatcaaaaggaagattcttccattaaattgcctttgtaatatgagaatgtattagtacaaactaactaataaaatatatactatatgaaaagagcaaaaa

SEQ ID NO: 181927 - DNA, 674 bp, Homo sapiens
  Payload ID: 15824
  Gene Symbol: SSB
  Gene Name: Sjogren syndrome antigen B (autoantigen La)
  ENST ID: ENST00000413002
  CDS Start-End: 108-512
ggagcgctttaggctggccggcggcgctgggaggtggagtcgttgctgttgctgtttgtgagcctgtggcgcggcttctgtgggccggaaccttaaagatagccgcaatggctgaaaatggtgataatgaaaagatggctgccctggaggccaaaatctgtcatcaaattgagtattattttggcgacttcaatttgccacgggacaagtttctaaaggaacagataaaactggatgaaggctgggtacctttggagataatgataaaattcaacaggttgaaccgtctaacaacagactttaatgtaattgtggaagcattgagcaaatccaaggcagaactcatggaaatcagtgaagataaaactaaaatcagaaggtctccaagcaaacccctacctgaagtgactgatgagtataaaaatgatgtaaaaaacagatctgtttatatttctcatcctgttgctcacgttggagtgcagtggtgtgatcatggcccactgcagtcttgacctcctgggctcaagtgatcctcccacctcagcctcctgagtagctgggactacagaaaggcttcccaactgatgcaactcttgatgacataaaagaatggttagaagataaaggtcaagtactaaatattcagatgagaagaacattgcataaagcattta

SEQ ID NO: 181928 - DNA, 545 bp, Homo sapiens
  Payload ID: 15824
  Gene Symbol: SSB
  Gene Name: Sjogren syndrome antigen B (autoantigen La)
  ENST ID: ENST00000417292
  CDS Start-End: 186-545
ggagcgctttaggctggccggcggcgctgggaggtggagtcgttgctgttgctgtttgtgagcctgtggcgcggcttctgtgggccggaaccttaaagtattattttggcgacttcaatttgccacgggacaagtttctaaaggaacagataaaactggatgaaggctgggtacctttggagataatgataaaattcaacaggttgaaccgtctaacaacagactttaatgtaattgtggaagcattgagcaaatccaaggcagaactcatggaaatcagtgaagataaaactaaaatcagaaggtctccaagcaaacccctacctgaagtgactgatgagtataaaaatgatgtaaaaaacagatctgtttatattaaaggcttcccaactgatgcaactcttgatgacataaaagaatggttagaagataaaggtcaagtactaaatattcagatgagaagaacattgcataaagcatttaagggatcaatttttgttgtgtttgatagcattgaatctgctaagaaatttgtagagacccct

SEQ ID NO: 181929 - DNA, 2463 bp, Homo sapiens
  Payload ID: 15824
  Gene Symbol: SSB
  Gene Name: Sjogren syndrome antigen B (autoantigen La)
  ENST ID: ENST00000422006
  CDS Start-End: 1910-2463
aacagaaatgagtgcagaagacatggagaagaacgttcagaatagctttattcataacagcaaaaaactagaaacaacaaaatggtcagaaacagaagaatgggccagacgtcgtggctcactcctgtaatcccagcactttgggaggccaaggtggatggatcccttgaggtcagaagtttgaaacaagcctggccaacatggcaaaaccctgtctctacttaaaacagtacaaaaattagccatgcatggtggcaggcacctataatcccagctacttgggatattgaggcacgagaatcacttgaacccaggggggtagaggttgcggtgagccgagattgcgccactgcactctagcctgtgcaacagagtgagcctctgtctcaaaaaaaggaaaagaaatggaagaatggataaatcagttgtggtatgtgcgtataccacatgttgtggactgtttgtagttccccaaaattcatacattgacatcctaacctccagtgggatggtattaggaagtggggcctttgggaggtaataagatcatgatggtagaattctacctcatgaatgggatttagtgccttgtaagaagagactggagagtttacttcctttctgcttttcaccatgtaaggatacatgaagaagatggccatctgcaaaccaggaagcaggtcatcatgagacaccagatctaacagcatcttgatcttggacttctcagccttcaaaactgcgagcaataaatttctgttgtttaagacacccagtctatgatattttgttatagctgtccaaactgagacccagatatatacatactacatgacctagaacaggcaaagctaatcaatggtagttacttttaaggagggtattgactgagagaggagcccaaaggaactttctggagtgctgaaatgttctatatctcaatctggatggtaattacaaggtggtgttcacttgtgaaacttcattgagcacttaaaattcatgcaccttatagtttgtgtgatataattcaattaaaaaaatgtttagcccccaaaggcccttcttttctctttatctgtcacagttattttattttacatgaagtcttggtaaagaatctgtgctgttttatcaacttccatgtactgtcttctatagaagatctacttatcattttatgcatgctgatctcgtccacttgccaaatatagcaaattgacccaagtaaatttggctgttcacaattattagataatttagaggatagtggaggtcaccaattgttagacataggggtgggctctaggtctccccttaataacctcactttcatatgacttattacaatgaaggaagtttttgtagacaagattcaccttcaaacatctattagcaagaaaacacaaaagtagtcctacaatctattcccaaaattcagggagaccctagatttctggcttttaggcaatctgatattcatcttgcgcgcgcgcgtgcgcgcgcacacacacacacacacacacacacagaaatagaaaaacttagcaagcctagcagccttcagagtggtactcttggcctggagttttgatttagttgagttttctgccccttagtgatgaattctctcaattgccctaaccaaaagtctaaaatattataatcatctgccttgaataatttttcatggatttttttccccctcgcatttaaagtccaggttagaatgataagtccattctacgaagccatcagagttggtatggaactacaggatgttgggacttggcttccttctatcttgctgctttgccacacctatggtgtttccttcatttgcttggtccagttttgctcatcatccacatctagctagttgaagaaaagagaaagtgagatagccgcaatggctgaaaatggtgataatgaaaagatggctgccctggaggccaaaatctgtcatcaaattgagtattattttggcgacttcaatttgccacgggacaagtttctaaaggaacagataaaactggatgaaggctgggtacctttggagataatgataaaattcaacaggttgaaccgtctaacaacagactttaatgtaattgtggaagcattgagcaaatccaaggcagaactcatggaaatcagtgaagataaaactaaaatcagaaggtctccaagcaaacccctacctgaagtgactgatgagtataaaaatgatgtaaaaaacagatctgtttatattaaaggcttcccaactgatgcaactcttgatgacataaaagaatggttagaagataaaggtcaagtactaaatattcagatgagaagaacattgcataaagcatttaagggatcaatttttgttgtgtttgatagcattgaatctgctaagaaatttgtagagacccctggccagaagtacaaagaaacagacctgctaatacttttcaa

SEQ ID NO: 181930 - DNA, 896 bp, Homo sapiens
  Payload ID: 15825
  Gene Symbol: SSNA1
  Gene Name: Sjogren syndrome nuclear autoantigen 1
  Uniprot ID: O43805
  ENST ID: ENST00000322310
  CDS Start-End: 81-440
ccgtgggggagtcgtgcgcaggcgcggacagcgctgcttccgcggcggttggggtggtggggccccgggcggcgttgaccatgacccagcagggcgcggcgctgcagaactacaacaacgagctggtcaagtgcatagaggagctgtgccagaagcgggaggagctgtgccggcagatccaggaggaggaggacgagaagcagcggctgcagaatgaggtgaggcagctgacagagaagctggcccgcgtcaacgagaacctggcacgcaagattgcctctcgcaacgagttcgaccggaccatcgcggagacggaggccgcctacctcaagatcctggagagctcccagactttgctcagcgttctcaagagggaagctgggaacctgaccaaggctacagccccagaccagaaaagtagcggcggcagggacagctgaccagaccacgggcagggcctgcctccgtgtgcccctcagctcagccccagcaagtgtgtgctcagagcatctttgttcttcacggcagcagctaccttccctcactgtctcaggtgccgagaggggcaggtgccagcctccactggcatcagtgacaagcccagggcacagcccacccgggggtcctcgcttcatgctcacacaggctatggggatggtgggctccaggtcagctctgcaaggggcttgtctctgtggcacccacactcctgccctgccagggaggctctggttgtctgagcaccatgggggccccctcaccttgtccctcctcagccagcagaggcccagggcaagggacaggaggacaggggttctccttcaccacagaacccaaacctcaggtctcacccctgtggcctgtgattatgaataaagattatctttgtaaagatc

SEQ ID NO: 181931 - DNA, 723 bp, Homo sapiens
  Payload ID: 15825
  Gene Symbol: SSNA1
  Gene Name: Sjogren syndrome nuclear autoantigen 1
  ENST ID: ENST00000464553
  CDS Start-End: 22-267
gggccccgggcggcgttgaccatgacccagcagggcgcggcgctgcagaactacaacaacgagctggtcaagtgcatagaggagctgtgccagaagcgggaggagctgtgccggcagatccaggaggaggaggacgagaagcagcggctgcagaatgagatcctggagagctcccagactttgctcagcgttctcaagagggaagctgggaacctgaccaaggctacagccccagaccagaaaagtagcggcggcagggacagctgaccagaccacgggcagggcctgcctccgtgtgcccctcagctcagccccagcaagtgtgtgctcagagcatctttgttcttcacggcagcagctaccttccctcactgtctcaggtgccgagaggggcaggtgccagcctccactggcatcagtgacaagcccagggcacagcccacccgggggtcctcgcttcatgctcacacaggctatggggatggtgggctccaggtcagctctgcaaggggcttgtctctgtggcacccacactcctgccctgccagggaggctctggttgtctgagcaccatgggggccccctcaccttgtccctcctcagccagcagaggcccagggcaagggacaggaggacaggggttctccttcaccacagaacccaaacctcaggtctcacccctgtggcctgtgattatgaataaagattatctttgtaaagatc

SEQ ID NO: 181932 - DNA, 698 bp, Homo sapiens
  Payload ID: 15826
  Gene Symbol: SSSCA1
  Gene Name: Sjogren syndrome/scleroderma autoantigen 1
  Uniprot ID: O60232
  ENST ID: ENST00000309328
  CDS Start-End: 63-662
cgcagcggagggcgctccgctttgacgtcacttcctgtgagcccggcggtgacaacggcaacatggccctgaacggagctgaagtcgacgacttctcctgggagcccccgactgaggcggagacgaaggtgctgcaggcgcgacgggagcggcaagatcgcatctcccggctcatgggcgactatctgctgcgcggttaccgcatgctgggcgagacgtgtgcggactgcgggacgatcctcctccaagacaaacagcggaaaatctactgcgtggcttgtcaggaactcgactcagacgtggataaagataatcccgctctgaatgcccaggctgccctctcccaagctcgggagcaccagctggcctcagcctcagagctccccctgggctctcgacctgcgccccagcccccagtacctcgtccggagcactgtgagggagctgcagcaggactcaaggcagcccaggggccacctgctcctgctgtgcctccaaatacagatgtcatggcctgcacacagacagccctcttgcagaagctgacctgggcctctgctgaactgggctctagcacctccctggagactagcatccagctgtgtggccttatccgcgcatgtgcggaggccctgcgcagcctgcagcagctacagcactaagagaagcccctgagaaaaaccctctagaaaaacagc

SEQ ID NO: 181933 - DNA, 713 bp, Homo sapiens
  Payload ID: 15826
  Gene Symbol: SSSCA1
  Gene Name: Sjogren syndrome/scleroderma autoantigen 1
  ENST ID: ENST00000526877
  CDS Start-End: 6-251
gcaacatggccctgaacggagctgaagtcgacgacttctcctgggagcccccgactgaggcggagacgaaggtgctgcaggcgcgacgggagcggcaagatcgcatctcccggctcatgggcgactatctgctgcgcggttaccgcatgctgggcgagacacgatcctcctccaagacaaacagcggaaaatctactgcgtggcttgtcaggaactcgactcagacgtggataaagataatcccgctctgaatgcccaggctgccctctcccaagctcgggagcaccagctggcctcagcctcagagctccccctgggctctcgacctgcgccccagcccccagtacctcgtccggagcactgtgagggagctgcagcaggactcaaggcagcccaggggccacctgctcctgctgtgcctccaaatacagatgtcatggcctgcacacagacagccctcttgcagaagctgacctgggcctctgctgaactgggctctagcacctccctggagactagcatccagctgtgtggccttatccgcgcatgtgcggaggccctgcgcagcctgcagcagctacagcactaagagaagcccctgagaaaaaccctctagaaaaacagctgttcctctgtgtggtttgtttttttcctggttccaagtgtgcatgccagccccagctccactcacctttttccagcttttggcctct

SEQ ID NO: 181934 - DNA, 806 bp, Homo sapiens
  Payload ID: 15826
  Gene Symbol: SSSCA1
  Gene Name: Sjogren syndrome/scleroderma autoantigen 1
  ENST ID: ENST00000527920
  CDS Start-End: 212-394
cggcaacatggccctgaacggagctggtgaggacctgggcggcaggggtttgtggctgtgaggtacgggaggcagcccactccggcaagacccccagtccctatgcctctcttccccagaagtcgacgacttctcctgggagcccccgactgaggcggagacgaaggtgctgcaggcgcgacgggagcggcaagatcgcatctcccggctcatgggcgactatctgctgcgcggttaccgcatgctgggcgagacgtgtgcggactgcgggacgatcctcctccaagacaaacagcggaaaatctactgcgtggcttgtcaggaactcgactcagacgtggataaagataatcccgctttgcgcgacgtggtcccacaaccgttgcctttttaagagaggcccggcccatccagagggggtggggcagaggcggagtctgaggagctggggaaggaacaaagcgaggcctgcgggcggcggctgggctccggcggggccgcggggtgcggggcctgcgggcggcggcccgggcggagcgttggagggaaggaggtggcatcgccgtccgcgccggccccggccatgaacgggctgccctcggcagaggcgccgggcggggcgggctgcgctttggccgggctcccaccgctgccgcgcggcctcagcggcctccttaatgcgagcgggggctcgtggcgggagctggagcgcgtctacagccagcgcagccgcatccacgacgagctgagccgcgccgcccgcgccccggacgggccccgccacgccgccggcgccgccaacgcgg

SEQ ID NO: 181935 - DNA, 879 bp, Homo sapiens
  Payload ID: 15826
  Gene Symbol: SSSCA1
  Gene Name: Sjogren syndrome/scleroderma autoantigen 1
  ENST ID: ENST00000531405
  CDS Start-End: 237-725
cttcctgtgagcccggcggtgacaacggcaacatggccctgaacggagctggtgaggacctgggcggcaggggtttgtggctgtgaggtacgggaggcagcccactccggcaagacccccagtccctatgcctctcttccccagaagtcgacgacttctcctgggagcccccgactgaggcggagacgaaggtgctgcaggcgcgacgggagcggcaagatcgcatctcccggctcatgggcgactatctgctgcgcggttaccgcatgctgggcgagacgtgtgcggactgcgggacgatcctcctccaagacaaacagcggaaaatctactgcgtggcttgtcaggaactcgactcagacgtggataaagataatcccgctctgaatgcccaggctgccctctcccaagctcgggagcaccagctggcctcagcctcagagctccccctgggctctcgacctgcgccccagcccccagtacctcgtccggagcactgtgagggagctgcagcaggactcaaggcagcccaggggccacctgctcctgctgtgcctccaaatacagatgtcatggcctgcacacagacagccctcttgcagaagctgacctgggcctctgctgaactgggctctagcacctccctggagactagcatccagctgtgtggccttatccgcgcatgtgcggaggccctgcgcagcctgcagcagctacagcactaagagaagcccctgagaaaaaccctctagaaaaacagctgttcctctgtgtggtttgtttttttcctggttccaagtgtgcatgccagccccagctccactcacctttttccagcttttggcctcttcacctctccactctgctctccttgacgcc

SEQ ID NO: 181936 - DNA, 1077 bp, Homo sapiens
  Payload ID: 15826
  Gene Symbol: SSSCA1
  Gene Name: Sjogren syndrome/scleroderma autoantigen 1
  ENST ID: ENST00000533115
  CDS Start-End: 1-582
gaagtcgacgacttctcctgggagcccccgactgaggcggagacgaaggtgctgcaggcgcgacgggagcggcaagatcgcatctcccggctcatgggcgactatctgctgcgcggttaccgcatgctgggcgagacgtgtgcggactgcgggacgatcctcctccaagacaaacagcggaaaatctactgcgtggcttgtcaggaactcgactcagacgtggataaagataatcccgctctgaatgcccaggctgccctctcccaagctcgggagcaccagctggcctcagcctcagagctccccctgggctctcgacctgcgccccagcccccagtacctcgtccggagcactgtgagggagctgcagcaggactcaaggcagcccaggggccacctgctcctgctgtgcctccaaatacagatgtcatggcctgcacacagacagccctcttgcagaagctgacctgggcctctgctgaactgggctctagcacctccctggagactagcatccagctgtgtggccttatccgcgcatgtgcggaggccctgcgcagcctgcagcagctacagcactaagagaagcccctgagaaaaaccctctagaaaaacagctgttcctctctttgcgcgacgtggtcccacaaccgttgcctttttaagagaggcccggcccatccagagggggtggggcagaggcggagtctgaggagctggggaaggaacaaagcgaggcctgcgggcggcggctgggctccggcggggccgcggggtgcggggcctgcgggcggcggcccgggcggagcgttggagggaaggaggtggcatcgccgtccgcgccggccccggccatgaacgggctgccctcggcagaggcgccgggcggggcgggctgcgctttggccgggctcccaccgctgccgcgcggcctcagcggcctccttaatgcgagcgggggctcgtggcgggagctggagcgcgtctacagccagcgcagccgcatccacgacgagctgagccgcgccgcccgcgccccggacgggccccgccacgccgccggcgccgccaacgcgg

SEQ ID NO: 181937 - DNA, 739 bp, Homo sapiens
  Payload ID: 15826
  Gene Symbol: SSSCA1
  Gene Name: Sjogren syndrome/scleroderma autoantigen 1
  ENST ID: ENST00000526433
  CDS Start-End: 1-323
gcatctcccggctcatgggcgactatctgctgcgcggttaccgcatgctgggcgagacgtgtgcggactgcgggacgatcctcctccaagacaaacagcggaaaatctactgcgtggcttgtcaggaactcgactcagacgtggataaagataatcccggtggggctgcggcagttggacatgtccttgttgtgccagctgtggggcctgtacgagtcaatccaggactacaaacacctgtgccaagacctgagcttctgccaggacctgtcatcctccctccattcggacagctcctacccaccggatgcgggcctgtctgacgacgaggagcctcccgatgccagcctgcctcctgacccgccaccccttactgtgccccagacgcacaatgcccgtgaccagtggctgcaggatgccttccacatcagcctctgaagggctggggggcagggggcatgcacccatgcaaaaggctcagaaactccccctccggcaagccctcagacttcggagcctgcgccttcccccctaccgcctcacctcacaggagggccaggcatgtattcctcagaggcgaaactgccaaactctttctcctgtcttgggttggctggcactggggcgggcatctagggtacagcctctgctcatggcactgggcctccagttcttccacatgtgtgcacccccagcttggccaaccctcagccttgcggtggggcccgaagcatcttcc

SEQ ID NO: 181938 - DNA, 3332 bp, Homo sapiens
  Payload ID: 15827
  Gene Symbol: SKOR1
  Gene Name: SKI family transcriptional corepressor 1
  Uniprot ID: P84550
  ENST ID: ENST00000341418
  CDS Start-End: 1-2607
atgatcccaaagagcctggtccaggcagcggaaacccagaggggtctctgcgagccaggagggaaaggaagagaggggagaagtggaggaaaaggggagacacgccccagaggagttggaacgcaggagggaaaggggaccatacccggtagcccgagggaaaaacgaggcgagaggggagaaggcgaccccgcgctgctacccgcggaagatttatggcgcctcccgggttccaaggacaggctgcgttcgtcgctgctgccaccgccgggacccccttcttctgactccgggcccggacccccctcctctcactcagggaaaaccgcgcagggacccaggaccctcaactgggccagaaagcaaagtgcaaggaccagcagcaacttgtgtgcctggagccttgcaatggctacgaagatggctgagattccttctagcccatatgagccgggacagcgaggcatgaaggatactcagagaggtgatgcccctcaaagaggaagcccagagccccgaatcctgcagttggcccgagtgggaaacgtatatctgaaggaggaaagctcaaggagtgggcgactggaagctaagaagtggatcccaacaaagttccttgagaacctctctgtcccacacgttgacctcggtggaaaccagctttggagcggcggcatggaggctctcaccactcagctggggccggggcgcgagggcagttcctcgcccaactccaagcaggagctgcagccgtactcgggctccagcgctctcaaacccaaccaggtgggcgagacgtcgctgtacggggtgcccattgtgtcgctggtcatcgacggccaggagcgcctatgcctggcgcagatctccaacaccctcctcaagaactacagctataatgagatccacaaccgccgcgtggccctgggcatcacgtgcgtgcagtgcacgccggtacagctggagattctgcgtcgggccggggccatgcccatctcgtcgcgccgctgcggcatgatcactaagcgagaggccgaacgcctgtgcaagtcgttcctgggcgagcacaaaccacccaagctgcccgagaacttcgccttcgatgtggtgcacgagtgcgcgtggggctcgcgtggtagcttcatccctgcgcgttacaacagctctcgtgccaagtgcatcaagtgcggctactgcagcatgtacttctcgcccaacaagttcatcttccactcgcaccgaacacccgacgccaagtacacgcagcccgatgccgccaacttcaactcctggcgtcgtcacctcaaactcagtgacaagtcggccacagacgaactgagccatgcttgggaggaccgcggacttggcctggcgactggagctagtggcccggcgggcccaggagggcccggtggcggcgccggcgtacgaagctacccggtgatcccggtgcccagcaaaggctttgggctcctgcaaaagctgcccccaccacttttcccccatccttacggcttccctacggccttcggcctatgccccaaaaaggacgacccggttttaggcgcgggcgagccaaagggcggctcctacgtgtcggccttccggccggtggtcaaggacaccgagagcatcgctaagctctacgggagcgcccgggaggcgtacggcgcggggcctgctcgggggccgggacccggcgctgggagcggcggctacgtgagcccggactttctgagcgagggcagctccagctacaattccgcctcgcccgacgtggacaccgcggacgagcccgaggtggacgtggaatccaaccgcttccccgacgacgaggacgcccaagaggagaccgagcccagcgcacccagcgcagggggcggcccagacgctggccggcccgcatttggggacttggcagccgaagacttggtgcggagacctgagaggagcccgccaagcggcggcggcggctacgagctgcgagagccttgcgggcccctaggaggccccgcgccggccaaggtgttcgcgcccgagagggatgagcacgtgaagagcgcggcggtggcgctggggcccgcggcctcctacgtctgcacccccgaggcccacgagccagataaggaagacaatcactcgcccgccgatgatttggaaacgaggaaatcctatccagaccaaaggagtatctcccagccaagtcctgcaaatacagacagaggcgaagatgggcttaccttggatgtcacaggaactcatttggtggagaaagatatcgagaacctggccagagaggaattgcaaaaactgctcctggaacaaatggagctccgcaagaagctggaacgggaatttcagagtctcaaagataattttcaggatcaaatgaagagggaattggcttatcgagaagaaatggtgcaacagctgcaaattgtcagagataccctgtgtaacgaactcgaccaggagcggaaggcgcgctatgccatccagcagaaattgaaagaagcccacgacgccctgcaccatttctcctgcaagatgctgacgccccgccactgcactggcaactgctccttcaagccaccgctgttgccctagggccggcctggccgcacccctgcgccctcaagccatgctgctccttgtaaatacccgctgctgcggtggccctgagcgaggaacaagccattcggacccgaccgatgtaaatacagccgcccgtccgcccgccttcctcccgggctccccggccttgcccgccccctcccgggcgtccctgtccagggccccggcttggtttccaagtgtaaataccgcctcgcgcctcaaatccccctaccccgtgtgaactctagggcatcggacctcaaggggttaactggacagacggggggcgggaggggagagcgccccctcccattgtatagccttgaacccgattgtgaatacaatgtagcaacttcgctggcgcctgccccgcactccccgtcccgtccacttctgaaactcctgttcctaatgacaaagtggctatgtgcaatggatataaatgtactgtgagtctctcggttcagtattaggttcactttaatttatttatgctgtaagttatttttgcttccttctcctggacccacttccagtcccgttttgcattcccctttggattttgctttggctattttttgttgtaacctcttgatgtaacagcactttaaaagggcgacaactgactcacgagatggcaaccacctggagcctgtttggggagaccaccctgtacccgtgactttcgtttttaataataataataataataataa

SEQ ID NO: 181939 - DNA, 3675 bp, Homo sapiens
  Payload ID: 15827
  Gene Symbol: SKOR1
  Gene Name: SKI family transcriptional corepressor 1
  Uniprot ID: P84550
  ENST ID: ENST00000380035
  CDS Start-End: 59-2956
gctgcgagggttgccgaaggcgcacggatctgggcgctgaaaaagccaggatttggcaatggctttgctgtgtggccttgggcaagtcactctgcgtatctgggtttcacttccttcccaatccgaaaacgggattgggttccttgcagcccgggcattcctgaggagcggcggcatggaggctctcaccactcagctggggccggggcgcgagggcagttcctcgcccaactccaagcaggagctgcagccgtactcgggctccagcgctctcaaacccaaccaggtgggcgagacgtcgctgtacggggtgcccattgtgtcgctggtcatcgacggccaggagcgcctatgcctggcgcagatctccaacaccctcctcaagaactacagctataatgagatccacaaccgccgcgtggccctgggcatcacgtgcgtgcagtgcacgccggtacagctggagattctgcgtcgggccggggccatgcccatctcgtcgcgccgctgcggcatgatcactaagcgagaggccgaacgcctgtgcaagtcgttcctgggcgagcacaaaccacccaagctgcccgagaacttcgccttcgatgtggtgcacgagtgcgcgtggggctcgcgtggtagcttcatccctgcgcgttacaacagctctcgtgccaagtgcatcaagtgcggctactgcagcatgtacttctcgcccaacaagttcatcttccactcgcaccgaacacccgacgccaagtacacgcagcccgatgccgccaacttcaactcctggcgtcgtcacctcaaactcagtgacaagtcggccacagacgaactgagccatgcttgggaggacgtcaaggccatgtttaatggcggcacgcgcaagcggaccttctccctacaaggaggcggcggaggcggtgccaatggcgggtcgggtgggcaggggaagggtggtgctggcggcggtggcggcggtggcccagggtgcggtgcagagatggccccaggcccgccgccccacaaaagcctgcgctgtggcgaagatgaggctgccgggcctccggggccacctccaccccacccgcagcgcggacttggcctggcgactggagctagtggcccggcgggcccaggagggcccggtggcggcgccggcgtacgaagctacccggtgatcccggtgcccagcaaaggctttgggctcctgcaaaagctgcccccaccacttttcccccatccttacggcttccctacggccttcggcctatgccccaaaaaggacgacccggttttaggcgcgggcgagccaaagggcggtcctggcactgggagcggcggcggcggcgcggggacaggcgggggtgcggggggcccgggagccagccacttgcccccgggggcaggggcgggcccgggcggcggcgccatgttctgggggcatcaaccctccggggcagccaaggacgcagcggcagtggctgcagcggccgccgccgccactgtgtacccgacgtttcccatgttctggccagcagcaggcagcctcccggtaccgtcctaccccgctgctcagagccaagccaaggccgtggcggcagccgtggcggcggcagcggcggcggcagcggcagctgctggcagcggtgccccagagcccctggacggtgccgagccagccaaagagagtggcctcggcgcggaggagcgctgcccgagcgctctgtcccgcgggcccctggacgaagacggcacggacgaggcgctgccaccgcccctggccccgttgcccccgccgcccccgccgcccgcacgcaaaggctcctacgtgtcggccttccggccggtggtcaaggacaccgagagcatcgctaagctctacgggagcgcccgggaggcgtacggcgcggggcctgctcgggggccgggacccggcgctgggagcggcggctacgtgagcccggactttctgagcgagggcagctccagctacaattccgcctcgcccgacgtggacaccgcggacgagcccgaggtggacgtggaatccaaccgcttccccgacgacgaggacgcccaagaggagaccgagcccagcgcacccagcgcagggggcggcccagacggtgaacagcccactggacccccttccgccacctcctctggcgcggacggtcccgcaaactctcccgacggcggcagcccccgcccccggcgccgcctcgggccacccccagctggccggcccgcatttggggacttggcagccgaagacttggtgcggagacctgagaggagcccgccaagcggcggcggcggctacgagctgcgagagccttgcgggcccctaggaggccccgcgccggccaaggtgttcgcgcccgagagggatgagcacgtgaagagcgcggcggtggcgctggggcccgcggcctcctacgtctgcacccccgaggcccacgagccagataaggaagacaatcactcgcccgccgatgatttggaaacgaggaaatcctatccagaccaaaggagtatctcccagccaagtcctgcaaatacagacagaggcgaagatgggcttaccttggatgtcacaggaactcatttggtggagaaagatatcgagaacctggccagagaggaattgcaaaaactgctcctggaacaaatggagctccgcaagaagctggaacgggaatttcagagtctcaaagataattttcaggatcaaatgaagagggaattggcttatcgagaagaaatggtgcaacagctgcaaattgtcagagataccctgtgtaacgaactcgaccaggagcggaaggcgcgctatgccatccagcagaaattgaaagaagcccacgacgccctgcaccatttctcctgcaagatgctgacgccccgccactgcactggcaactgctccttcaagccaccgctgttgccctagggccggcctggccgcacccctgcgccctcaagccatgctgctccttgtaaatacccgctgctgcggtggccctgagcgaggaacaagccattcggacccgaccgatgtaaatacagccgcccgtccgcccgccttcctcccgggctccccggccttgcccgccccctcccgggcgtccctgtccagggccccggcttggtttccaagtgtaaataccgcctcgcgcctcaaatccccctaccccgtgtgaactctagggcatcggacctcaaggggttaactggacagacggggggcgggaggggagagcgccccctcccattgtatagccttgaacccgattgtgaatacaatgtagcaacttcgctggcgcctgccccgcactccccgtcccgtccacttctgaaactcctgttcctaatgacaaagtggctatgtgcaatggatataaatgtactgtgagtctctcggttcagtattaggttcactttaatttatttatgctgtaagttatttttgcttccttctcctggacccacttccagtcccgttttgcattcccctttggattttgctttggctattttttgttgtaacctcttgatgtaacagcactttaaaagggcgacaactgactcacgagatggcaaccacctggagcctgtttggggagaccaccctgtacccgtgactttcgtttttaataataataataataa

SEQ ID NO: 181940 - DNA, 3597 bp, Homo sapiens
  Payload ID: 15827
  Gene Symbol: SKOR1
  Gene Name: SKI family transcriptional corepressor 1
  ENST ID: ENST00000554240
  CDS Start-End: 115-2895
gcgccgtcacccggagagcccggcggatcccggactcccgcccgccgctcctcccgccgcgcacctccgctcaccgctcgcccggctccagccgccgccgcactgagcggcggcatggaggctctcaccactcagctggggccggggcgcgagggcagttcctcgcccaactccaagcaggagctgcagccgtactcgggctccagcgctctcaaacccaaccaggtgggcgagacgtcgctgtacggggtgcccattgtgtcgctggtcatcgacggccaggagcgcctatgcctggcgcagatctccaacaccctcctcaagaactacagctataatgagatccacaaccgccgcgtggccctgggcatcacgtgcgtgcagtgcacgccggtacagctggagattctgcgtcgggccggggccatgcccatctcgtcgcgccgctgcggcatgatcactaagcgagaggccgaacgcctgtgcaagtcgttcctgggcgagcacaaaccacccaagctgcccgagaacttcgccttcgatgtggtgcacgagtgcgcgtggggctcgcgtggtagcttcatccctgcgcgttacaacagctctcgtgccaagtgcatcaagtgcggctactgcagcatgtacttctcgcccaacaagttcatcttccactcgcaccgaacacccgacgccaagtacacgcagcccgatgccgccaacttcaactcctggcgtcgtcacctcaaactcagtgacaagtcggccacagacgaactgagccatgcttgggaggacgtcaaggccatgtttaatggcggcacgcgcaagcggaccttctccctacaaggaggcggcggaggcggtgccaatggcgggtcgggtgggcaggggaagggtggtgctggcggcggtggcggcggtggcccagggtgcggtgcagagatggccccaggcccgccgccccacaaaagcctgcgctgtggcgaagatgaggctgccgggcctccggggccacctccaccccacccgcagcgcggacttggcctggcgactggagctagtggcccggcgggcccaggagggcccggtggcggcgccggcgtacgaagctacccggtgatcccggtgcccagcaaaggctttgggctcctgcaaaagctgcccccaccacttttcccccatccttacggcttccctacggccttcggcctatgccccaaaaaggacgacccggttttaggcgcgggcgagccaaagggcggtcctggcactgggagcggcggcggcggcgcggggacaggcgggggtgcggggggcccgggagccagccacttgcccccgggggcaggggcgggcccgggcggcggcgccatgttctgggggcatcaaccctccggggcagccaaggacgcagcggcagtggctgcagcggccgccgccgccactgtgtacccgacgtttcccatgttctggccagcagcaggcagcctcccggtaccgtcctaccccgctgctcagagccaagccaaggccgtggcggcagccgtggcggcggcagcggcggcggcagcggcagctgctggcagcggtgccccagagcccctggacggtgccgagccagccaaagagagtggcctcggcgcggaggagcgctgcccgagcgctctgtcccgcgggcccctggacgaagacggcacggacgaggcgctgccaccgcccctggccccgttgcccccgccgcccccgccgcccgcacgcaaaggctcctacgtgtcggccttccggccggtggtcaaggacaccgagagcatcgctaagctctacgggagcgcccgggaggcgtacggcgcggggcctgctcgggggccgggacccggcgctgggagcggcggctacgtgagcccggactttctgagcgagggcagctccagctacaattccgcctcgcccgacgtggacaccgcggacgagcccgaggtggacgtggaatccaaccgcttccccgacgacgaggacgcccaagaggagaccgagcccagcgcacccagcgcagggggcggcccagacggtgaacagcccactggacccccttccgccacctcctctggcgcggacggtcccgcaaactctcccgacggcggcagcccccgcccccggcgccgcctcgggccacccccagctggccggcccgcatttggggacttggcagccgaagacttggtgcggagacctgagaggagcccgccaagcggcggcggcggctacgagctgcgagagccttgcgggcccctaggaggccccgcgccggccaaggtgttcgcgcccgagagggatgagcacgtgaagagcgcggcggtggcgctggggcccgcggcctcctacgtctgcacccccgaggcccacgagccagataaggaagacaatcactcgcccgccgatgatttggaaacgaggaaatcctatccagaccaaaggagtatctcccagccaagtcctgcaaatacagacagaggcgaagatgggcttaccttggatgtcacaggaactcatttggtggagaaagatatcgagaacctggccagagaggaattgcaaaaactgctcctggaacaaatggagctccgcaagaagctggaacgggaatttcagagtctcaaagataattttcaggatcaaatgaagagggaattggcttatcgagaagaaatggtgcaacagctgcaaattgtcagagataccctgtgtaacgaactcgaccaggagcggaaggcgcgctatgccatccagcagaaattgaaagaagcccacgacgccctgcaccatttctcctgcaagatgctgacgccccgccactgcactggcaactgctccttcaagccaccgctgttgccctagggccggcctggccgcacccctgcgccctcaagccatgctgctccttgtaaatacccgctgctgcggtggccctgagcgaggaacaagccattcggacccgaccgatgtaaatacagccgcccgtccgcccgccttcctcccgggctccccggccttgcccgccccctcccgggcgtccctgtccagggccccggcttggtttccaagtgtaaataccgcctcgcgcctcaaatccccctaccccgtgtgaactctagggcatcggacctcaaggggttaactggacagacggggggcgggaggggagagcgccccctcccattgtatagccttgaacccgattgtgaatacaatgtagcaacttcgctggcgcctgccccgcactccccgtcccgtccacttctgaaactcctgttcctaatgacaaagtggctatgtgcaatggatataaatgtactgtgagtctctcggttcagtattaggttcactttaatttatttatgctgtaagttatttttgcttccttctcctggacccacttccagtcccgttttgcattcccctttggattttgctttggctattttttgttgtaacctcttgatgtaacagcactttaaaagggcgacaactgactcacgagatggcaaccacctggagcctgtttggggagaccaccctgtacccgtgactttcgttttt

SEQ ID NO: 181941 - DNA, 3620 bp, Homo sapiens
  Payload ID: 15827
  Gene Symbol: SKOR1
  Gene Name: SKI family transcriptional corepressor 1
  ENST ID: ENST00000554054
  CDS Start-End: 88-2901
gggcttcaggacccgggccggcagcaccggctgcgagggttgccgaaggcgcacggatctgggcgctgaaaaagccaggatttggcaatggctttgctgtgtggccttgggagcggcggcatggaggctctcaccactcagctggggccggggcgcgagggcagttcctcgcccaactccaagcaggagctgcagccgtactcgggctccagcgctctcaaacccaaccaggtgggcgagacgtcgctgtacggggtgcccattgtgtcgctggtcatcgacggccaggagcgcctatgcctggcgcagatctccaacaccctcctcaagaactacagctataatgagatccacaaccgccgcgtggccctgggcatcacgtgcgtgcagtgcacgccggtacagctggagattctgcgtcgggccggggccatgcccatctcgtcgcgccgctgcggcatgatcactaagcgagaggccgaacgcctgtgcaagtcgttcctgggcgagcacaaaccacccaagctgcccgagaacttcgccttcgatgtggtgcacgagtgcgcgtggggctcgcgtggtagcttcatccctgcgcgttacaacagctctcgtgccaagtgcatcaagtgcggctactgcagcatgtacttctcgcccaacaagttcatcttccactcgcaccgaacacccgacgccaagtacacgcagcccgatgccgccaacttcaactcctggcgtcgtcacctcaaactcagtgacaagtcggccacagacgaactgagccatgcttgggaggacgtcaaggccatgtttaatggcggcacgcgcaagcggaccttctccctacaaggaggcggcggaggcggtgccaatggcgggtcgggtgggcaggggaagggtggtgctggcggcggtggcggcggtggcccagggtgcggtgcagagatggccccaggcccgccgccccacaaaagcctgcgctgtggcgaagatgaggctgccgggcctccggggccacctccaccccacccgcagcgcggacttggcctggcgactggagctagtggcccggcgggcccaggagggcccggtggcggcgccggcgtacgaagctacccggtgatcccggtgcccagcaaaggctttgggctcctgcaaaagctgcccccaccacttttcccccatccttacggcttccctacggccttcggcctatgccccaaaaaggacgacccggttttaggcgcgggcgagccaaagggcggtcctggcactgggagcggcggcggcggcgcggggacaggcgggggtgcggggggcccgggagccagccacttgcccccgggggcaggggcgggcccgggcggcggcgccatgttctgggggcatcaaccctccggggcagccaaggacgcagcggcagtggctgcagcggccgccgccgccactgtgtacccgacgtttcccatgttctggccagcagcaggcagcctcccggtaccgtcctaccccgctgctcagagccaagccaaggccgtggcggcagccgtggcggcggcagcggcggcggcagcggcagctgctggcagcggtgccccagagcccctggacggtgccgagccagccaaagagagtggcctcggcgcggaggagcgctgcccgagcgctctgtcccgcgggcccctggacgaagacggcacggacgaggcgctgccaccgcccctggccccgttgcccccgccgcccccgccgcccgcacgcaaaggctcctacgtgtcggccttccggccggtggtcaaggacaccgagagcatcgctaagctctacgggagcgcccgggaggcgtacggcgcggggcctgctcgggggccgggacccggcgctgggagcggcggctacgtgagcccggactttctgagcgagggcagctccagctacaattccgcctcgcccgacgtggacaccgcggacgagcccgaggtggacgtggaatccaaccgcttccccgacgacgaggacgcccaagaggagaccgagcccagcgcacccagcgcagggggcggcccagacggtgaacagcccactggacccccttccgccacctcctctggcgcggacggtcccgcaaactctcccgacggcggcagcccccgcccccggcgccgcctcgggccacccccagctggccggcccgcatttggggacttggcagccgaagacttggtgcggagacctgagaggagcccgccaagcggcggcggcggctacgagctgcgagagccttgcgggcccctaggaggccccgcgccggccaaggtgttcgcgcccgagagggatgagcacgtgaagagcgcggcggtggcgctggggcccgcggcctcctacgtctgcacccccgaggcccacgagccagataaggaagacaatcactcgcccgccgatgatttggaaacgaggaaatcctatccagaccaaaggagtatctcccagccaagtcctgcaaatacagacagaggcgaagatgggcttaccttggatgtcacaggaactcatttggtggagaaagatatcgagaacctggccagagaggaattgcaaaaactgctcctggaacaaatggagctccgcaagaagctggaacgggaatttcagagtctcaaagataattttcaggatcaaatgaagagggaattggcttatcgagaagaaatggtgcaacagctgcaaattgtcagagataccctgtgtaacgaactcgaccaggagcggaaggcgcgctatgccatccagcagaaattgaaagaagcccacgacgccctgcaccatttctcctgcaagatgctgacgccccgccactgcactggcaactgctccttcaagccaccgctgttgccctagggccggcctggccgcacccctgcgccctcaagccatgctgctccttgtaaatacccgctgctgcggtggccctgagcgaggaacaagccattcggacccgaccgatgtaaatacagccgcccgtccgcccgccttcctcccgggctccccggccttgcccgccccctcccgggcgtccctgtccagggccccggcttggtttccaagtgtaaataccgcctcgcgcctcaaatccccctaccccgtgtgaactctagggcatcggacctcaaggggttaactggacagacggggggcgggaggggagagcgccccctcccattgtatagccttgaacccgattgtgaatacaatgtagcaacttcgctggcgcctgccccgcactccccgtcccgtccacttctgaaactcctgttcctaatgacaaagtggctatgtgcaatggatataaatgtactgtgagtctctcggttcagtattaggttcactttaatttatttatgctgtaagttatttttgcttccttctcctggacccacttccagtcccgttttgcattcccctttggattttgctttggctattttttgttgtaacctcttgatgtaacagcactttaaaagggcgacaactgactcacgagatggcaaccacctggagcctgtttggggagaccaccctgtacccgtgactttcgtttttaataataataataataa

SEQ ID NO: 181942 - DNA, 891 bp, Homo sapiens
  Payload ID: 15828
  Gene Symbol: SKOR2
  Gene Name: SKI family transcriptional corepressor 2
  Uniprot ID: Q2VWA4
  ENST ID: ENST00000400404
  CDS Start-End: 1-891
atggcttccagtccgctgccagggcccaacgacatcctgctggcgtcgccgtcgagcgccttccagcccgacacgctgagccagccgcggccagggcacgccaacctcaaacccaaccaggtgggccaggtgatcctctacggcattcccatcgtgtcgttggtgatcgacgggcaagagcgcctgtgcctggcgcagatctccaacactctgctcaagaacttcagctacaacgagatccacaaccgtcgcgtggcactgggcatcacgtgtgtgcagtgcacgccggtgcaactggagatcctgcggcgtgccggggccatgcccatctcatcgcgccgctgcggcatgatcaccaaacgcgaggccgagcgtctgtgcaagtcgttcctgggcgaaaacaggccgcccaagctgccagacaatttcgccttcgacgtgtcacacgagtgcgcctggggctgccgcggcagcttcattcccgcgcgctacaacagctcgcgcgccaagtgcatcaaatgcagctactgcaacatgtacttctcgcccaacaagttcattttccactcccaccgcacgcccgacgccaagtacactcagccagacgcagccaacttcaactcgtggcgccgtcatctcaagctcaccgacaagagtccccaggacgagctggtcttcgcctgggaggacgtcaaggccatgttcaacggcggcagccgcaagcgcgcactgccccagccgggcgcgcaccccgcctgccacccgctcagctctataagaacaaggagcatagctttttcatcacagactctgatgcttctggaggagatttttggagagaaagatcaggaggattatatgcgaataaatgaggacaacatttggttatga

SEQ ID NO: 181943 - DNA, 3006 bp, Homo sapiens
  Payload ID: 15828
  Gene Symbol: SKOR2
  Gene Name: SKI family transcriptional corepressor 2
  Uniprot ID: Q2VWA4
  ENST ID: ENST00000425639
  CDS Start-End: 1-3006
atggcttccagtccgctgccagggcccaacgacatcctgctggcgtcgccgtcgagcgccttccagcccgacacgctgagccagccgcggccagggcacgccaacctcaaacccaaccaggtgggccaggtgatcctctacggcattcccatcgtgtcgttggtgatcgacgggcaagagcgcctgtgcctggcgcagatctccaacactctgctcaagaacttcagctacaacgagatccacaaccgtcgcgtggcactgggcatcacgtgtgtgcagtgcacgccggtgcaactggagatcctgcggcgtgccggggccatgcccatctcatcgcgccgctgcggcatgatcaccaaacgcgaggccgagcgtctgtgcaagtcgttcctgggcgaaaacaggccgcccaagctgccagacaatttcgccttcgacgtgtcacacgagtgcgcctggggctgccgcggcagcttcattcccgcgcgctacaacagctcgcgcgccaagtgcatcaaatgcagctactgcaacatgtacttctcgcccaacaagttcattttccactcccaccgcacgcccgacgccaagtacactcagccagacgcagccaacttcaactcgtggcgccgtcatctcaagctcaccgacaagagtccccaggacgagctggtcttcgcctgggaggacgtcaaggccatgttcaacggcggcagccgcaagcgcgcactgccccagccgggcgcgcaccccgcctgccacccgctcagctctgtgaaggcggccgccgtggccgccgcggccgcggtggccggaggcgggggtctgctgggcccccacctgctgggtgcgcccccgccgccgccgccgccaccgccgcccttggcagagctggctggtgccccgcacgcccatcacaagcggccgcgcttcgacgacgacgacgactccttgcaggaggccgccgtagtggccgccgccagcctctcggccgcagccgccagcctctctgtggctgctgcttcgggcggcgcggggactggtgggggcggcgctgggggtggctgtgtggccggcgtgggcgtgggcgcgggcgcgggggcgggtgccggggcaggggccaaaggcccgcgcagctacccagtcatcccggtgcccagcaagggctcgttcgggggcgtcctgcagaagttcccgggctgcggcgggctcttcccgcacccctacaccttccctgccgcggccgccgccttcagcttgtgccataagaaagaggatgcgggtgccgccgctgaggccctggggggcgcgggcgcaggcggcgcgggcgcggcgcccaaggccggcttgtccggcctcttctggcccgcgggccgcaaggacgccttctatccgcccttctgcatgttctggccgccgcggacccctggcgggctcccggtgcccacctacctgcagcccccgcctcagccgccctcggcgctaggctgcgcgctaggcgaaagcccggccctgctgcgccaggccttcctggacctggctgagccaggcggtgctgctgggagcgccgaggccgcgcccccgccggggcagcccccgcaggtagtggccaacggcccgggctccggcccacctcctcctgccgggggcgccggctctcgcgacgcgctcttcgagtcgcccccgggcggcagcggcggggactgcagcgcgggctccacgccgcccgcggactctgtggcagctgccggggcaggggccgcggccgccgggtctggccccgcgggctcccgggttccggcgccccaccatccgcaccttctggaggggcgcaaagcgggcggtggcagctaccaccattccagcgccttccggccagtgggcggcaaggacgacgcggagagcctggccaagctgcacggggcgtcggcgggcgcgccccactcggcccagacgcatccccaccaccatcaccaccctcaccaccaccaccaccaccaccaccccccgcagccgccgtcgccgcttctgctgctgcccccgcagcccgacgagccgggttccgagcgccaccacccggccccgccgccgccgccgccgccgcccccgccgccccctctggcccagcacccgcaccaccgaggccttctgtctcccgggggaaccagctgctgctaccccagcgaggacagctccgaggacgaggacgacgaggaagaagagcaggaggtggacgtggagggccacaagccccccgagggcgaggaagaggaggaaggtcgagaccctgacgacgacgaggaagaggacgaggagacggaggtcctactcggcgaccccttagtcgggggcggccggttcctccagggccgagggccgtcggagaaggggagcagccgggaccgcgcgccggccgtcgcgggcgcgttcccgctcggcctgaactcctccaggctgctgcaggaagacgggaaactcggggaccccggctcggacctgcccccgcccccgccgccgcccctggccccccagaaggcgagtggcggcggcagcagcagcccgggcagcccagttcaccatccatcactggaggagcagccctcctacaaagatagtcagaaaactaaggaaaataaccaagtaattgtatctacaaaggatgacaacagcttttcagataagaacaaggagcatagctttttcatcacagactctgatgcttctggaggagatttttggagagaaagatcaggtgaacatacacaagaaaccaactcacctcattcactgaaaaaggatgtagaaaatatggggaaagaagaacttcagaaggttttatttgaacaaatagatttacggagacgactggaacaagaattccaggtgttaaaaggaaacacatctttcccagtattcaataattttcaggatcagatgaaaagggagctagcctaccgagaagaaatggtgcaacagttacaaattgtaagctgcatttctacttaa

SEQ ID NO: 181944 - DNA, 3048 bp, Homo sapiens
  Payload ID: 15828
  Gene Symbol: SKOR2
  Gene Name: SKI family transcriptional corepressor 2
  ENST ID: ENST00000620245
  CDS Start-End: 1-3048
atggcttccagtccgctgccagggcccaacgacatcctgctggcgtcgccgtcgagcgccttccagcccgacacgctgagccagccgcggccagggcacgccaacctcaaacccaaccaggtgggccaggtgatcctctacggcattcccatcgtgtcgttggtgatcgacgggcaagagcgcctgtgcctggcgcagatctccaacactctgctcaagaacttcagctacaacgagatccacaaccgtcgcgtggcactgggcatcacgtgtgtgcagtgcacgccggtgcaactggagatcctgcggcgtgccggggccatgcccatctcatcgcgccgctgcggcatgatcaccaaacgcgaggccgagcgtctgtgcaagtcgttcctgggcgaaaacaggccgcccaagctgccagacaatttcgccttcgacgtgtcacacgagtgcgcctggggctgccgcggcagcttcattcccgcgcgctacaacagctcgcgcgccaagtgcatcaaatgcagctactgcaacatgtacttctcgcccaacaagttcattttccactcccaccgcacgcccgacgccaagtacactcagccagacgcagccaacttcaactcgtggcgccgtcatctcaagctcaccgacaagagtccccaggacgagctggtcttcgcctgggaggacgtcaaggccatgttcaacggcggcagccgcaagcgcgcactgccccagccgggcgcgcaccccgcctgccacccgctcagctctgtgaaggcggccgccgtggccgccgcggccgcggtggccggaggcgggggtctgctgggcccccacctgctgggtgcgcccccgccgccgccgccgccaccgccgcccttggcagagctggctggtgccccgcacgcccatcacaagcggccgcgcttcgacgacgacgacgactccttgcaggaggccgccgtagtggccgccgccagcctctcggccgcagccgccagcctctctgtggctgctgcttcgggcggcgcggggactggtgggggcggcgctgggggtggctgtgtggccggcgtgggcgtgggcgcgggcgcgggggcgggtgccggggcaggggccaaaggcccgcgcagctacccagtcatcccggtgcccagcaagggctcgttcgggggcgtcctgcagaagttcccgggctgcggcgggctcttcccgcacccctacaccttccctgccgcggccgccgccttcagcttgtgccataagaaagaggatgcgggtgccgccgctgaggccctggggggcgcgggcgcaggcggcgcgggcgcggcgcccaaggccggcttgtccggcctcttctggcccgcgggccgcaaggacgccttctatccgcccttctgcatgttctggccgccgcggacccctggcgggctcccggtgcccacctacctgcagcccccgcctcagccgccctcggcgctaggctgcgcgctaggcgaaagcccggccctgctgcgccaggccttcctggacctggctgagccaggcggtgctgctgggagcgccgaggccgcgcccccgccggggcagcccccgcaggtagtggccaacggcccgggctccggcccacctcctcctgccgggggcgccggctctcgcgacgcgctcttcgagtcgcccccgggcggcagcggcggggactgcagcgcgggctccacgccgcccgcggactctgtggcagctgccggggcaggggccgcggccgccgggtctggccccgcgggctcccgggttccggcgccccaccatccgcaccttctggaggggcgcaaagcgggcggtggcagctaccaccattccagcgccttccggccagtgggcggcaaggacgacgcggagagcctggccaagctgcacggggcgtcggcgggcgcgccccactcggcccagacgcatccccaccaccatcaccaccctcaccaccaccaccaccaccaccaccccccgcagccgccgtcgccgcttctgctgctgcccccgcagcccgacgagccgggttccgagcgccaccacccggccccgccgccgccgccgccgccgcccccgccgccccctctggcccagcacccgcaccaccgaggccttctgtctcccgggggaaccagctgctgctaccccagcgaggacagctccgaggacgaggacgacgaggaagaagagcaggaggtggacgtggagggccacaagccccccgagggcgaggaagaggaggaaggtcgagaccctgacgacgacgaggaagaggacgaggagacggaggtcctactcggcgaccccttagtcgggggcggccggttcctccagggccgagggccgtcggagaaggggagcagccgggaccgcgcgccggccgtcgcgggcgcgttcccgctcggcctgaactcctccaggctgctgcaggaagacgggaaactcggggaccccggctcggacctgcccccgcccccgccgccgcccctggccccccagaaggcgagtggcggcggcagcagcagcccgggcagcccagttcaccatccatcactggaggagcagccctcctacaaagatagtcagaaaactaaggaaaataaccaagtaattgtatctacaaaggatgacaacagcttttcagataagaacaaggagcatagctttttcatcacagactctgatgcttctggaggagatttttggagagaaagatcaggtgaacatacacaagaaaccaactcacctcattcactgaaaaaggatgtagaaaatatggggaaagaagaacttcagaaggttttatttgaacaaatagatttacggagacgactggaacaagaattccaggtgttaaaaggaaacacatctttcccagtattcaataattttcaggatcagatgaaaagggagctagcctaccgagaagaaatggtgcaacagttacaaattatcccctatgcagcaagtttgatcaggaaagaaaagcttggcgcccatctcagcaaaagctaa

SEQ ID NO: 181945 - DNA, 5613 bp, Homo sapiens
  Payload ID: 15829
  Gene Symbol: SKI
  Gene Name: SKI proto-oncogene
  Uniprot ID: P12755
  ENST ID: ENST00000378536
  CDS Start-End: 73-2259
cggggcggcggcgggggccgggggggcccgggcgcgcgggagcgggagcggccgggggagccggagcgcaccatggaggcggcggcaggcggccgcggctgtttccagccgcacccggggctgcagaagacgctggagcagttccacctgagctccatgagctcgctgggcggcccggccgctttctcggcgcgctgggcgcaggaggcctacaagaaggagagcgccaaggaggcgggcgcggccgcggtgccggcgccggtgcccgcagccaccgagccgccgcccgtgctgcacctgcccgccatccagccgccgccgcccgtgctgcccgggcccttcttcatgccgtccgaccgctccaccgagcgctgcgagaccgtactggaaggcgagaccatctcgtgcttcgtggtgggaggcgagaagcgcctgtgtctgccgcagattctcaactcggtgctgcgcgacttctcgctgcagcagatcaacgcggtgtgcgacgagctccacatctactgctcgcgctgcacggccgaccagctggagatcctcaaagtcatgggcatcctgcccttctcggcgccctcgtgcgggctcatcaccaagacggacgccgagcgcctgtgcaacgcgctgctctacggcggcgcctacccgccgccctgcaagaaggagctggccgccagcctggcgctgggcctggagctcagcgagcgcagcgtccgcgtgtaccacgagtgcttcggcaagtgtaaggggctgctggtgcccgagctctacagcagcccgagcgccgcctgcatccagtgcctggactgccgcctcatgtacccgccgcacaagttcgtggtgcactcgcacaaggccctggagaaccggacctgccactggggcttcgactcggccaactggcgggcctacatcctgctgagccaggattacacgggcaaggaggagcaggcgcgcctcggccgctgcctggacgacgtgaaggagaaattcgactatggcaacaagtacaagcggcgggtgccccgggtctcctctgagcctccggcctccataagacccaaaacagatgacacctcttcccagtcccccgcgccttccgaaaaggacaagccgtccagctggctgcggaccttggccggctcttccaataagagcctgggctgtgttcaccctcgccagcgcctctctgctttccgaccctggtcccccgcagtgtcagcgagtgagaaagagctctccccacacctcccggccctcatccgagacagcttctactcctacaagagctttgagacagccgtggcgcccaacgtggccctcgcaccgccggcccagcagaaggttgtgagcagccctccgtgtgccgccgccgtctcccgggcccccgagcctctcgccacttgcacccagcctcggaagcggaagctgactgtggacaccccaggagccccagagacgctggcgcccgtggctgccccagaggaggacaaggactcggaggcggaggtggaagttgaaagcagggaggaattcacctcctccttgtcctcgctctcttccccgtcctttacctcatccagctccgccaaggacctgggctccccgggtgcgcgtgccctgccctcggccgtccctgatgctgcggcccctgccgacgcccccagtgggctggaggcggagctggagcacctgcggcaggcactggagggcggcctggacaccaaggaagccaaagagaagttcctgcatgaggtggtcaagatgcgcgtgaagcaggaggagaagctcagcgcagccctgcaggccaagcgcagcctccaccaggagctggagttcctacgcgtggccaagaaggagaagctgcgggaggccacggaggccaagcgtaacctgcggaaggagatcgagcgtctccgcgccgagaacgagaagaagatgaaagaggccaacgagtcacggctgcgcctgaagcgggagctggagcaggcgcggcaggcccgggtgtgcgacaagggctgcgaggcgggccgcctgcgcgccaagtactcggcccagatcgaagacctgcaggtgaagctgcagcacgcggaggcggaccgggagcagctgcgggccgacctgctgcgggagcgcgaggcccgggagcacctggagaaggtggtgaaggagctgcaggaacagctgtggccgcgggcccgccccgaggctgcgggcagcgagggcgctgcggagctggagccgtagattccgtgcctgccgccgcagcgccgccgacaacgcgggtgcaggggggcgcggctgggcggtgcagctccgcccggctccgcccctgcagcccacacagcacaacgtcttaccgtgcctattaccaagcgagtgtttgtaaccatgtagttttggaacccactgcaaaattttctactggccaagttcaagtgagtaagccgcgtcccccaactacagctggagacggggccagctcggcggcctgctggtcctctgcttgctggaacattctaacatttacacttttgttataagctatttaaaaccagtaaggagacttgaaattcagaaaatcaacacatttttaaatgactaacttctaaaagccccaacacatgacgccatctgaagacccgcaacggagtgggggtggcggccgccccaccctccccacccggggaagccatcacagctcatctgcccgcggctgcgtgaggacagcaggggtttttcttcagagtctattttttcagcgacaaggacccaggtcttcctgctgctgccagggagagcagggacagtgccgcgtgcgagatgagctcgaacactgcccgccttactgccgcctaccccgcccgccacgccgccgtcgatgccagcgctgtccccacgggtaccaggaagtgcagagccgcacaggagctgccccggagctgaggggacggtcttcggctcctctgcaccccgtgattctgcccacgctcctccaccacgaggcactgacctgcgtcgggtggtgaccgtggctggcggtcacgccctcagcccctccgggcacacgtgccgcctgaccgggcgacccttttcagttcggcaaacgtcgctcccttcattttgggactgaggctgcagcattggaacaaaagagcattatttcaatttttctttctttttttttgttcgttcatttaaacgtatatttagaactgcactttgtccacaaccttcccttctctttctattccccagtgaactgaggtttttaccgatttatagagcagtcaaatccgaagtgctcgagtgcttagaaaccccctctggtgcttggttgaacaagggaatcacaagaaaacgaaaatgcaaaaactgaacttcgggggtcgttctgtgccttccagcatcttgtacagcaaatcctgactcgtgtctttttacccccaagatatctgtcttcagtagcgactgaatctgccactctcagaataagttccttgcatttattccaaataatctcgtttactctcacctgtttatgcaaattgtataaggtttcttatgcccaagcttgaaaaatgatttcccagtagacaagaggcggctacctatcctacagttacggtatttatttacataagaagatcttacaggagttctttgcttgaatccgttctaacacccgcggcagctgcacgcgctcacagaaggtggaggttacttgcccaggtacagacgacctcggggcagtgacgagcaaagaccagagactgctgagccctcgcatctgggtggcggaattgcctgcggggttttgcccttggtttactgaggggggtcttggttgctgctgaagccccccaccccttctaaagtgcaatgcaaaagggacatcatgtatatgcagcgtttgtttggaattttctttgcttttgttttctttgcggttgttctgtgtgcatggattccacacctctgccgtaggtagatccgtcagcgggcattattaccgtgtcttgtaaagggtcggttttgttatgcaacatgcagaatgctgtttttagccttgttttaccagagttgttttttttttcagttatttcttcaagggaaactaaatgatttagttggagcaaagctttaagtgtgttggcgtgcttctgtgtggctgtcctgtgtcgccaggtcgaagatcacagtgaggtagaggccctgccccatccccagggccgccaggcttgctccgtttgctttgagtttttagaccccagagggagatgagcttttccaagctgtgtctgggccagagcctctccttgcccttgctccatcccgacggtcaccgttgggtccacgcctccaccgccccatcttgccccaaacggaaagcgctgtatctgcagtggcagcccttccccacttcggctctgggagggtccagccagtgtcacctgggcccaccctttcctgcagctgccaggcccgtgcggtcagtgggacccggacgtgggcaggcgagctcgggaccctcccaggcagttcccacagctcttgcctcggctcaccagggtcacttccactgtcaggggcctgagggggcagctgtggctgcagggctgctctggactgaggggtcccaggccccgaggggtgcacgcctggctccccttggcacaggtgcgagtccgtttcttttcagcagaagggggaagaggtgtccgctgtgtgggctgctgactcctctgtgtgtgaggcccttcatctaagtgattgtgtattcagtttaattctcattatatttctatactgaaagaagatttttaacgaagggaaaaacaacagcaataacattcatatctctggagcagctaactcatacacgtaatgtctgcttttcgtacagaactagccaatgtaaaaacagttcacctgtaaatactttttcctttttcaccgttgtattatacatgtatatgctgggtcctttttcagaaactcttttcttacctgagagttgtcttgttttctgggctgtttttaactgaggaaaaaaaaaatgctttcctgccggggggcaggggagacggagaaacccatgtgcgtttcccatgtgaccccctcctccctgtgggtctgagccccggccccccccacctcctcctccctgtgggtccgaaccccggcccccccaccccctcctccctgtgggtccgaaccccggcccccccaccccctcctccctgtgggtccgatccccggccccccccaccccctcctccctgtgggtccgaaccccggccccccccccaccccctcctccctgtgggtccgaaccccggcccccccacccctccctcagcccaccagggtccagggagatgttcgttctcgctttaagtcaggagtcacaaatgacttttttttttcaattaaggaaaaagctccatctctacctttaacatcacccagacccccgcccctgcccgtgccccacgctgctgctaacgacagtatgatgcttactctgctactcggaaactatttttatgtaattaatgtatgctttcttgtttataaatgcctgatttaaaaagaaaa

SEQ ID NO: 181946 - DNA, 6598 bp, Homo sapiens
  Payload ID: 15830
  Gene Symbol: SKIDA1
  Gene Name: SKI/DACH domain containing 1
  ENST ID: ENST00000449193
  CDS Start-End: 2254-4980
tttgctttaacaacaagtgggggtggttgaatttactcctccctctcctctctcctccccttcctcttgctgcggttcttgacactactacaaaccaggactataaacataaacatgtgtcactgtaacagggcaggttcccagtagctgcagcagtgaaagacagtgattggctccagtgctcccagaaggatttgggctgaagccaggggaacagaaccagaagaggattccctttccagagaccatcaggctcctcatgtcttgtctctcctctctcccctcgtggtggctcaggatttcagtatggctgagcagcccatagagtcagctgacatggtcaacaaatttatcaaagaaaccccctggcttttgaagaatagtactttatacatctggatctgcacatcaggcaaagctcagaaatatccgtttattcttttaatcacgcggatgtgtctatttttggaggaacaaggaaacacataaatgcctgggttgcatttatgttgtagttgcaaacactgaacagttaagaagattttgccgaattttgcaaagcagccaaggagccgccttgggatcgtggtaatgcgactgggaggacccttgctctcatttggcaatattttggatatccttgaaaacgacaccaaaatttgccttaatttgactaagaagaggttaaaccacattgattttcatccaaagtgattttgttaaagcagatgcttgactttgatggaaaaactgggagttgtggaagatttacctaaactaccaaccaaaagcatcacaaaccactgaaacagtctgcatcgtacatcagcactttcttttcattgttattacgtaaaacctctggaagcaccttgggcgtttgacagtttcttttctttgctgcagaaggaagcaatctgctccctggaattctgacctgtggtgaacaggaccctggcaaaggctttgctggggactcttggacgatcccgcctccaatccagtacggttaattgtggaaaagtgtacacatttctggcttatctatgctttgttatgggtctgacgtgaaactacctcctccccaccccaccccccagcagagaaccgaaatccagttgaattgttacagtgtttcggagctggagccttgaactgcttccttggtcaaataactttgtttctggttgtaaaaaggcatttcaggaaaaaaaaaaaaaaaaaaggaaaatcgagagaaattccaaacgtaagtccgcactggggtggttcacggggcgggtttaactttggagctcccagccggtctccttccccactcctgtaagggaaataccaggctattctgcacattttcccttaagctccattttccaaaaggaaaagggggtggggtatctctctttcggcttgataatgttttttaaatgcttttctttgaaatgataatagctgtatcggtaaaatgcaaataaacgaaaaaaataggcagtatttctttaaaggcgaatatacggtgcggtttttttttttttctcccttaagcgtacacacactgcttctgatgaagtctgtgagtcaggctgtttctgagctccgatagtttaatggaaagatttatataccgactgtattatttactttgggaggggaggtggcagtataagggtatgctaattagtgggagattttggggggaaggggtggaatatcaatttttattgcatcacctgtcaggagtgtccaatcagcgctggctttaggggaattaattgatgaaggtgtctccggacgagctcacttcactctgtcattttatttgtagctaaagcagcggcgggaatagcagctgcatttcttttctctttctcccttcacattccattatcatagtgctccaatggagaaggaaggaatagaggggcccaggtactgatctgcatcggggactcagaccaacacactggcagatcagaaaccggatggttttttccctcttttttaaaaaaacgaaaacaacaacaacaaaaaagcaagaatcaagtcagtgtaatttcatggggtttccccccccccaataatttcgcctagagtttggcacttccttcgccgggaataacagtctttgttattttattagcaggatgccttgagacacacgcagcatctggctgaggattaacatacatacatgtgtatgtatgcgtcacgtatatatttactgcaaatggtggggatcatttagtgcccgagatgggagacctgaagtcaggttttgaagaggtggatggcgtgaggctcggctacctcatcattaaagggaagcaaatgtttgccctctcccaagtcttcacagatctgctgaaaaacatcccgaggacgaccgtgcacaagcgcatggatcatctgaaagtgaagaagcaccactgcgatctggaggagttgcggaaactcaaggcaattaacagcatcgccttccacgccgccaaatgcacgctcatctcccgggaagacgtggaagcgctctacacctcctgcaaaaccgagcgcgtcctcaagaccaagcgcaggcgggtcggccgggccctggccacaaaggcgccgccgccagagcgcgccgctgccgccagcccccgcccgggattttggaaggacaagcaccaactttggcggggcctgagcggagccgcgcggcccctgccaatcagcgcgcagtcccagcgcccgggcgccgccgccgcgcgccccgccgcccatctacctcagatttttagcaaataccccggctcgcactacccggagatcgtgcgctcgccgtgcaaaccccctctaaactatgaaactgccccgctccagggaaactacgtcgccttcccctcggaccctgcttattttcggagcctgctgtgcagcaaacacccggcagccgccgccgccgccgccgccgccgctgctgccgccgccgccgccgccgccgccgccgcctattaccaggtatcggcggccgggccccagcccaaggcagcggcgggcgccggaggcccggggagcctgagctaccgctgcaagcgcaagcgcggcggcgccaaggactgcctgctcgcgcctcacgccggcgcgcggcgcctgctgctgttgcccaggtcctacaaagccaaggcggcggcggcggcggcggcggcggcagcggcggcggcggccgccgcgggggccacttgcctggagaggtttcatctggtcaacggcttctgcccgcctccgcaccaccaccaccaccaccaccatcaccaccaccaccaccaccaccgggcccagccgccgcagcagagtcaccacccccctcaccaccaccggccgcagccccatctgggcagctttcccgagagctgcagcagcgactccgagtccagctcctactcggaccacgcggccaacgactcggattttggctccagtttgtccagctccagcaattctgtgtcctcagaggaagaggaggaggagggagaggaggaggaggaggaagaggaggaggaggggggcagcggggcctcggattccagtgaagtcagctcggaggaggaggactcgtccaccgagtcggactccagctccggctccagccaagtgtcagtgcagagcatccgattcaggcgcaccagcttctgcaagcctcccagcgtgcaggcgcaggccaacttcttgtaccatctggcctccgccgccgctgcaaccaaacccgctgctttcgaggatgccggcagacttcccgacctcaagagtagtgtcaaagcggagtcgccggcggagtggaatctgcagagctgggcccccaaagcatctccggtgtactgcccggccagcctggggagttgtttcgctgagataaggaacgatagggtatctgagattacattcccacactctgaaatttccaatgctgtaaagagaactgacctgacaattaactgcctggcagagggggcctcttcacctagcccaaagacaaacaatgcatttccacaacaaagaatactccgagaggctaggaaatgcctacaaacaactcctactacacactgtgcagataacaacacaatagctgctaggttcttaaataatgattcttcaggagcagaagcaaattcagaaaaatattccaaaatccttcattgtcctgaatttgctacggatttgccctcttcgcagactgatcctgaagtgaacgctgcaggagcagcagcaactaaagccgagaatccctgcactgacacaggcgacaagacattgccatttctgcacaatattaaaatcaaagtagaagacagtagtgctaatgaagaatatgaacctcacctttttacaaataagctaaagtgcgagtgcaatgatacaaagggtgagttttacagtgtgactgagagtaaagaggaggacgccttgttaaccacagccaaggaaggttttgcatgccctgaaaaagaaactccttccttaaatccactggctcaaagtcagggcctttcatgcactttaggttctccaaaacctgaggatggggaatataaatttggtgccagggtgagaaaaaattaccggacactagtactgggaaagcgacctgtccttcagacacctccagtcaaaccaaatttgaaatcagctagaagccctcgtcctacaggtaaaactgagacaaatgaaggaacactggatgattttacagttataaacagacgcaaaaaggtagccagcaatgtagcatcagcagtgaaaaggccatttcatttcatggcaaattttccttgtccaccatcactcattattgggagagatggggatttgtggccggcgtattccttaaacaccactaaggattctcaaactcctcacaaggcccatcctatatggaaatggcagctgggcggttctgcaatacctcttccacctagtcacaaattcaggaaatttaattcataaaaatgttttggaagatattttcttgaaccatattaccttccttttgttgtaaactgcacaggatggtttgtacaagtccattaatgtgttacaccccctttggagtcctggtttatcgcattttgaagacagaaatcggattactttttttccgttgcgggtttttttttttttttctggagtagggtgggggcggggtgggagaagggttggtttacattccacagactacttcaggctaaagactcaagtaaaactcagttattacggtagagctggaacactttactgtttcgatgctaataatgcacccggtacctcaattcaactgctacaaataaatgtcaaaaggttgaataataaatattacaatgagccattaagtttatgcactagatttcagagctgaaagtgtaactgttaattcagtgaaagtttgttaggttacatggttacacagtgaggtgaggtgaggtagcaagaagtttctgtgagcccaaaatgttattttctggagctcttgtttgtggggtatctttttcttttgactccccttattccctctccaagagtagttgcacttaactttttttttttttttttagtggaaagattggggtgtgagtcctgattaaatgctagtaaaagctgcctcatacatactgagtaaaataaatacggaattgtattttttttgtaaagggtgtgattttacttttaaagccactcctttgcaacaggaaaagtctgttttgtgttctcacccaaaggttttaaataaggtgactcttactattgtcctgcttatcttgtggtctgaacatgactcttcaaactcccaaaacaattgaaatatttctttttttttttttttttttttttggagagagtctcgctgtgtcgcccaggctggagtgcagtggcacaatcttggctcactgcaacctccacctcctgggttcaaacgattctgctgcctcagcctcctgagtagctgggattacgggcgcgtgccaccatgtccggctaatttttgtatttttagtagagacggggtttcaccatgttgaccaggctggtcccgaactcctgacctcaggtgatccgcctgtctcggcctcccaaagtgctgggattaaaggtgtgatccaccatgcccgggctgaaatatttctcgtaatagcagaatatttcatggccgaactcttgatagtgacaaatcagtaaatacaaccaagaaaaagaaaatgaggggtcagagttgcaataccccaaatgaaaaataacagttttttcagggctttttggtaccagaactcaggcacttggattttatgaccttatactttttctgcatctctctaaaacttgtgttttcagaccatcctgtgtatagagcaggagagtttctactgcaagtgacaatcagaggtgactatctatatttgcacttaaaatcaaagtagttcaacatgcaaatgctagggtctagccctgggtaagggccatgctggtgtactgtgttgtgatgatggaagcagtaaatcaaaattatggaaatttgcactgttgaaaagcatgctttagctttattttcaattaaaaacactgtttaaaa

SEQ ID NO: 181947 - DNA, 2667 bp, Homo sapiens
  Payload ID: 15830
  Gene Symbol: SKIDA1
  Gene Name: SKI/DACH domain containing 1
  ENST ID: ENST00000444772
  CDS Start-End: 98-2587
acacgcagcatctggctgaggattaacatacatacatgtgtatgtatgcgtcacgtatatatttactgcaaatggtggggatcatttagtgcccgagatgggagacctgaagtcaggttttgaagaggtggatggcgtgaggctcggctacctcatcattaaagggaagcaaatgtttgccctctcccaagtcttcacagatctgctgaaaaacatcccgaggacgaccgtgcacaagcgcatggatcatctgaaagtgaagaagcaccactgcgatctggaggagttgcggaaactcaaggcaattaacagcatcgccttccacgccgccaaatgcacgctcatctcccgggaagacgtggaagcgctctacacctcctgcaaaaccgagcgcgtcctcaagaccaagcgcaggcgggtcggccgggccctggccacaaaggcgccgccgccagagcgcgccgctgccgccagcccccgcccgggattttggaaggacaagcaccaactttggcggggcctgagcggagccgcgcggcccctgccaatcagcgcgcagtcccagcgcccgggcgccgccgccgcgcgccccgccgcccatctacctcagatttttagcaaataccccggctcgcactacccggagatcgtgcgctcgccgtgcaaaccccctctaaactatgaaactgccccgctccagggaaactacgtcgccttcccctcggaccctgcttattttcggagcctgctgtgcagcaaacacccggcggcggcggcggcggcggcggcggcagcggcggcggcggccgccgcgggggccacttgcctggagaggtttcatctggtcaacggcttctgcccgcctccgcaccaccaccaccaccaccaccatcaccaccaccaccaccaccaccgggcccagccgccgcagcagagtcaccacccccctcaccaccaccggccgcagccccatctgggcagctttcccgagagctgcagcagcgactccgagtccagctcctactcggaccacgcggccaacgactcggattttggctccagtttgtccagctccagcaattctgtgtcctcagaggaagaggaggaggagggagaggaggaggaggaggaagaggaggaggaggggggcagcggggcctcggattccagtgaagtcagctcggaggaggaggactcgtccaccgagtcggactccagctccggctccagccaagtgtcagtgcagagcatccgattcaggcgcaccagcttctgcaagcctcccagcgtgcaggcgcaggccaacttcttgtaccatctggcctccgccgccgctgcaaccaaacccgctgctttcgaggatgccggcagacttcccgacctcaagagtagtgtcaaagcggagtcgccggcggagtggaatctgcagagctgggcccccaaagcatctccggtgtactgcccggccagcctggggagttgtttcgctgagataaggaacgatagggtatctgagattacattcccacactctgaaatttccaatgctgtaaagagaactgacctgacaattaactgcctggcagagggggcctcttcacctagcccaaagacaaacaatgcatttccacaacaaagaatactccgagaggctaggaaatgcctacaaacaactcctactacacactgtgcagataacaacacaatagctgctaggttcttaaataatgattcttcaggagcagaagcaaattcagaaaaatattccaaaatccttcattgtcctgaatttgctacggatttgccctcttcgcagactgatcctgaagtgaacgctgcaggagcagcagcaactaaagccgagaatccctgcactgacacaggcgacaagacattgccatttctgcacaatattaaaatcaaagtagaagacagtagtgctaatgaagaatatgaacctcacctttttacaaataagctaaagtgcgagtgcaatgatacaaagggtgagttttacagtgtgactgagagtaaagaggaggacgccttgttaaccacagccaaggaaggttttgcatgccctgaaaaagaaactccttccttaaatccactggctcaaagtcagggcctttcatgcactttaggttctccaaaacctgaggatggggaatataaatttggtgccagggtgagaaaaaattaccggacactagtactgggaaagcgacctgtccttcagacacctccagtcaaaccaaatttgaaatcagctagaagccctcgtcctacaggtaaaactgagacaaatgaaggaacactggatgattttacagttataaacagacgcaaaaaggtagccagcaatgtagcatcagcagtgaaaaggccatttcatttcatggcaaattttccttgtccaccatcactcattattgggagagatggggatttgtggccggcgtattccttaaacaccactaaggattctcaaactcctcacaaggcccatcctatatggaaatggcagctgggcggttctgcaatacctcttccacctagtcacaaattcaggaaatttaattcataaaaatgttttggaagatattttcttgaaccatattaccttccttttgttgtaaactgcacaggatggtttgtacaagtcca

SEQ ID NO: 181948 - DNA, 3894 bp, Homo sapiens
  Payload ID: 15831
  Gene Symbol: SKIV2L
  Gene Name: SKI2 homolog, superkiller viralicidic activity 2-like
  Uniprot ID: Q15477
  ENST ID: ENST00000375394
  CDS Start-End: 114-3854
ggcggggctgtaccggaagttgcctctacttccgcccgttccggggcggggcttacttcgcagcgactacttgccgcacttccgggctgccaggcagctgctgtggctccaggatgatggagacagagcgacttgtgctaccccctccagatcccctggacctaccccttcgggccgtggagctcggatgcacggggcactgggagctgctgaacttgcctggagctccagagagtagccttccccatggcctccctccttgtgccccagatctgcagcaagaagcagaacagttgtttctgtcatccccagcctggctgcctctgcatggtgtggagcactcagcccgaaaatggcagaggaagacggatccctggtctcttttggctgtcctgggagccccagtcccatccgacctacaggcccaaagacacccaaccacaggccagatactgggttacaaagaggtcttgctggagaacacaaatctctcggctacaacctccttgtctcttcgccggcctccagggccagcctcccagtccttatggggaaatccaactcagtatcccttctggccaggggggatggatgaacccaccataacagatctgaacacacgggaggaggctgaggaggagatagactttgagaaagatcttcttactattccacctggtttcaagaaaggcatggactttgcaccaaaagattgtccaactccagctcctggactactaagccttagctgtatgttggagcctctggatttgggtgggggtgacgaggatgagaatgaggcagtgggacagccaggaggtcccagaggggacactgtttcagcctctccctgcagtgctcccctggcccgagcaagcagcttggaagacctagtgttgaaggaagcgtccacagctgtatccaccccagaggccccagagcctccatctcaggagcagtgggccatccctgtggacgccacctcccctgttggtgatttctatcgcctcattccccagccagccttccagtgggcatttgagccagatgtgtttcagaaacaggccatcctgcacttggaacggcatgactctgtctttgtcgcagctcacacatctgcaggaaaaacagttgtggctgaatatgccattgccctggcccagaaacacatgacacgcaccatctacacttcgcccatcaaggccctgagcaaccagaagttccgggacttccgaaacacattcggggatgtggggctgctcaccggggatgtacagctgcatccggaggcctcctgcctcatcatgaccacagagatccttcgctccatgctgtacagtggctcagatgttattcgggacctggagtgggtcatctttgatgaggttcactatatcaacgatgtcgagcgtggggtcgtgtgggaggaggtgcttatcatgctacctgaccacgtttctatcatccttctgagtgccaccgtccccaacgcccttgagtttgctgactggattgggcggctgaagcgtcgtcagatctatgtgattagcactgtaacccgccccgtgcccctggagcactatcttttcacagggaacagctccaagacccagggggagctctttttgttgctggactcccgaggagccttccatacaaaagggtactatgcagctgtggaggccaagaaggagagaatgagcaaacacgcccagacctttggggccaagcagcccacacatcaggggggccctgcacaggaccgcggagtgtacctgtccctcctggcctccctccgcacacgtgcccagttgcccgtggtggtgttcaccttctcccggggccgctgtgatgagcaggcctcaggcctcacctcccttgacctcaccaccagttcggagaagagcgagatccacctcttcctgcagcgctgccttgctcgcctccgtggctctgaccgccagctgccccaggtcctgcacatgtcagagctcctgaatcgcggcctgggtgtgcaccatagcggcatcctgcccatcctcaaggagatcgtggagatgctcttcagccgtggcctggtcaaggtcttgtttgccacagagacctttgccatgggagtaaacatgcctgctcgtacagtagtgtttgactccatgcgcaaacacgatggctccaccttccgggacctgctccctggggagtatgtgcagatggcaggccgggcagggcggaggggcctggaccccacaggcaccgttatcctgctctgcaagggccgagtgcccgagatggcagacctgcaccgcatgatgatggggaagccgtcccagctgcagtcccagttccgcctcacgtacactatgatcctcaacttgctgcgagtggatgccctcagggtggaggacatgatgaagaggagcttctctgagtttccctcccgcaaagacagcaaggcccatgaacaggccctggctgaactgaccaagaggctgggagctttggaggagcctgacatgactggccaactggtcgacctgcctgaatattacagctggggggaggaactgacagagacccagcacatgatccagcgacgcatcatggagtctgtgaacgggctgaagtctctctcagcaggaagggtggtggttgtgaagaatcaggagcatcacaacgcattgggagtgatcctacaggtctcctcgaactccaccagcagagtattcacaaccctggtcttgtgtgataagcccttgtcccaggacccacaggacagggggccagccactgcagaggtgccctatccagatgacctcgtgggattcaagctgttcctgcctgaagggccttgtgaccacaccgtggtcaagctccagccaggagatatggctgccatcaccaccaaggtgctccgggtgaatggggagaagatcttggaggacttcagcaagaggcagcagccaaaattcaagaaggatcctccccttgcagccgtgaccactgctgtccaggaactgctgcgtctggctcaggcccacccagccggacctcccaccctcgaccctgtcaatgacctgcagctcaaagatatgtcagttgtagagggtgggctccgggcccggaagctggaggagctgatccagggggctcagtgtgtacacagcccccgttttcctgcccagtacctgaagctgcgggagcgaatgcagatacagaaggagatggagcggctgcgcttcctactgtcggatcagtcattgctgctgcttcctgagtaccatcagcgagtagaggtgctccgaaccctgggttatgtggacgaggcgggcactgtgaagctggcagggcgggtggcttgtgccatgagcagccatgagttgctcctcactgagctcatgtttgacaatgcactgagcaccctgcggcctgaggagattgctgccttgctctctggcctggtctgccagagccctggggacgctggggatcagctcccaaacaccctcaagcagggaatagaacgtgtccgggctgtggccaagcggattggtgaggtccaggtggcttgtggcctgaaccagacggtggaggaatttgtgggggagctgaattttgggctggttgaggttgtatatgagtgggcccggggcatgcccttctccgagttggcagggctctcagggacccctgagggcctggtggtccgctgcattcagcgcctggctgagatgtgtcgctcactgcggggggcagcccgcctggtaggagagcctgtgctgggtgccaagatggagacagcggctaccttgctacggcgggacatcgtatttgcggccagcctctacacccagtgaatgccccatgtaaaaacatgatgataaaacagcaaagcac

SEQ ID NO: 181949 - DNA, 3890 bp, Homo sapiens
  Payload ID: 15831
  Gene Symbol: SKIV2L
  Gene Name: SKI2 homolog, superkiller viralicidic activity 2-like
  Uniprot ID: Q15477
  ENST ID: ENST00000383336
  CDS Start-End: 114-3854
ggcggggctgtaccggaagttgcctctacttccgcccgttccggggcggggcttacttcgcagcgactacttgccgcacttccgggctgccaggcagctgctgtggctccaggatgatggagacagagcgacttgtgctaccccctccagatcccctggacctaccccttcgggccgtggagctcggatgcacggggcactgggagctgctgaacttgcctggagctccagagagtagccttccccatggcctccctccttgtgccccagatctgcagcaagaagcagaacagttgtttctgtcatccccagcctggctgcctctgcatggtgtggagcactcagcccgaaaatggcagaggaagacggatccctggtctcttttggctgtcctgggagccccagtcccatccgacctacaggcccaaagacacccaaccacaggccagatactgggttacaaagaggtcttgctggagaacacaaatctctcggctacaacctccttgtctcttcgccggcctccagggccagcctcccagtccttatggggaaatccaactcagtatcccttctggccaggggggatggatgaacccaccataacagatctgaacacacgggaggaggctgaggaggagatagactttgagaaagatcttcttactattccacctggtttcaagaaaggcatggactttgcaccaaaagattgtccaactccagctcctggactactaagccttagctgtctgttggagcctctggatttgggtgggggtgacgaggatgagaatgaggcagtgggacagccaggaggtcccagaggggacactgtttcagcctctccctgcagtgctcccctggcccgagcaagcagcttggaagacctagtgttgaaggaagcgtccacagctgtatccaccccagaggccccagagcctccatctcaggagcagtgggccatccctgtggacgccacctcccctgttggtgatttctatcgcctcattccccagccagccttccagtgggcatttgagccagatgtgtttcagaaacaggccatcctgcacttggaacggcatgactctgtctttgtcgcagctcacacatctgcaggaaaaacagttgtggctgaatatgccattgccctggcccagaaacacatgacacgcaccatctacacttcgcccatcaaggccctgagcaaccagaagttccgggacttccgaaacacattcggggatgtggggctgctcaccggggatgtacagctgcatccggaggcctcctgcctcatcatgaccacagagatccttcgctccatgctgtacagtggctcagatgttattcgggacctggagtgggtcatctttgatgaggttcactatatcaacgatgtcgagcgtggggtcgtgtgggaggaggtgcttatcatgctacctgaccacgtttctatcatccttctgagtgccaccgtccccaacgcccttgagtttgctgactggattgggcggctgaagcgtcgtcagatctatgtgattagcactgtaacccgccccgtgcccctggagcactatcttttcacagggaacagctccaagacccagggggagctctttttgttgctggactcccgaggagccttccatacaaaagggtactatgcagctgtggaggccaagaaggagagaatgagcaaacacgcccagacctttggggccaagcagcccacacatcaggggggccctgcacaggaccgcggagtgtacctgtccctcctggcctccctccgcacacgtgcccagttgcccgtggtggtgttcaccttctcccggggccgctgtgatgagcaggcctcaggcctcacctcccttgacctcaccaccagttcggagaagagcgagatccacctcttcctgcagcgctgccttgctcgcctccgtggctctgaccgccagctgccccaggtcctgcacatgtcagagctcctgaatcgcggcctgggtgtgcaccatagcggcatcctgcccatcctcaaggagatcgtggagatgctcttcagccgtggcctggtcaaggtcttgtttgccacagagacctttgccatgggagtaaacatgcctgctcgtacagtagtgtttgactccatgcgcaaacacgatggctccaccttccgggacctgctccctggggagtatgtgcagatggcaggccgggcagggcggaggggcctggaccccacaggcaccgttatcctgctctgcaagggccgagtgcccgagatggcagacctgcaccgcatgatgatggggaagccgtcccagctgcagtcccagttccgcctcacgtacactatgatcctcaacttgctgcgagtggatgccctcagggtggaggacatgatgaagaggagcttctctgagtttccctcccgcaaagacagcaaggcccatgaacaggccctggctgaactgaccaagaggctgggagctttggaggagcctgacatgactggccaactggtcgacctgcctgaatattacagctggggggaggaactgacagagacccagcacatgatccagcgacgcatcatggagtctgtgaacgggctgaagtctctctcagcaggaagggtggtggttgtgaagaatcaggagcatcacaacgcattgggagtgatcctacaggtctcctcgaactccaccagcagagtattcacaaccctggtcttgtgtgataagcccttgtcccaggacccacaggacagggggccagccactgcagaggtgccctatccagatgacctcgtgggattcaagctgttcctgcctgaagggccttgtgaccacaccgtggtcaagctccagccaggagatatggctgccatcaccaccaaggtgctccgggtgaatggggagaagatcttggaggacttcagcaagaggcagcagccaaaattcaagaaggatcctccccttgcagccgtgaccactgctgtccaggaactgctgcgtctggctcaggcccacccagccggacctcccaccctcgaccctgtcaatgacctgcagctcaaagatatgtcagttgtagagggtgggctccgggcccggaagctggaggagctgatccagggggctcagtgtgtacacagcccccgttttcctgcccagtacctgaagctgcgggagcgaatgcagatacagaaggagatggagcggctgcgcttcctactgtcggatcagtcattgctgctgcttcctgagtaccatcagcgagtagaggtgctccgaaccctgggttacgtggacgaggcgggcactgtgaagctggcagggcgggtggcttgtgccatgagcagccatgagttgctcctcactgagctcatgtttgacaatgcactgagcaccctgcggcctgaggagattgctgccttgctctctggcctggtctgccagagccctggggacgctggggatcagctcccaaacaccctcaagcagggaatagaacgtgtccgggctgtggccaagcggattggtgaggtccaggtggcttgtggcctgaaccagacggtggaggaatttgtgggggagctgaattttgggctggttgaggttgtatatgagtgggcccggggcatgcccttctccgagttggcagggctctcagggacccctgagggcctggtggtccgctgcattcagcgcctggctgagatgtgtcgctcactgcggggggcagcccgcctggtaggagagcctgtgctgggtgccaagatggagacagcggctaccttgctacggcgggacatcgtatttgcggccagcctctacacccagtgaatgccccatgtaaaaacatgatgataaaacagcaaa

SEQ ID NO: 181950 - DNA, 3890 bp, Homo sapiens
  Payload ID: 15831
  Gene Symbol: SKIV2L
  Gene Name: SKI2 homolog, superkiller viralicidic activity 2-like
  Uniprot ID: Q15477
  ENST ID: ENST00000448219
  CDS Start-End: 114-3854
ggcggggctgtaccggaagttgcctctacttccgcccgttccggggcggggcttacttcgcagcgactacttgccgcacttccgggctgccaggcagctgctgtggctccaggatgatggagacagagcgacttgtgctaccccctccagatcccctggacctaccccttcgggccgtggagctcggatgcacggggcactgggagctgctgaacttgcctggagctccagagagtagccttccccatggcctccctccttgtgccccagatctgcagcaagaagcagaacagttgtttctgtcatccccagcctggctgcctctgcatggtgtggagcactcagcccgaaaatggcagaggaagacggatccctggtctcttttggctgtcctgggagccccagtcccatccgacctacaggcccaaagacacccaaccacaggccagatactgggttacaaagaggtcttgctggagaacacaaatctctcggctacaacctccttgtctcttcgccggcctccagggccagcctcccagtccttatggggaaatccaactcagtatcccttctggccaggggggatggatgaacccaccataacagatctgaacacacgggaggaggctgaggaggagatagactttgagaaagatcttcttactattccacctggtttcaagaaaggcatggactttgcaccaaaagattgtccaactccagctcctggactactaagccttagctgtatgttggagcctctggatttgggtgggggtgacgaggatgagaatgaggcagtgggacagccaggaggtcccagaggggacactgtttcagcctctccctgcagtgctcccctggcccgagcaagcagcttggaagacctagtgttgaaggaagcgtccacagctgtatccaccccagaggccccagagcctccatctcaggagcagtgggccatccctgtggacgccacctcccctgttggtgatttctatcgcctcattccccagccagccttccagtgggcatttgagccagatgtgtttcagaaacaggccatcctgcacttggaacggcatgactctgtctttgtcgcagctcacacatctgcaggaaaaacagttgtggctgaatatgccattgccctggcccagaaacacatgacacgcaccatctacacttcgcccatcaaggccctgagcaaccagaagttccgggacttccgaaacacattcggggatgtggggctgctcaccggggatgtacagctgcatccggaggcctcctgcctcatcatgaccacagagatccttcgctccatgctgtacagtggctcagatgttattcgggacctggagtgggtcatctttgatgaggttcactatatcaacgatgtcgagcgtggggtcgtgtgggaggaggtgcttatcatgctacctgaccacgtttctatcatccttctgagtgccaccgtccccaacgcccttgagtttgctgactggattgggcggctgaagcgtcgtcagatctatgtgattagcactgtaacccgccccgtgcccctggagcactatcttttcacagggaacagctccaagacccagggggagctctttttgttgctggactcccgaggagccttccatacaaaagggtactatgcagctgtggaggccaagaaggagagaatgagcaaacacgcccagacctttggggccaagcagcccacacatcaggggggccctgcacaggaccgcggagtgtacctgtccctcctggcctccctccgcacacgtgcccagttgcccgtggtggtgttcaccttctcccggggccgctgtgatgagcaggcctcaggcctcacctcccttgacctcaccaccagttcggagaagagcgagatccacctcttcctgcagcgctgccttgctcgcctccgtggctctgaccgccagctgccccaggtcctgcacatgtcagagctcctgaatcgcggcctgggtgtgcaccatagcggcatcctgcccatcctcaaggagatcgtggagatgctcttcagccgtggcctggtcaaggtcttgtttgccacagagacctttgccatgggagtaaacatgcctgctcgtacagtagtgtttgactccatgcgcaaacacgatggctccaccttccgggacctgctccctggggagtatgtgcagatggcaggccgggcagggcggaggggcctggaccccacaggcaccgttatcctgctctgcaagggccgagtgcccgagatggcagacctgcaccgcatgatgatggggaagccgtcccagctgcagtcccagttccgcctcacgtacactatgatcctcaacttgctgcgagtggatgccctcagggtggaggacatgatgaagaggagcttctctgagtttccctcccgcaaagacagcaaggcccatgaacaggccctggctgaactgaccaagaggctgggagctttggaggagcctgacatgactggccaactggtcgacctgcctgaatattacagctggggggaggaactgacagagacccagcacatgatccagcgacgcatcatggagtctgtgaacgggctgaagtctctctcagcaggaagggtggtggttgtgaagaatcaggagcatcacaacgcattgggagtgatcctacaggtctcctcgaactccaccagcagagtattcacaaccctggtcttgtgtgataagcccttgtcccaggacccacaggacagggggccagccactgcagaggtgccctatccagatgacctcgtgggattcaagctgttcctgcctgaagggccttgtgaccacaccgtggtcaagctccagccaggagatatggctgccatcaccaccaaggtgctccgggtgaatggggagaagatcttggaggacttcagcaagaggcagcagccaaaattcaagaaggatcctccccttgcagccgtgaccactgctgtccaggaactgctgcgtctggctcaggcccacccagccggacctcccaccctcgaccctgtcaatgacctgcagctcaaagatatgtcagttgtagagggtgggctccgggcccggaagctggaggagctgatccagggggctcagtgtgtacacagcccccgttttcctgcccagtacctgaagctgcgggagcgaatgcagatacagaaggagatggagcggctgcgcttcctactgtcggatcagtcattgctgctgcttcctgagtaccatcagcgagtagaggtgctccgaaccctgggttatgtggacgaggcgggcactgtgaagctggcagggcgggtggcttgtgccatgagcagccatgagttgctcctcactgagctcatgtttgacaatgcactgagcaccctgcggcctgaggagattgctgccttgctctctggcctggtctgccagagccctggggacgctggggatcagctcccaaacaccctcaagcagggaatagaacgtgtccgggctgtggccaagcggattggtgaggtccaggtggcttgtggcctgaaccagacggtggaggaatttgtgggggagctgaattttgggctggttgaggttgtatatgagtgggcccggggcatgcccttctccgagttggcagggctctcagggacccctgagggcctggtggtccgctgcattcagcgcctggctgagatgtgtcgctcactgcggggggcagcccgcctggtaggagagcctgtgctgggtgccaagatggagacagcggctaccttgctacggcgggacatcgtatttgcggccagcctctacacccagtgaatgccccatgtaaaaacatgatgataaaacagcaaa

SEQ ID NO: 181951 - DNA, 3890 bp, Homo sapiens; identical to SEQ ID NO: 181949
  Payload ID: 15831
  Gene Symbol: SKIV2L
  Gene Name: SKI2 homolog, superkiller viralicidic activity 2-like
  Uniprot ID: Q15477
  ENST ID: ENST00000421789
  CDS Start-End: 114-3854

SEQ ID NO: 181952 - DNA, 3890 bp, Homo sapiens; identical to SEQ ID NO: 181949
  Payload ID: 15831
  Gene Symbol: SKIV2L
  Gene Name: SKI2 homolog, superkiller viralicidic activity 2-like
  Uniprot ID: Q15477
  ENST ID: ENST00000412823
  CDS Start-End: 114-3854

SEQ ID NO: 181953 - DNA, 3890 bp, Homo sapiens
  Payload ID: 15831
  Gene Symbol: SKIV2L
  Gene Name: SKI2 homolog, superkiller viralicidic activity 2-like
  Uniprot ID: Q15477
  ENST ID: ENST00000429465
  CDS Start-End: 114-3854
ggcggggctgtaccggaagttgcctctacttccgcccgttccggggcggggcttacttcgcagcgactacttgccgcacttccgggctgccaggcagctgctgtggctccaggatgatggagacagagcgacttgtgctaccccctccagatcccctggacctaccccttcgggccgtggagctcggatgcacggggcactgggagctgctgaacttgcctggagctccagagagtagccttccccatggcctccctccttgtgccccagatctgcagcaagaagcagaacagttgtttctgtcatccccagcctggctgcctctgcatggtgtggagcactcagcccgaaaatggcagaggaagacggatccctggtctcttttggctgtcctgggagccccagtcccatccgacctacaggcccaaagacacccaaccacaggccagatactgggttacaaagaggtcttgctggagaacacaaatctctcggctacaacctccttgtctcttcgccggcctccagggccagcctcccagtccttatggggaaatccaactcagtatcccttctggccaggggggatggatgaacccaccataacagatctgaacacacgggaggaggctgaggaggagatagactttgagaaagatcttcttactattccacctggtttcaagaaaggcatggactttgcaccaaaagattgtccaactccagctcctggactactaagccttagctgtctgttggagcctctggatttgggtgggggtgacgaggatgagaatgaggcagtgggacagccaggaggtcccagaggggacactgtttcagcctctccctgcagtgctcccctggcccgagcaagcagcttggaagacctagtgttgaaggaagcgtccacagctgtatccaccccagaggccccagagcctccatctcaggagcagtgggccatccctgtggacgccacctcccctgttggtgatttctatcgcctcattccccagccagccttccagtgggcatttgagccagatgtgtttcagaaacaggccatcctgcacttggaacggcatgactctgtctttgtcgcagctcacacatctgcaggaaaaacagttgtggctgaatatgccattgctctggcccagaaacacatgacacgcaccatctacacttcgcccatcaaggccctgagcaaccagaagttccgggacttccgaaacacattcggggatgtggggctgctcaccggggatgtacagctgcatccggaggcctcctgcctcatcatgaccacagagatccttcgctccatgctgtacagtggctcagatgttattcgggacctggagtgggtcatctttgatgaggttcactatatcaacgatgtcgagcgtggggtcgtgtgggaggaggtgcttatcatgctacctgaccacgtttctatcatccttctgagtgccaccgtccccaacgcccttgagtttgctgactggattgggcggctgaagcgtcgtcagatctatgtgattagcactgtaacccgccccgtgcccctggagcactatcttttcacagggaacagctccaagacccagggggagctctttttgttgctggactcccgaggagccttccatacaaaagggtactatgcagctgtggaggccaagaaggagagaatgagcaaacacgcccagacctttggggccaagcagcccacacatcaggggggccctgcacaggaccgcggagtgtacctgtccctcctggcctccctccgcacacgtgcccagttgcccgtggtggtgttcaccttctcccggggccgctgtgatgagcaggcctcaggcctcacctcccttgacctcaccaccagttcggagaagagcgagatccacctcttcctgcagcgctgccttgctcgcctccgtggctctgaccgccagctgccccaggtcctgcacatgtcagagctcctgaatcgcggcctgggtgtgcaccatagcggcatcctgcccatcctcaaggagatcgtggagatgctcttcagccgtggcctggtcaaggtcttgtttgccacagagacctttgccatgggagtaaacatgcctgctcgtacagtagtgtttgactccatgcgcaaacacgatggctccaccttccgggacctgctccctggggagtatgtgcagatggcaggccgggcagggcggaggggcctggaccccacaggcaccgttatcctgctctgcaagggccgagtgcccgagatggcagacctgcaccgcatgatgatggggaagccgtcccagctgcagtcccagttccgcctcacgtacactatgatcctcaacttgctgcgagtggatgccctcagggtggaggacatgatgaagaggagcttctctgagtttccctcccgcaaagacagcaaggcccatgaacaggccctggctgaactgaccaagaggctgggagctttggaggagcctgacatgactggccaactggtcgacctgcctgaatattacagctggggggaggaactgacagagacccagcacatgatccagcgacgcatcatggagtctgtgaacgggctgaagtctctctcagcaggaagggtggtggttgtgaagaatcaggagcatcacaacgcattgggagtgatcctacaggtctcctcgaactccaccagcagagtattcacaaccctggtcttgtgtgataagcccttgtcccaggacccacaggacagggggccagccactgcagaggtgccctatccagatgacctcgtgggattcaagctgttcctgcctgaagggccttgtgaccacaccgtggtcaagctccagccaggagatatggctgccatcaccaccaaggtgctccgggtgaatggggagaagatcttggaggacttcagcaagaggcagcagccaaaattcaagaaggatcctccccttgcagccgtgaccactgctgtccaggaactgctgcgtctggctcaggcccacccagccggacctcccaccctcgaccctgtcaatgacctgcagctcaaagatatgtcagttgtagagggtgggctccgggcccggaagctggaggagctgatccagggggctcagtgtgtacacagcccccgttttcctgcccagtacctgaagctgcgggagcgaatgcagatacagaaggagatggagcggctgcgcttcctactgtcggatcagtcattgctgctgcttcctgagtaccatcagcgagtagaggtgctccgaaccctgggttacgtggacgaggcgggcactgtgaagctggcagggcgggtggcttgtgccatgagcagccatgagttgctcctcactgagctcatgtttgacaatgcactgagcaccctgcggcctgaggagattgctgccttgctctctggcctggtctgccagagccctggggacgctggggatcagctcccaaacaccctcaagcagggaatagaacgtgtccgggctgtggccaagcggattggtgaggtccaggtggcttgtggcctgaaccagacggtggaggaatttgtgggggagctgaattttgggctggttgaggttgtatatgagtgggcccggggcatgcccttctccgagttggcagggctctcagggacccctgagggcctggtggtccgctgcattcagcgcctggctgagatgtgtcgctcactgcggggggcagcccgcctggtaggagagcctgtgctgggtgccaagatggagacagcggctaccttgctacggcgggacatcgtatttgcggccagcctctacacccagtgaatgccccatgtaaaaacatgatgataaaacagcaaa

SEQ ID NO: 181954 - DNA, 866 bp, Homo sapiens
  Payload ID: 15831
  Gene Symbol: SKIV2L
  Gene Name: SKI2 homolog, superkiller viralicidic activity 2-like
  ENST ID: ENST00000491994
  CDS Start-End: 1-547
ccggaagctggaggagctgatccagggggctcagtgtgtacacagcccccgttttcctgcccagtacctgaagctgcgggagcgaatgcagatacagaaggagatggagcggctgcgcttcctactgtcggatcagtcattgctgctgcttcctgagtaccatcagcgagtagaggtgctccgaaccctgggttatgtggacgaggcgggcactgtgaagctggcagggcgggtggcttgtgccatgagcagccatgagttgctcctcactgagctcatgtttgacaatgcactgagcaccctgcggcctgaggagattgctgccttgctctctggcctggtctgccagagccctggggacgctggggatcagctcccaaacaccctcaagcagggaatagaacgtgtccgggctgtggccaagcggattggtgaggtccaggtggcttgtggcctgaaccagacggtggaggaatttgtgggggagctgaattttgggctggttgaggttgtatatgagtgggcccggggcatggtgagtacctgaggtttgggattttgcagacggctggctggggagaacctgcccaggctgagtgcatccagtcctcaccctactttccccacagcccttctccgagttggcagggctctcagggacccctgagggcctggtggtccgctgcattcagcgcctggctgagatgtgtcgctcactgcggggggcagcccgcctggtaggagagcctgtgctgggtgccaagatggagacagcggctaccttgctacggcgggacatcgtatttgcggccagcctctacacccagtgaatgccccatgtaaaaacatgatgataaaacagcaaa

SEQ ID NO: 181955 - DNA, 1157 bp, Homo sapiens
  Payload ID: 15831
  Gene Symbol: SKIV2L
  Gene Name: SKI2 homolog, superkiller viralicidic activity 2-like
  ENST ID: ENST00000461073
  CDS Start-End: 37-729
acttccgggctgccaggcagctgctgtggctccaggatgatggagacagagcgacttgtgctaccccctccagatcccctggacctaccccttcgggccgtggagctcggatgcacggggcactgggagctgctgaacttgcctggagctccagagagtagccttccccatggcctccctccttgtgccccagatctgcagcaagaagcagaacagttgtttctgtcatccccagcctggctgcctctgcatggtgtggagcactcagcccgaaaatggcagaggaagacggatccctggtctcttttggctgtcctgggagccccagtcccatccgacctacaggcccaaagacacccaaccacaggccagatactgggttacaaagaggtcttgctggagaacacaaatctctcggctacaacctccttgtctcttcgccggcctccagggccagcctcccagtccttatggggaaatccaactcagtatcccttctggccaggggggatggatgaacccaccataacagatctgaacacacgggaggaggctgaggaggagatagactttgagaaagatcttcttactattccacctggtttcaagaaaggcatggactttgcaccaaaaggaagcgtccacagctgtatccaccccagaggccccagagcctccatctcaggagcagtgggccatccctgtggacgccacctcccctgttggtgatttctatcgcctcattccccagccagccttccagtgggcatttgagccagatgtgtttcagaaacaggccatcctgcacttggaacggcatgactctgtctttgtcgcagctcacacatctgcaggaaaaacagttgtggctgaatatgccattgccctggcccagaaacacatgacacgcaccatctacacttcgcccatcaaggccctgagcaaccagaagttccgggacttccgaaacacattcggggatgtggggctgctcaccggggatgtacagctgcatccggaggcctcctgcctcatcatgaccacagagatccttcgctccatgctgtacagtggctcagatgttattcgggacctggagtgggtcatctttgatgaggttcactatatcaacgatgtcgaggtaagggccatgggct

SEQ ID NO: 181956 - DNA, 1307 bp, Homo sapiens
  Payload ID: 15831
  Gene Symbol: SKIV2L
  Gene Name: SKI2 homolog, superkiller viralicidic activity 2-like
  ENST ID: ENST00000483553
  CDS Start-End: 1-469
gtgtgataagcccttgtcccaggacccacaggacagggggccagccactgcagaggtgccctatccagatgacctcgtgggattcaagctgttcctgcctgaagggccttgtgaccacaccgtggtcaagctccagccaggagatatggctgccatcaccaccaaggtgctccgggtgaatggggagaagatcttggaggacttcagcaagaggcagcagccaaaattcaagaaggatcctccccttgcagccgtgaccactgctgtccaggaactgctgcgtctggctcaggcccacccagccggacctcccaccctcgaccctgtcaatgacctgcagctcaaagatatgtcagttgtagagggtgggctccgggcccggaagctggaggagctgatccagggggctcagtgtgtacacagcccccgttttcctgcccagcccttgtcctcagtgcacccctgctaaggggcaaggagaaggctgacgggtggctctctgcagtacctgaagctgcgggagcgaatgcagatacagaaggagatggagcggctgcgcttcctactgtcggatcagtcattgctgctgcttcctgagtaccatcagcgagtagaggtgctccgaaccctgggttatgtggacgaggcgggcactgtgaagctggcagggcgggtggcttgtgccatgagcagccatgagttgctcctcactgagctcatgtttgacaatgcactgagcaccctgcggcctgaggagattgctgccttgctctctggcctggtctgccagagccctggggacgctggggatcagctcccaaacaccctcaagcagggaatagaacgtgtccgggctgtggccaagcggattggtgaggtccaggtggcttgtggcctgaaccagacggtggaggaatttgtgggggagctgaattttgggctggttgaggttgtatatgagtgggcccggggcatggtgagtacctgaggtttgggattttgcagacggctggctggggagaacctgcccaggctgagtgcatccagtcctcaccctactttccccacagcccttctccgagttggcagggctctcagggacccctgagggcctggtggtccgctgcattcagcgcctggctgagatgtgtcgctcactgcggggggcagcccgcctggtaggagagcctgtgctgggtgccaagatggagacagcggctaccttgctacggcgggacatcgtatttgcggccagcctctacacccagtgaatgccccatgtaaaaacatgatgataaaacagcaaa

SEQ ID NO: 181957 - DNA, 3378 bp, Homo sapiens
  Payload ID: 15831
  Gene Symbol: SKIV2L
  Gene Name: SKI2 homolog, superkiller viralicidic activity 2-like
  ENST ID: ENST00000474839
  CDS Start-End: 23-232
aggcagctgctgtggctccaggatgatggagacagagcgacttgtgctaccccctccagatcccctggacctaccccttcgggccgtggagctcggatgcacggggcactgggagctgctgaacttgcctggagctccagagagtagcatcttcttactattccacctggtttcaagaaaggcatggactttgcaccaaaagattgtccaactccagctcctggactactaagccttagctgtatgttggagcctctggatttgggtgggggtgacgaggatgagaatgaggcagtgggacagccaggaggtcccagaggggacactgtttcagcctctccctgcagtgctcccctggcccgagcaagcagcttggaagacctagtgttgaaggaagcgtccacagctgtatccaccccagaggccccagagcctccatctcaggagcagtgggccatccctgtggacgccacctcccctgttggtgatttctatcgcctcattccccagccagccttccagtgggcatttgagccagatgtgtttcagaaacaggccatcctgcacttggaacggcatgactctgtctttgtcgcagctcacacatctgcaggaaaaacagttgtggctgaatatgccattgccctggcccagaaacacatgacacgcaccatctacacttcgcccatcaaggccctgagcaaccagaagttccgggacttccgaaacacattcggggatgtggggctgctcaccggggatgtacagctgcatccggaggcctcctgcctcatcatgaccacagagatccttcgctccatgctgtacagtggctcagatgttattcgggacctggagtgggtcatctttgatgaggttcactatatcaacgatgtcgagcgtggggtcgtgtgggaggaggtgcttatcatgctacctgaccacgtttctatcatccttctgagtgccaccgtccccaacgcccttgagtttgctgactggattgggcggctgaagcgtcgtcagatctatgtgattagcactgtaacccgccccgtgcccctggagcactatcttttcacagggaacagctccaagacccagggggagctctttttgttgctggactcccgaggagccttccatacaaaagggtactatgcagctgtggaggccaagaaggagagaatgagcaaacacgcccagacctttggggccaagcagcccacacatcaggggggccctgcacaggaccgcggagtgtacctgtccctcctggcctccctccgcacacgtgcccagttgcccgtggtggtgttcaccttctcccggggccgctgtgatgagcaggcctcaggcctcacctcccttgacctcaccaccagttcggagaagagcgagatccacctcttcctgcagcgctgccttgctcgcctccgtggctctgaccgccagctgccccaggtcctgcacatgtcagagctcctgaatcgcggcctgggtgtgcaccatagcggcatcctgcccatcctcaaggagatcgtggagatgctcttcagccgtggcctggtcaaggtcttgtttgccacagagacctttgccatgggagtaaacatgcctgctcgtacagtagtgtttgactccatgcgcaaacacgatggctccaccttccgggacctgctccctggggagtatgtgcagatggcaggccgggcagggcggaggggcctggaccccacaggcaccgttatcctgctctgcaagggccgagtgcccgagatggcagacctgcaccgcatgatgatggggaagccgtcccagctgcagtcccagttccgcctcacgtacactatgatcctcaacttgctgcgagtggatgccctcagggtggaggacatgatgaagaggagcttctctgagtttccctcccgcaaagacagcaaggcccatgaacaggccctggctgaactgaccaagaggctgggagctttggaggagcctgacatgactggccaactggtcgacctgcctgaatattacagctggggggaggaactgacagagacccagcacatgatccagcgacgcatcatggagtctgtgaacgggctgaagtctctctcagcaggaagggtggtggttgtgaagaatcaggagcatcacaacgcattgggagtgatcctacaggtctcctcgaactccaccagcagagtattcacaaccctggtcttgtgtgataagcccttgtcccaggacccacaggacagggggccagccactgcagaggtgccctatccagatgacctcgtgggattcaagctgttcctgcctgaagggccttgtgaccacaccgtggtcaagctccagccaggagatatggctgccatcaccaccaaggtgctccgggtgaatggggagaagatcttggaggacttcagcaagaggcagcagccaaaattcaagaaggatcctccccttgcagccgtgaccactgctgtccaggaactgctgcgtctggctcaggcccacccagccggacctcccaccctcgaccctgtcaatgacctgcagctcaaagatatgtcagttgtagagggtgggctccgggcccggaagctggaggagctgatccagggggctcagtgtgtacacagcccccgttttcctgcccagtacctgaagctgcgggagcgaatgcagatacagaaggagatggagcggctgcgcttcctactgtcggatcagtcattgctgctgcttcctgagtaccatcagcgagtagaggtgctccgaaccctgggttatgtggacgaggcgggcactgtgaagctggcagggcgggtggcttgtgccatgagcagccatgagttgctcctcactgagctcatgtttgacaatgcactgagcaccctgcggcctgaggagattgctgccttgctctctggcctggtctgccagagccctggggacgctggggatcagctcccaaacaccctcaagcagggaatagaacgtgtccgggctgtggccaagcggattggtgaggtccaggtggcttgtggcctgaaccagacggtggaggaatttgtgggggagctgaattttgggctggttgaggttgtatatgagtgggcccggggcatgcccttctccgagttggcagggctctcagggacccctgagggcctggtggtccgctgcattcagcgcctggctgagatgtgtcgctcactgcggggggcagcccgcctggtaggagagcctgtgctgggtgccaagatggagacagcggctaccttgctacggcgggacatcgtatttgcggccagcctctacacccagtgaatgccccatgtaaaaacatgatgataaaacagc

SEQ ID NO: 181958 - DNA, 210 bp, Homo sapiens
  Payload ID: 15831
  Gene Symbol: SKIV2L
  Gene Name: SKI2 homolog, superkiller viralicidic activity 2-like
  ENST ID: ENST00000628157
  CDS Start-End: 1-210
atgatggagacagagcgacttgtgctaccccctccagatcccctggacctaccccttcgggccgtggagctcggatgcacggggcactgggagctgctgaacttgcctggagctccagagagtagcatcttcttactattccacctggtttcaagaaaggcatggactttgcaccaaaagattgtccaactccagctcctggactactaa

SEQ ID NO: 181959 - DNA, 210 bp, Homo sapiens; identical to SEQ ID NO: 181958
  Payload ID: 15831
  Gene Symbol: SKIV2L
  Gene Name: SKI2 homolog, superkiller viralicidic activity 2-like
  ENST ID: ENST00000627041
  CDS Start-End: 1-210

SEQ ID NO: 181960 - DNA, 210 bp, Homo sapiens; identical to SEQ ID NO: 181958
  Payload ID: 15831
  Gene Symbol: SKIV2L
  Gene Name: SKI2 homolog, superkiller viralicidic activity 2-like
  ENST ID: ENST00000627683
  CDS Start-End: 1-210

SEQ ID NO: 181961 - DNA, 210 bp, Homo sapiens; identical to SEQ ID NO: 181958
  Payload ID: 15831
  Gene Symbol: SKIV2L
  Gene Name: SKI2 homolog, superkiller viralicidic activity 2-like
  ENST ID: ENST00000626050
  CDS Start-End: 1-210

SEQ ID NO: 181962 - DNA, 210 bp, Homo sapiens; identical to SEQ ID NO: 181958
  Payload ID: 15831
  Gene Symbol: SKIV2L
  Gene Name: SKI2 homolog, superkiller viralicidic activity 2-like
  ENST ID: ENST00000627011
  CDS Start-End: 1-210

SEQ ID NO: 181963 - DNA, 210 bp, Homo sapiens; identical to SEQ ID NO: 181958
  Payload ID: 15831
  Gene Symbol: SKIV2L
  Gene Name: SKI2 homolog, superkiller viralicidic activity 2-like
  ENST ID: ENST00000626668
  CDS Start-End: 1-210

SEQ ID NO: 181964 - DNA, 3057 bp, Homo sapiens
  Payload ID: 15832
  Gene Symbol: SKIL
  Gene Name: SKI-like proto-oncogene
  Uniprot ID: P12757
  ENST ID: ENST00000259119
  CDS Start-End: 672-2726
gagcgggcgagcggcgacggcggcggcggcgggcacagattaattaaaagaagaatgaactataatccttgaagataactgggcaattttttaagtcggaggctgttcttactggtgtgaggatttacacacgtcttcagtttttcagcacagaccagcagaccatcatttttagaggaaatactccctctgccctcctttttggtttccttggtggtaaagattaaatttggttgcatcattttgacttgtgtttgagtctagattttatggcacaaggaatggcataaacttttcatgtgttttggttaaaacaaaccagaccattgcattgaccctggacatctttaattgagaaattggtaactttattttaatatgtatatctgaagaattcaagaaaacaaaggcatcctcagaggtgtgcctcttttctttattattagaggcaaaacgaacaattttataggatttgtagtgaaattataccagattataaggagaaccaaaactaagtcgcaaaatttattaatttaaggggctctcgctttgaaagtttgagagtaagttacgataggcatttgtatccattcattactttcctcttttcaaataagcaactaaatagaaatgctaatctcagacttaattatttaacagaagagtgtaccatggaaaacctccagacaaatttctccttggttcagggctcaactaaaaaactgaatgggatgggagatgatggcagccccccagcgaaaaaaatgataacggacattcatgcaaatggaaaaacgataaacaaggtgccaacagttaagaaggaacacttggatgactatggagaagcaccagtggaaactgatggagagcatgttaagcgaacctgtacttctgttcctgaaactttgcatttaaatcccagtttgaaacacacattggcacaattccatttaagtagtcagagctcgctgggtggaccagcagcattttctgctcggcattcccaagaaagcatgtcgcctactgtatttctgcctcttccatcacctcaggttcttcctggcccattgctcatcccttcagatagctccacagaactcactcagactgtgttggaaggggaatctatttcttgttttcaagttggaggagaaaagagactctgtttgccccaagtcttaaattctgttctccgagaatttacactccagcaaataaatacagtgtgtgatgaactgtacatatattgttcaaggtgtacttcagaccagcttcatatcttaaaggtactgggcatacttccattcaatgccccatcctgtgggctgattacattaactgatgcacaaagattatgtaatgctttattgcggccacgaacttttcctcaaaatggtagcgtacttcctgctaaaagctcattggcccagttaaaggaaactggcagtgcctttgaagtggagcatgaatgcctaggcaaatgtcagggtttatttgcaccccagttttatgttcagcctgatgctccgtgtattcaatgtctggagtgttgtggaatgtttgcaccccagacgtttgtgatgcattctcacagatcacctgacaaaagaacttgccactggggctttgaatcagctaaatggcattgctatcttcatgtgaaccaaaaatacttaggaacacctgaagaaaagaaactgaagataattttagaagaaatgaaggagaagtttagcatgagaagtggaaagagaaatcaatccaagacagatgcaccatcaggaatggaattacagtcatggtatcctgttataaagcaggaaggtgaccatgtttctcagacacattcatttttacaccccagctactacttatacatgtgtgataaagtggttgccccaaatgtgtcacttacttctgctgtatcccagtctaaagagctcacaaagacagaggcaagtaagtccatatcaagacagtcagagaaggctcacagtagtggtaaacttcaaaaaacagtgtcttatccagatgtctcacttgaggaacaggagaaaatggatttaaaaacaagtagagaattatgtagccgtttagatgcatcaatctcaaataattctacaagtaaaaggaaatctgagtctgccacttgcaacttagtcagagacataaacaaagtgggaattggccttgttgctgccgcttcatctccgcttcttgtgaaagatgtcatttgtgaggatgataagggaaaaatcatggaagaagtaatgagaacttatttaaaacaacaggaaaaactaaacttgattttgcaaaagaagcaacaacttcagatggaagtaaaaatgttgagtagttcaaaatctatgaaggaactcactgaagaacagcagaatttacagaaagagcttgaatctttgcagaatgaacatgctcaaagaatggaagaattttatgttgaacagaaagacttagagaaaaaattggagcagataatgaagcaaaaatgtacctgtgactcaaatttagaaaaagacaaagaggctgaatatgcaggacagttggcagaactgaggcagagattggaccatgctgaggccgataggcaagaactccaagatgaactcagacaggaacgggaagcaagacagaagttagagatgatgataaaagagctaaagctgcaaattctgaaatcatcaaagactgctaaagaatagaaactgttaaagagattcatctgtgtattactgacaaggttttttttgtttgttgcttgctttggtaattgaattctgaagaatttatctgcatgacgataactaggcattctatccatttgtagatcagagaaagtgaagagattatatattagtacttaaatttttacattttccaaatgaatgaaaatgtatgtttctttgtacttttttaaaaaaatcagcttagtaacaatactatatggtttcaactagtaggtaatctgcttatatttctaatgcaaacttaacaattgtgtactttttaaaagctgcaatatgtgttggaaaa

SEQ ID NO: 181965 - DNA, 2702 bp, Homo sapiens
  Payload ID: 15832
  Gene Symbol: SKIL
  Gene Name: SKI-like proto-oncogene
  Uniprot ID: P12757
  ENST ID: ENST00000413427
  CDS Start-End: 710-2626
ggtttcaaattggccctttggcctctggagcaaattcaaatgtaactcttccccaaccccccttctcttcttccagattaattaaaagaagaatgaactataatccttgaagataactgggcaattttttaagtcggaggctgttcttactggtgtgaggatttacacacgtcttcagtttttcagcacagaccagcagaccatcatttttagaggaaatactccctctgccctcctttttggtttccttggtggtaaagattaaatttggttgcatcattttgacttgtgtttgagtctagattttatggcacaaggaatggcataaacttttcatgtgttttggttaaaacaaaccagaccattgcattgaccctggacatctttaattgagaaattggtaactttattttaatatgtatatctgaagaattcaagaaaacaaaggcatcctcagaggtgtgcctcttttctttattattagaggcaaaacgaacaattttataggatttgtagtgaaattataccagattataaggagaaccaaaactaagtcgcaaaatttattaatttaaggggctctcgctttgaaagtttgagagtaagttacgataggcatttgtatccattcattactttcctcttttcaaataagcaactaaatagaaatgctaatctcagacttaattatttaacagaagagtgtaccatggaaaacctccagacaaatttctccttggttcagggctcaactaaaaaactgaatgggatgggagatgatggcagccccccagcgaaaaaaatgataacggacattcatgcaaatggaaaaacgataaacaaggtgccaacagttaagaaggaacacttggatgactatggagaagcaccagtggaaactgatggagagcatgttaagcgaacctgtacttctgttcctgaaactttgcatttaaatcccagtttgaaacacacattggcacaattccatttaagtagtcagagctcgctgggtggaccagcagcattttctgctcggcattcccaagaaagcatgtcgcctactgtatttctgcctcttccatcacctcaggttcttcctggcccattgctcatcccttcagatagctccacagaactcactcagactgtgttggaaggggaatctatttcttgttttcaagttggaggagaaaagagactctgtttgccccaagtcttaaattctgttctccgagaatttacactccagcaaataaatacagtgtgtgatgaactgtacatatattgttcaaggtgtacttcagaccagcttcatatcttaaaggtactgggcatacttccattcaatgccccatcctgtgggctgattacattaactgatgcacaaagattatgtaatgctttattgcggccacgaacttttcctcaaaatggtagcgtacttcctgctaaaagctcattggcccagttaaaggaaactggcagtgcctttgaagtggagcatgaatgcctaggcaaatgtcagggtttatttgcaccccagttttatgttcagcctgatgctccgtgtattcaatgtctggagtgttgtggaatgtttgcaccccagacgtttgtgatgcattctcacagatcacctgacaaaagaacttgccactggggctttgaatcagctaaatggcattgctatcttcatgtgaaccaaaaatacttaggaacacctgaagaaaagaaactgaagataattttagaagaaatgaaggagaagtttagcatgagaagtggaaagagaaatcaatccaagacagatgcaccatcaggaatggaattacagtcatggtatcctgttataaagcaggaaggtgaccatgtttctcagacacattcatttttacaccccagctactacttatacatgtgtgataaagtggttgccccaaatgtgtcacttacttctgctgtatcccagtctaaagagctcacaaagacagaggcaaatgcatcaatctcaaataattctacaagtaaaaggaaatctgagtctgccacttgcaacttagtcagagacataaacaaagtgggaattggccttgttgctgccgcttcatctccgcttcttgtgaaagatgtcatttgtgaggatgataagggaaaaatcatggaagaagtaatgagaacttatttaaaacaacaggaaaaactaaacttgattttgcaaaagaagcaacaacttcagatggaagtaaaaatgttgagtagttcaaaatctatgaaggaactcactgaagaacagcagaatttacagaaagagcttgaatctttgcagaatgaacatgctcaaagaatggaagaattttatgttgaacagaaagacttagagaaaaaattggagcagataatgaagcaaaaatgtacctgtgactcaaatttagaaaaagacaaagaggctgaatatgcaggacagttggcagaactgaggcagagattggaccatgctgaggccgataggcaagaactccaagatgaactcagacaggaacgggaagcaagacagaagttagagatgatgataaaagagctaaagctgcaaattctgaaatcatcaaagactgctaaagaatagaaactgttaaagagattcatctgtgtattactgacaaggttttttttgtttgttgcttgctttggtaattgaattc

SEQ ID NO: 181966 - DNA, 2757 bp, Homo sapiens
  Payload ID: 15832
  Gene Symbol: SKIL
  Gene Name: SKI-like proto-oncogene
  Uniprot ID: P12757
  ENST ID: ENST00000426052
  CDS Start-End: 233-2227
gagcggcgacggcggcggcggcgggcacagattaattaaaagaagaatgaactataatccttgaagataactgggcaattttttaagtcggaggctgttcttactggtgtgaggatttacacacgtcttcagtttttcagcacagaccagcagaccatcatttttagaggaaatactccctctgccctcctttttggtttccttggtgggctcaactaaaaaactgaatgggatgggagatgatggcagccccccagcgaaaaaaatgataacggacattcatgcaaatggaaaaacgataaacaaggtgccaacagttaagaaggaacacttggatgactatggagaagcaccagtggaaactgatggagagcatgttaagcgaacctgtacttctgttcctgaaactttgcatttaaatcccagtttgaaacacacattggcacaattccatttaagtagtcagagctcgctgggtggaccagcagcattttctgctcggcattcccaagaaagcatgtcgcctactgtatttctgcctcttccatcacctcaggttcttcctggcccattgctcatcccttcagatagctccacagaactcactcagactgtgttggaaggggaatctatttcttgttttcaagttggaggagaaaagagactctgtttgccccaagtcttaaattctgttctccgagaatttacactccagcaaataaatacagtgtgtgatgaactgtacatatattgttcaaggtgtacttcagaccagcttcatatcttaaaggtactgggcatacttccattcaatgccccatcctgtgggctgattacattaactgatgcacaaagattatgtaatgctttattgcggccacgaacttttcctcaaaatggtagcgtacttcctgctaaaagctcattggcccagttaaaggaaactggcagtgcctttgaagtggagcatgaatgcctaggcaaatgtcagggtttatttgcaccccagttttatgttcagcctgatgctccgtgtattcaatgtctggagtgttgtggaatgtttgcaccccagacgtttgtgatgcattctcacagatcacctgacaaaagaacttgccactggggctttgaatcagctaaatggcattgctatcttcatgtgaaccaaaaatacttaggaacacctgaagaaaagaaactgaagataattttagaagaaatgaaggagaagtttagcatgagaagtggaaagagaaatcaatccaagacagatgcaccatcaggaatggaattacagtcatggtatcctgttataaagcaggaaggtgaccatgtttctcagacacattcatttttacaccccagctactacttatacatgtgtgataaagtggttgccccaaatgtgtcacttacttctgctgtatcccagtctaaagagctcacaaagacagaggcaagtaagtccatatcaagacagtcagagaaggctcacagtagtggtaaacttcaaaaaacagtgtcttatccagatgtctcacttgaggaacaggagaaaatggatttaaaaacaagtagagaattatgtagccgtttagatgcatcaatctcaaataattctacaagtaaaaggaaatctgagtctgccacttgcaacttagtcagagacataaacaaagtgggaattggccttgttgctgccgcttcatctccgcttcttgtgaaagatgtcatttgtgaggatgataagggaaaaatcatggaagaagtaatgagaacttatttaaaacaacaggaaaaactaaacttgattttgcaaaagaagcaacaacttcagatggaagtaaaaatgttgagtagttcaaaatctatgaaggaactcactgaagaacagcagaatttacagaaagagcttgaatctttgcagaatgaacatgctcaaagaatggaagaattttatgttgaacagaaagacttagagaaaaaattggagcagataatgaagcaaaaatgtacctgtgactcaaatttagaaaaagacaaagaggctgaatatgcaggacagttggcagaactgaggcagagattggaccatgctgaggccgataggcaagaactccaagatgaactcagacaggaacgggaagcaagacagaagttagagatgatgataaaagagctaaagctgcaaattctgaaatcatcaaagactgctaaagaatagaaactgttaaagagattcatctgtgtattactgacaaggttttttttgtttgttgcttgctttggtaattgaattctgaagaatttatctgcatgacgataactaggcattctatccatttgtagatcagagaaagtgaagagattatatattagtacttaaatttttacattttccaaatgaatgaaaatgtatgtttctttgtacttttttaaaaaaatcagcttagtaacaatactatatggtttcaactagtaggtaatctgcttatatttctaatgcaaacttaacaattgtgtactttttaaaagctgcaatatgtgttggaaaatagctgtggtcaattttgttatccatatttcagactcaattttagatacaatggtggctttatattttaagtatatagagctactcaaggagttgaatctccccttttctcattaacacaatttttctaagttgatatggtgtactcattaacatacaccaaatttacttttactttgttcagattgtggaatgaattt

SEQ ID NO: 181967 - DNA, 7182 bp, Homo sapiens
  Payload ID: 15832
  Gene Symbol: SKIL
  Gene Name: SKI-like proto-oncogene
  Uniprot ID: P12757
  ENST ID: ENST00000458537
  CDS Start-End: 710-2764
ggtttcaaattggccctttggcctctggagcaaattcaaatgtaactcttccccaaccccccttctcttcttccagattaattaaaagaagaatgaactataatccttgaagataactgggcaattttttaagtcggaggctgttcttactggtgtgaggatttacacacgtcttcagtttttcagcacagaccagcagaccatcatttttagaggaaatactccctctgccctcctttttggtttccttggtggtaaagattaaatttggttgcatcattttgacttgtgtttgagtctagattttatggcacaaggaatggcataaacttttcatgtgttttggttaaaacaaaccagaccattgcattgaccctggacatctttaattgagaaattggtaactttattttaatatgtatatctgaagaattcaagaaaacaaaggcatcctcagaggtgtgcctcttttctttattattagaggcaaaacgaacaattttataggatttgtagtgaaattataccagattataaggagaaccaaaactaagtcgcaaaatttattaatttaaggggctctcgctttgaaagtttgagagtaagttacgataggcatttgtatccattcattactttcctcttttcaaataagcaactaaatagaaatgctaatctcagacttaattatttaacagaagagtgtaccatggaaaacctccagacaaatttctccttggttcagggctcaactaaaaaactgaatgggatgggagatgatggcagccccccagcgaaaaaaatgataacggacattcatgcaaatggaaaaacgataaacaaggtgccaacagttaagaaggaacacttggatgactatggagaagcaccagtggaaactgatggagagcatgttaagcgaacctgtacttctgttcctgaaactttgcatttaaatcccagtttgaaacacacattggcacaattccatttaagtagtcagagctcgctgggtggaccagcagcattttctgctcggcattcccaagaaagcatgtcgcctactgtatttctgcctcttccatcacctcaggttcttcctggcccattgctcatcccttcagatagctccacagaactcactcagactgtgttggaaggggaatctatttcttgttttcaagttggaggagaaaagagactctgtttgccccaagtcttaaattctgttctccgagaatttacactccagcaaataaatacagtgtgtgatgaactgtacatatattgttcaaggtgtacttcagaccagcttcatatcttaaaggtactgggcatacttccattcaatgccccatcctgtgggctgattacattaactgatgcacaaagattatgtaatgctttattgcggccacgaacttttcctcaaaatggtagcgtacttcctgctaaaagctcattggcccagttaaaggaaactggcagtgcctttgaagtggagcatgaatgcctaggcaaatgtcagggtttatttgcaccccagttttatgttcagcctgatgctccgtgtattcaatgtctggagtgttgtggaatgtttgcaccccagacgtttgtgatgcattctcacagatcacctgacaaaagaacttgccactggggctttgaatcagctaaatggcattgctatcttcatgtgaaccaaaaatacttaggaacacctgaagaaaagaaactgaagataattttagaagaaatgaaggagaagtttagcatgagaagtggaaagagaaatcaatccaagacagatgcaccatcaggaatggaattacagtcatggtatcctgttataaagcaggaaggtgaccatgtttctcagacacattcatttttacaccccagctactacttatacatgtgtgataaagtggttgccccaaatgtgtcacttacttctgctgtatcccagtctaaagagctcacaaagacagaggcaagtaagtccatatcaagacagtcagagaaggctcacagtagtggtaaacttcaaaaaacagtgtcttatccagatgtctcacttgaggaacaggagaaaatggatttaaaaacaagtagagaattatgtagccgtttagatgcatcaatctcaaataattctacaagtaaaaggaaatctgagtctgccacttgcaacttagtcagagacataaacaaagtgggaattggccttgttgctgccgcttcatctccgcttcttgtgaaagatgtcatttgtgaggatgataagggaaaaatcatggaagaagtaatgagaacttatttaaaacaacaggaaaaactaaacttgattttgcaaaagaagcaacaacttcagatggaagtaaaaatgttgagtagttcaaaatctatgaaggaactcactgaagaacagcagaatttacagaaagagcttgaatctttgcagaatgaacatgctcaaagaatggaagaattttatgttgaacagaaagacttagagaaaaaattggagcagataatgaagcaaaaatgtacctgtgactcaaatttagaaaaagacaaagaggctgaatatgcaggacagttggcagaactgaggcagagattggaccatgctgaggccgataggcaagaactccaagatgaactcagacaggaacgggaagcaagacagaagttagagatgatgataaaagagctaaagctgcaaattctgaaatcatcaaagactgctaaagaatagaaactgttaaagagattcatctgtgtattactgacaaggttttttttgtttgttgcttgctttggtaattgaattctgaagaatttatctgcatgacgataactaggcattctatccatttgtagatcagagaaagtgaagagattatatattagtacttaaatttttacattttccaaatgaatgaaaatgtatgtttctttgtacttttttaaaaaaatcagcttagtaacaatactatatggtttcaactagtaggtaatctgcttatatttctaatgcaaacttaacaattgtgtactttttaaaagctgcaatatgtgttggaaaatagctgtggtcaattttgttatccatatttcagactcaattttagatacaatggtggctttatattttaagtatatagagctactcaaggagttgaatctccccttttctcattaacacaatttttctaagttgatatggtgtactcattaacatacaccaaatttacttttactttgttcagattgtggaatgaatttccaccagttctcttctttttaatgtgtaccctaggaggaattttactgaggttatagcataccccatgagcacagtggggaagaagaatgtgttgttatgtgctgctgctaaacagaagcagcagttgtaatttgtttttcagtttaaatgtggttatagttagatttttttttaagcagcaacttttcaaaaataaaatgtgataatttctgaacttttgtttgtgttgttaatagtggtgtgaaaatattaacgttcttgagaaaaactgataccactgttgtgtatcagtttctatacaatccataatcctcctgtacagtttttacatgtagttatgagtcttactaaaatttatataatggacttgttttcctttaagttgtaaaatgttaaacaccttgaaggttattttggacttctgtatgtttaaatgttgtcttaccaaaatttgcacgaatggaccattttcatttactacttaatatcaaaatcaggaatttacagtcaactgatagtacatgataggtgcatataggacagtttagttacctgctactaaaagatttttagataagttttagaagataaaggaattccatagtttcaggagggacaacatcttctgcactttttttttgcacagaaaagtctgtcattctctaatggcaaatttcatatttgttaattcttggctcaaaatatattaggtaaaattcttagatctgtttttaaagggagtttcctgaaactatcattaattgacattattaccccatggattttatgggataataaatgtttttcatgttctcttataagatactatgtatgaaattacttcagagagctatatttattttaaaataaattagctagggttaaggttatattctatttccagcatagaaggtagataatctaatggtgtagaaagaatcactaggttgtcatttaaccagttattttcatattttgcttaatagtacatatccaaaaagaattttgtacttccccaaatgtaatttatttactaaattgagtataacctaaatgtgtgttttctattttccatttaaattttgctatattaagactaatttaattcgttgagtcttggaatcttctcaaggaggaacaaatattaaaatgacatgtagaaacaaatttttttttttttttttttttttttttttttgagacagagtctcgctgtctcccaggctggagttcagtggtgcaatctcggctcactgcaagctctgcctcctgggttcaagccattctcctgcctcagcctcccgagtagctgggactacaggcacccaccaccactcccggctaatttttagaaacaaatatttaaaatgacatattctcccaatacaatctatttagatctggagaaggaaaaatcagatatttatgatatagttttattttaattttgaattatttgtgtcacagctcagctttttggaagacaaactcaaacacctataatttcatttatatttctaattcacttggaacctttctgctttatgttacctagaaaatgataatttgtttaacccaaaacttctaaaataaattgcttaatccttgaaatatgttattggaaaattttaagcagtgcttaaacaccattaaattattatgaacttgtaattcagaattgagtaaagaaatattttttctagtccttcatatattgaaaacttgccacatgacattgtatcgtcttcattttccagaagatgcgttggtgtgccataggtttctaacttccttgaaaatagttttttaagtcaattgtaaatatacgtattattgttaaaagtaactttaaactgcaacacatagcttcaaaacaatatagagattttgtaataccttataagtggagttggctaaaataccttatccatataaaacttattctattctttgcatgcttattttgtgtgttggttgctagcttaaagtttgatttgttgttactctttgtgtgccaaattcactaggcaagcggatttttcctcagacttcaaaaaataattcttttaagaaaaaatgtaaaaatgtttattctaaaaagctgcattaaagggacaacctataaaaagttttgctagctcatctttagaaggaagaaagaatattagcttgggtgatgtttaatttgggtggcgatagtttctgtaggctaaactttatgagaaaagtgtacctactctataaaggtaataaatgtaaaacctcttgctgttattgaggaagctcttcaactaccctaaatttcacaaatgtaacttataacactatgaaaagatttgaccaacaatttacgtttgctgtgtgctttagtttttgtttaagcatattcttttgcttgaatttctgtgttcatgagagttagggtgttttatgcttcttgaactaattttataacatatttaatatattaccagttaagatataaaatcatttgtacatagcgaattgtaaagcagctattaaagtaggtgaaataaagtatatatttgccggttatccatatcttttagaagtcctgacagaacaaccagtttatttgcacataggtagcttctgtttgaaggaaggtaaagttataaggaaactcaaatactataagatgtgtcaaggtatttctccagaattaattgcaaagctagtgctgaaggattttaatcagcttctaaaattttcttctcaataaggcatatgttttgattacttagggaagattcctcatttttatttgccctttatgcatttaatccacatgataggacattaaaaattaatataaagaaaaatcgtgctcatactgtacatctgtttctgtgcttggaactacttgttaatagtttttatcgaagctgtcagcaataagggacataaaactgctgtattatacattgtggaattgaataaacagcctaattttttttttctagtatagggtacttaagcatttccacttttggaagaaaagtgtattagtattttatattgcatttcatttaaaaggacagttttttttttttttttgtaaatccattcattgaaatggtttctaaactgtataatgtaatttggagcctatttagtaatagaattaaatgtcctatgtagtgctacaatttttgaattagaaagtgatcaaatgtaagaaaaaaatttaaaaattcagcccagaaaacaaaatagtgtattaaattagtttaatgtaaaaggaatttataagatttttttcctcaatatagatacctcacttgaaaagaaagcacagcatacttaaagtagttctagtaaacatgtcctagaaaacagttgctaaatgtaggacatcttttgaggaattagtttatgagaaataaaattttacttgtttttactatcctgttagaagtatttgtttatcctgataattttaagccaacatagtagtcttaaattacttttgaatttctaatctgtgaaggcagtaaatgaaatatctgttctgcaactgttgaaacaaataattggctacattgaccataattaaagttaaaattttgccaatgatgtacagttttatggttaaagttgctgtggttggttgcattacatgacacagaaaactgtcctctacctcacgtgaaataaatattttatatggttttactaaaaataagactcatgtatctggtcacctagtttacaaattttgaattatatttattgaaacatgacatactgtgctctgagcttatacctcaattgtattttgtgctgttttccattttcatgccttgtaaataacttgtatagattgtggatcaaatactaaataaaaacttttaatgccaattaaa

SEQ ID NO: 181968 - DNA, 607 bp, Homo sapiens
  Payload ID: 15832
  Gene Symbol: SKIL
  Gene Name: SKI-like proto-oncogene
  ENST ID: ENST00000476188
  CDS Start-End: 239-607
acagccgaagggagcgggcgagcggcgacggcggcggcggcgggcacagattaattaaaagaagaatgaactataatccttgaagataactgggcaattttttaagtcggaggctgttcttactggtgtgaggatttacacacgtcttcagtttttcagcacagaccagcagaccatcatttttagaggaaatactccctctgccctcctttttggtttccttggtgaagagtgtaccatggaaaacctccagacaaatttctccttggttcagggctcaactaaaaaactgaatgggatgggagatgatggcagccccccagcgaaaaaaatgataacggacattcatgcaaatggaaaaacgataaacaaggtgccaacagttaagaaggaacacttggatgactatggagaagcaccagtggaaactgatggagagcatgttaagcgaacctgtacttctgttcctgaaactttgcatttaaatcccagtttgaaacacacattggcacaattccatttaagtagtcagagctcgctgggtggaccagcagcattttctgctcggcattcccaagaaagcatgtcgcctactgtatttctgcct

SEQ ID NO: 181969 - DNA, 710 bp, Homo sapiens
  Payload ID: 15832
  Gene Symbol: SKIL
  Gene Name: SKI-like proto-oncogene
  ENST ID: ENST00000470571
  CDS Start-End: 1-335
gttgtggaatgtttgcaccccagacgtttgtgatgcattctcacagatcacctgacaaaagaacttgccactggggctttgaatcagctaaatggcattgctatcttcatgtgaaccaaaaatacttaggaacacctgaagaaaagaaactgaagataattttagaagaaatgaaggagaagtttagcatgagaagtggaaagagaaatcaatccaagacagatgcaccatcaggaatggaattacagtcatggtatcctgttataaagcaggaaggtgaccatgtttctcagacacattcatttttacaccccagatgcatcaatctcaaataattctacaagtaaaaggaaatctgagtctgccacttgcaacttagtcagagacataaacaaagtgggaattggccttgttgctgccgcttcatctccgcttcttgtgaaagatgtcatttgtgaggatgataagggaaaaatcatggaagaagtaatgagaacttatttaaaacaacaggaaaaactaaacttgattttgcaaaagaagcaacaacttcagatggaagtaaaaatgttgagtagttcaaaatctatgaaggaactcactgaagaacagcagaatttacagaaagagcttgaatctttgcagaatgaacatgctcaaagaatggaagaattttatgttgaacagaaagacttagagaaaaaattgga

SEQ ID NO: 181970 - DNA, 2090 bp, Homo sapiens
  Payload ID: 15833
  Gene Symbol: SLAIN1
  Gene Name: SLAIN motif family, member 1
  ENST ID: ENST00000267219
  CDS Start-End: 32-1081
tagacatgtcctagataacccaactcctgagatggaagcagcgagacgttccctgtgctttagactggagcaaggttacacttccaggggctccccactcagtccccagtcatctatcgacagtgagctgagtacttcagaattggaggatgattctatctccatgggatataaattacaggacctcactgatgttcagatcatggctcgtctgcaagaagaaagtctcaggcaagattatgcttctacttcagcatctgtatcaagacatagttccagtgtgtcattgagttcaggaaaaaaagggacatgtagtgatcaagaatatgaccaatacagtctggaggatgaagaggaatttgatcatttgccaccacctcagcctcgtcttccaagatgttcccctttccaaagaggaattccccattcacagactttctccagcattcgggagtgtaggaggagccccagttcccagtattttccttcaaataattaccagcagcaacagtattattcacctcaagcccaaactccagatcagcaaccaaataggaccaatggagataagctccgaagaagtatgcctaacctagcccggatgccaagtacaactgccattagtagcaacattagttctccggtcaccgtgcgaaatagtcagagttttgactcaagcttgcatggagctggaaatggaatttcaagaatacaatcttgtattccatcaccgggacagcttcaacacagggtccacagcgtggggcatttcccagtgtctatccgacagcctcttaaagccacagcctatgtgagtccaaccgttcaaggcagcagtaacatgcctttatcaaacggcttacagctgtattccaacacaggaatccccacaccgaacaaagctgcagcttctgggataatgggtcgcagtgcactcccaagaccttcgttggcaataaatgggagtaacctgcctcgaagcaaaattgcacaacctgttagaagttttcttcagcctccaaagcctctgtcttcactcagcactctgagggatggaaattggagagatggttgctactaatgcagttttatgtacccttgaaaaatgggaaagaagtaaaaatgagggttgtgttacctagctggctgggtagcagtggatgttgggatattctttcccttttgtgttttaatatatttactgcattgtttctcaatggaccagtcaccagagactaattattgcacttaaatatttgcctgagatactgcaacattctcaaacccatggttgcagtattgtgacacttagatctaggaagtttttgtagaactgctctgtacctgaatactttttgagagaattaagatgtatcaataatgctttgccatatgagttttttaaagtaacttgttcaatttactcacgtgttctaaacatctttccattacatgttctgtattttaatacattgcatattgacaactaggttctataatgtatgctttgaaatttacttttttatagtttacaggaattttattttttgtgcctatttctttttacacctatgtgaaccactatggaacaacttaaattttgtgccataaaaatatttttgtggtaaggtactatttttttagctctagggatatatcagcaaaaacacatcatgcaatttgagacacataattttgtgttgaatgagcacaacataatttgaagcattgcaaggagataaccagacagcagaattaaatggtcctgtctttttcatttttaatttattgtcatacatgggtttcatatttataacggcatcatgagctcattgcacttaatacctgcaatgtttgctactgtaccacaattgattttcaatactttattacgaaggatgaaactgtaatgttttattaacaatgcttctggaaatgaatgcattttaaagcaaataaatctttttgatagaccttttacaaaatccatttgcactaatgaatgctttcttatggcatataacttaatatttgttactgtgtacactgctgttttggaatgttcagaaataaagactctatttcagcaa

SEQ ID NO: 181971 - DNA, 2118 bp, Homo sapiens
  Payload ID: 15833
  Gene Symbol: SLAIN1
  Gene Name: SLAIN motif family, member 1
  Uniprot ID: Q8ND83
  ENST ID: ENST00000314070
  CDS Start-End: 521-1096
gtaatttgcctggcaagtgatcagactggtataaaataacatcatctgttaggcaagatagcagtcacaaagaactattggtcttttaaaatatagaatttttaatgagaaactttgaataatagagattgaacatgtgagaacagctacctagtgtgtgttgcattattaacccctagtttgtagtgtattctggagtcaagttgacctacatagaagagaaggaactggaagtgcatgtctgtgttctggctccgattgggaaaagctgcttaaccactctagccgatggcggagtctcttctcttcaactgcctcactggcttttccttatagtcctgttgcaagactcagcccttatagcaatggcattaatactcccagcttctctaaaacctcaaataaagcaatactaacacctgaaaaaacaggttacacttccaggggctccccactcagtccccagtcatctatcgacagtgagctgagtacttcagaattggaggatgattctatctccatgggatataaattacaggacctcactgatgttcagatcatggctcgtctgcaagaagaaaataagctccgaagaagtatgcctaacctagcccggatgccaagtacaactgccattagtagcaacattagttctccggtcaccgtgcgaaatagtcagagttttgactcaagcttgcatggagctggaaatggaatttcaagaatacaatcttgtattccatcaccgggacagcttcaacacagggtccacagcgtggggcatttcccagtgtctatccgacagcctcttaaagccacagcctatgtgagtccaaccgttcaaggcagcagtaacatgcctttatcaaacggcttacagctgtattccaacacaggaatccccacaccgaacaaagctgcagcttctgggataatgggtcgcagtgcactcccaagaccttcgttggcaataaatgggagtaacctgcctcgaagcaaaattgcacaacctgttagaagttttcttcagcctccaaagcctctgtcttcactcagcactctgagggatggaaattggagagatggttgctactaatgcagttttatgtacccttgaaaaatgggaaagaagtaaaaatgagggttgtgttacctagctggctgggtagcagtggatgttgggatattctttcccttttgtgttttaatatatttactgcattgtttctcaatggaccagtcaccagagactaattattgcacttaaatatttgcctgagatactgcaacattctcaaacccatggttgcagtattgtgacacttagatctaggaagtttttgtagaactgctctgtacctgaatactttttgagagaattaagatgtatcaataatgctttgccatatgagttttttaaagtaacttgttcaatttactcacgtgttctaaacatctttccattacatgttctgtattttaatacattgcatattgacaactaggttctataatgtatgctttgaaatttacttttttatagtttacaggaattttattttttgtgcctatttctttttacacctatgtgaaccactatggaacaacttaaattttgtgccataaaaatatttttgtggtaaggtactatttttttagctctagggatatatcagcaaaaacacatcatgcaatttgagacacataattttgtgttgaatgagcacaacataatttgaagcattgcaaggagataaccagacagcagaattaaatggtcctgtctttttcatttttaatttattgtcatacatgggtttcatatttataacggcatcatgagctcattgcacttaatacctgcaatgtttgctactgtaccacaattgattttcaatactttattacgaaggatgaaactgtaatgttttattaacaatgcttctggaaatgaatgcattttaaagcaaataaatctttttgatagaccttttacaaaatccatttgcactaatgaatgctttcttatggcatataacttaatatttgttactgtgtacactgctgttttggaatgttcagaaataaagactctatttcagcaatatcaggtcatgc

SEQ ID NO: 181972 - DNA, 2394 bp, Homo sapiens
  Payload ID: 15833
  Gene Symbol: SLAIN1
  Gene Name: SLAIN motif family, member 1
  ENST ID: ENST00000351546
  CDS Start-End: 458-1372
gtaatttgcctggcaagtgatcagactggtataaaataacatcatctgttaggcaagatagcagtcacaaagaactattggtcttttaaaatatagaatttttaatgagaaactttgaataatagagattgaacatgtgagaacagctacctagtgtgtgttgcattattaacccctagtttgtagtgtattctggagtcaagttgacctacatagaagagaaggaactggaagtgcatgtctgtgttctggctccgattgggaaaagctgcttaaccactgttacacttccaggggctccccactcagtccccagtcatctatcgacagtgagctgagtacttcagaattggaggatgattctatctccatgggatataaattacaggacctcactgatgttcagatcatggctcgtctgcaagaagaaagtatgtgttctttctaaactagcaaaatgaggcttccacttggaatatacaggcagagggggaggttcaggcatttctctccaggtctcaggcaagattatgcttctacttcagcatctgtatcaagacatagttccagtgtgtcattgagttcaggaaaaaaagggacatgtagtgatcaagaatatgaccaatacagtctggaggatgaagaggaatttgatcatttgccaccacctcagcctcgtcttccaagatgttcccctttccaaagaggaattccccattcacagactttctccagcattcgggagtgtaggaggagccccagttcccagtattttccttcaaataattaccagcagcaacagtattattcacctcaagcccaaactccagatcagcaaccaaataggaccaatggagataagctccgaagaagtatgcctaacctagcccggatgccaagtacaactgccattagtagcaacattagttctccggtcaccgtgcgaaatagtcagagttttgactcaagcttgcatggagctggaaatggaatttcaagaatacaatcttgtattccatcaccgggacagcttcaacacagggtccacagcgtggggcatttcccagtgtctatccgacagcctcttaaagccacagcctatgtgagtccaaccgttcaaggcagcagtaacatgcctttatcaaacggcttacagctgtattccaacacaggaatccccacaccgaacaaagctgcagcttctgggataatgggtcgcagtgcactcccaagaccttcgttggcaataaatgggagtaacctgcctcgaagcaaaattgcacaacctgttagaagttttcttcagcctccaaagcctctgtcttcactcagcactctgagggatggaaattggagagatggttgctactaatgcagttttatgtacccttgaaaaatgggaaagaagtaaaaatgagggttgtgttacctagctggctgggtagcagtggatgttgggatattctttcccttttgtgttttaatatatttactgcattgtttctcaatggaccagtcaccagagactaattattgcacttaaatatttgcctgagatactgcaacattctcaaacccatggttgcagtattgtgacacttagatctaggaagtttttgtagaactgctctgtacctgaatactttttgagagaattaagatgtatcaataatgctttgccatatgagttttttaaagtaacttgttcaatttactcacgtgttctaaacatctttccattacatgttctgtattttaatacattgcatattgacaactaggttctataatgtatgctttgaaatttacttttttatagtttacaggaattttattttttgtgcctatttctttttacacctatgtgaaccactatggaacaacttaaattttgtgccataaaaatatttttgtggtaaggtactatttttttagctctagggatatatcagcaaaaacacatcatgcaatttgagacacataattttgtgttgaatgagcacaacataatttgaagcattgcaaggagataaccagacagcagaattaaatggtcctgtctttttcatttttaatttattgtcatacatgggtttcatatttataacggcatcatgagctcattgcacttaatacctgcaatgtttgctactgtaccacaattgattttcaatactttattacgaaggatgaaactgtaatgttttattaacaatgcttctggaaatgaatgcattttaaagcaaataaatctttttgatagaccttttacaaaatccatttgcactaatgaatgctttcttatggcatataacttaatatttgttactgtgtacactgctgttttggaatgttcagaaataaagactctatttcagcaatatcaggtcatgc

SEQ ID NO: 181973 - DNA, 2075 bp, Homo sapiens
  Payload ID: 15833
  Gene Symbol: SLAIN1
  Gene Name: SLAIN motif family, member 1
  Uniprot ID: Q8ND83
  ENST ID: ENST00000358679
  CDS Start-End: 151-1068
attaatactcccagcttctctaaaacctcaaataaagcaatactaacacctgaaaaaacaggttacacttccaggggctccccactcagtccccagtcatctatcgacagtgagctgagtacttcagaattggaggatgattctatctccatgggatataaattacaggacctcactgatgttcagatcatggctcgtctgcaagaagaaagtctcaggcaagattatgcttctacttcagcatctgtatcaagacatagttccagtgtgtcattgagttcaggaaaaaaagggacatgtagtgatcaagaatatgaccaatacagtctggaggatgaagaggaatttgatcatttgccaccacctcagcctcgtcttccaagatgttcccctttccaaagaggaattccccattcacagactttctccagcattcgggagtgtaggaggagccccagttcccagtattttccttcaaataattaccagcagcaacagtattattcacctcaagcccaaactccagatcagcaaccaaataggaccaatggagataagctccgaagaagtatgcctaacctagcccggatgccaagtacaactgccattagtagcaacattagttctccggtcaccgtgcgaaatagtcagagttttgactcaagcttgcatggagctggaaatggaatttcaagaatacaatcttgtattccatcaccgggacagcttcaacacagggtccacagcgtggggcatttcccagtgtctatccgacagcctcttaaagccacagcctatgtgagtccaaccgttcaaggcagcagtaacatgcctttatcaaacggcttacagctgtattccaacacaggaatccccacaccgaacaaagctgcagcttctgggataatgggtcgcagtgcactcccaagaccttcgttggcaataaatgggagtaacctgcctcgaagcaaaattgcacaacctgttagaagttttcttcagcctccaaagcctctgtcttcactcagcactctgagggatggaaattggagagatggttgctactaatgcagttttatgtacccttgaaaaatgggaaagaagtaaaaatgagggttgtgttacctagctggctgggtagcagtggatgttgggatattctttcccttttgtgttttaatatatttactgcattgtttctcaatggaccagtcaccagagactaattattgcacttaaatatttgcctgagatactgcaacattctcaaacccatggttgcagtattgtgacacttagatctaggaagtttttgtagaactgctctgtacctgaatactttttgagagaattaagatgtatcaataatgctttgccatatgagttttttaaagtaacttgttcaatttactcacgtgttctaaacatctttccattacatgttctgtattttaatacattgcatattgacaactaggttctataatgtatgctttgaaatttacttttttatagtttacaggaattttattttttgtgcctatttctttttacacctatgtgaaccactatggaacaacttaaattttgtgccataaaaatatttttgtggtaaggtactatttttttagctctagggatatatcagcaaaaacacatcatgcaatttgagacacataattttgtgttgaatgagcacaacataatttgaagcattgcaaggagataaccagacagcagaattaaatggtcctgtctttttcatttttaatttattgtcatacatgggtttcatatttataacggcatcatgagctcattgcacttaatacctgcaatgtttgctactgtaccacaattgattttcaatactttattacgaaggatgaaactgtaatgttttattaacaatgcttctggaaatgaatgcattttaaagcaaataaatctttttgatagaccttttacaaaatccatttgcactaatgaatgctttcttatggcatataacttaatatttgttactgtgtacactgctgttttggaatgttcagaaataaagactctatttcagc

SEQ ID NO: 181974 - DNA, 572 bp, Homo sapiens
  Payload ID: 15833
  Gene Symbol: SLAIN1
  Gene Name: SLAIN motif family, member 1
  ENST ID: ENST00000377236
  CDS Start-End: 335-572
gtgctgctcttttccccagtgttttcggagggatgacgggggatggtaggggttggcctctgtctgcgactgttactgttctttcgttttaaacgaacgctggacaggatttgcgtgctcttcctcctcgggtggcatcggaagccgcgcagtgatggatctctctttatagagaggttcgttcttgctgtttgaattttgcagtcgtgtgcccttttgcgttgcattttcattgaaatcttattttcagagactgacttgctttttaaaatggggtgacctcactggctttcccataaatagtgccaataaagaggacttttcttggagtggaatgaacaggttatacattggctcttcaaagacgttcacctcatcagagaaatccctgactcctttgcagtggtgtagacatgtcctagataacccaactcctgagatggaagcagcgagacgttccctgtgctttagactggagcaaggttacacttccaggggctccccactcagtccccagtcatctatcgacagtgagctgagtacttcagaattggaggatgattctatctcca

SEQ ID NO: 181975 - DNA, 472 bp, Homo sapiens
  Payload ID: 15833
  Gene Symbol: SLAIN1
  Gene Name: SLAIN motif family, member 1
  ENST ID: ENST00000422114
  CDS Start-End: 139-472
cggccgcggcgccctcggggcccacgatgatggcggagcaggttatacattggctcttcaaagacgttcacctcatcagagaaatccctgactcctttgcagtggtgtagacatgtcctagataacccaactcctgagatggaagcagcgagacgttccctgtgctttagactggagcaaggttacacttccaggggctccccactcagtccccagtcatctatcgacagtgagctgagtacttcagaattggaggatgattctatctccatgggatataaattacaggacctcactgatgttcagatcatggctcgtctgcaagaagaaagtctcaggcaagattatgcttctacttcagcatctgtatcaagacatagttccagtgtgtcattgagttcaggaaaaaaagggacatgtagtgatcaagaatatgaccaatacagtctggaggatgaagaggaatttgatc

SEQ ID NO: 181976 - DNA, 829 bp, Homo sapiens
  Payload ID: 15833
  Gene Symbol: SLAIN1
  Gene Name: SLAIN motif family, member 1
  ENST ID: ENST00000442759
  CDS Start-End: 215-829
gacgccgccaggggcagctgcagcgccgccctcgccgccccccacgctgctggacgaggtggaattgctggatctggagagcgtagccgcctggcgggacgaggacgactacacctggttatacattggctcttcaaagacgttcacctcatcagagaaatccctgactcctttgcagtggtgtagacatgtcctagataacccaactcctgagatggaagcagcgagacgttccctgtgctttagactggagcaaggttacacttccaggggctccccactcagtccccagtcatctatcgacagtgagctgagtacttcagaattggaggatgattctatctccatgggatataaattacaggacctcactgatgttcagatcatggctcgtctgcaagaagaaagtctcaggcaagattatgcttctacttcagcatctgtatcaagacatagttccagtgtgtcattgagttcaggaaaaaaagggacatgtagtgatcaagaatatgaccaatacagtctggaggatgaagaggaatttgatcatttgccaccacctcagcctcgtcttccaagatgttcccctttccaaagaggaattccccattcacagactttctccagcattcgggagtgtaggaggagccccagttcccagtattttccttcaaataattaccagcagcaacagtattattcacctcaagcccaaactccagatcagcaaccaaataggaccaatggagataagctccgaagaagtatgcctaacctagcccggatgccaagtacaactgccattagtagcaacattagttctccggtc

SEQ ID NO: 181977 - DNA, 2855 bp, Homo sapiens
  Payload ID: 15833
  Gene Symbol: SLAIN1
  Gene Name: SLAIN motif family, member 1
  ENST ID: ENST00000418532
  CDS Start-End: 61-1833
ccgaggagccggcgcggcggcgcgcactccccggcggccgcggcgccctcggggcccacgatgatggcggagcaggtgaaatgcgcctcggcaggggtcagctctggagcgggctccgggccggtggtgaacgcggagctggaggtgaagaagctgcaggagctggtgcgcaagctggagaagcagaacgagcagctgcggagtcgagcggccagcgcggccgccgccccgcacctgctgctgctgccgccgccgccgcccgccgcgccgccccccgctggcctgcagcctttgggtcctcggagccccccggccgccacggccaccgccgcggcctcagggggcctggggctcgggctggcgctgggcgcggggggcggtggcggcagcggtagtggcagcggcggtggctccagccccgcgttcccgggcaccttctgcctgcctagccccgcgccctccctgctttgcagcctggcgcagccacccgaggcgcccttcgtctacttcaagccggcagcaggcttcttcggcgcgggcggtggcgggccggagccggggggcgcggggacgccgccaggggcagctgcagcgccgccctcgccgccccccacgctgctggacgaggtggaattgctggatctggagagcgtagccgcctggcgggacgaggacgactacacctggttatacattggctcttcaaagacgttcacctcatcagagaaatccctgactcctttgcagtggtgtagacatgtcctagataacccaactcctgagatggaagcagcgagacgttccctgtgctttagactggagcaaggttacacttccaggggctccccactcagtccccagtcatctatcgacagtgagctgagtacttcagaattggaggatgattctatctccatgggatataaattacaggacctcactgatgttcagatcatggctcgtctgcaagaagaaagtctcaggcaagattatgcttctacttcagcatctgtatcaagacatagttccagtgtgtcattgagttcaggaaaaaaagggacatgtagtgatcaagaatatgaccaatacagtctggaggatgaagaggaatttgatcatttgccaccacctcagcctcgtcttccaagatgttcccctttccaaagaggaattccccattcacagactttctccagcattcgggagtgtaggaggagccccagttcccagtattttccttcaaataattaccagcagcaacagtattattcacctcaagcccaaactccagatcagcaaccaaataggaccaatggagataagctccgaagaagtatgcctaacctagcccggatgccaagtacaactgccattagtagcaacattagttctccggtcaccgtgcgaaatagtcagagttttgactcaagcttgcatggagctggaaatggaatttcaagaatacaatcttgtattccatcaccgggacagcttcaacacagggtccacagcgtggggcatttcccagtgtctatccgacagcctcttaaagccacagcctatgtgagtccaaccgttcaaggcagcagtaacatgcctttatcaaacggcttacagctgtattccaacacaggaatccccacaccgaacaaagctgcagcttctgggataatgggtcgcagtgcactcccaagaccttcgttggcaataaatgggagtaacctgcctcgaagcaaaattgcacaacctgttagaagttttcttcagcctccaaagcctctgtcttcactcagcactctgagggatggaaattggagagatggttgctactaatgcagttttatgtacccttgaaaaatgggaaagaagtaaaaatgagggttgtgttacctagctggctgggtagcagtggatgttgggatattctttcccttttgtgttttaatatatttactgcattgtttctcaatggaccagtcaccagagactaattattgcacttaaatatttgcctgagatactgcaacattctcaaacccatggttgcagtattgtgacacttagatctaggaagtttttgtagaactgctctgtacctgaatactttttgagagaattaagatgtatcaataatgctttgccatatgagttttttaaagtaacttgttcaatttactcacgtgttctaaacatctttccattacatgttctgtattttaatacattgcatattgacaactaggttctataatgtatgctttgaaatttacttttttatagtttacaggaattttattttttgtgcctatttctttttacacctatgtgaaccactatggaacaacttaaattttgtgccataaaaatatttttgtggtaaggtactatttttttagctctagggatatatcagcaaaaacacatcatgcaatttgagacacataattttgtgttgaatgagcacaacataatttgaagcattgcaaggagataaccagacagcagaattaaatggtcctgtctttttcatttttaatttattgtcatacatgggtttcatatttataacggcatcatgagctcattgcacttaatacctgcaatgtttgctactgtaccacaattgattttcaatactttattacgaaggatgaaactgtaatgttttattaacaatgcttctggaaatgaatgcattttaaagcaaataaatctttttgatagaccttttacaaaatccatttgcactaatgaatgctttcttatggcatataacttaatatttgttactgtgtacactgctgttttggaatgttcagaaataaagactctatttcagcaatatcaggtcatgc

SEQ ID NO: 181978 - DNA, 899 bp, Homo sapiens
  Payload ID: 15833
  Gene Symbol: SLAIN1
  Gene Name: SLAIN motif family, member 1
  ENST ID: ENST00000446759
  CDS Start-End: 215-899
gacgccgccaggggcagctgcagcgccgccctcgccgccccccacgctgctggacgaggtggaattgctggatctggagagcgtagccgcctggcgggacgaggacgactacacctggttatacattggctcttcaaagacgttcacctcatcagagaaatccctgactcctttgcagtggtgtagacatgtcctagataacccaactcctgagatggaagcagcgagacgttccctgtgctttagactggagcaagctagccgatggcggagtctcttctcttcaactgcctcactggcttttccttatagtcctgttgcaagactcagcccttatagcaatggcattaatactcccagcttctctaaaacctcaaataaagcaatactaacacctgaaaaaacaggttacacttccaggggctccccactcagtccccagtcatctatcgacagtgagctgagtacttcagaattggaggatgattctatctccatgggatataaattacaggacctcactgatgttcagatcatggctcgtctgcaagaagaaagtctcaggcaagattatgcttctacttcagcatctgtatcaagacatagttccagtgtgtcattgagttcaggaaaaaaagggacatgtagtgatcaagaatatgaccaatacagtctggaggatgaagaggaatttgatcatttgccaccacctcagcctcgtcttccaagatgttcccctttccaaagaggaattccccattcacagactttctccagcattcgggagtgtaggaggagccccagttcccagtattttccttcaaataattaccagcagcaacagtattattcacctcaagcccaaactccagatcagcaaccaaataggaccaatggag

SEQ ID NO: 181979 - DNA, 1033 bp, Homo sapiens
  Payload ID: 15833
  Gene Symbol: SLAIN1
  Gene Name: SLAIN motif family, member 1
  ENST ID: ENST00000441784
  CDS Start-End: 312-1033
agcagtcacaaagaactattggtcttttaaaatatagaatttttaatgagaaactttgaataatagagattgaacatgtgagaacagctacctagtgtgtgttgcattattaacccctagtttgtagtgtattctggagtcaagttgacctacatagaagagaaggaactggaagtgcatgtctgtgttctggctccgattgggaaaagctgcttaaccactgttacacttccaggggctccccactcagtccccagtcatctatcgacagtgagctgagtacttcagaattggaggatgattctatctccatgggatataaattacaggacctcactgatgttcagatcatggctcgtctgcaagaagaaagtctcaggcaagattatgcttctacttcagcatctgtatcaagacatagttccagtgtgtcattgagttcaggaaaaaaagggacatgtagtgatcaagaatatgaccaatacagtctggaggatgaagaggaatttgatcatttgccaccacctcagcctcgtcttccaagatgttcccctttccaaagaggaattccccattcacagactttctccagcattcgggagtgtaggaggagccccagttcccagtattttccttcaaataattaccagcagcaacagtattattcacctcaagcccaaactccagatcagcaaccaaataggaccaatggagataagctccgaagaagtatgcctaacctagcccggatgccaagtacaactgccattagtagcaacattagttctccggtcaccgtgcgaaatagtcagagttttgactcaagcttgcatggagctggaaatggaatttcaagaatacaatcttgtattccatcaccgggacagcttcaacacagggtccacagcgtggggcatttcccagtgtctatccgacagcctcttaaagccacagcctatgtgagtccaaccgttcaaggcagcagtaacatgcctttatcaaacggcttacagctgtattccaacacaggaat

SEQ ID NO: 181980 - DNA, 531 bp, Homo sapiens
  Payload ID: 15833
  Gene Symbol: SLAIN1
  Gene Name: SLAIN motif family, member 1
  ENST ID: ENST00000481614
  CDS Start-End: 496-531
gcttttccttatagtcctgttgcaagactcagcccttatagcaatggcattaatactcccagcttctctaaaacctcaaataaagcaatactaacacctgaaaaaacaggtaatattttaacttcttgactagctgcttgctttgtaattcagttactaaacacggcttaaatattcatctttcatttgaaaagcttgagaataatcttaagagtggagagtttgtgctgcacacttactttgggtacaaaaggcctagcactaatttgtactctaacaccattgatctactgctctcaattttatgtagcagacagtcttccctctttagcaaaagtatatgcatgcagttctgtatttccaaatgcttatgtgcttttaaaattaaatgtcaaacacaattaaggttacacttccaggggctccccactcagtccccagtcatctatcgacagtgagctgagtacttcagaattggaggatgattctatctccatgggatataaattacaggacctcactgatgttcag

SEQ ID NO: 181981 - DNA, 1461 bp, Homo sapiens
  Payload ID: 15833
  Gene Symbol: SLAIN1
  Gene Name: SLAIN motif family, member 1
  Uniprot ID: Q8ND83
  ENST ID: ENST00000488699
  CDS Start-End: 44-1324
agtgctgctcttttccccagtgttttcggagggatgacgggggatggtaggggttggcctctgtctgcgactgttactgttctttcgttttaaacgaacgctggacaggatttgcgtgctcttcctcctcgggtggcatcggaagccgcgcagtgatggatctctctttatagagaggttatacattggctcttcaaagacgttcacctcatcagagaaatccctgactcctttgcagtggtgtagacatgtcctagataacccaactcctgagatggaagcagcgagacgttccctgtgctttagactggagcaaggttacacttccaggggctccccactcagtccccagtcatctatcgacagtgagctgagtacttcagaattggaggatgattctatctccatgggatataaattacaggacctcactgatgttcagatcatggctcgtctgcaagaagaaagtctcaggcaagattatgcttctacttcagcatctgtatcaagacatagttccagtgtgtcattgagttcaggaaaaaaagggacatgtagtgatcaagaatatgaccaatacagtctggaggatgaagaggaatttgatcatttgccaccacctcagcctcgtcttccaagatgttcccctttccaaagaggaattccccattcacagactttctccagcattcgggagtgtaggaggagccccagttcccagtattttccttcaaataattaccagcagcaacagtattattcacctcaagcccaaactccagatcagcaaccaaataggaccaatggagataagctccgaagaagtatgcctaacctagcccggatgccaagtacaactgccattagtagcaacattagttctccggtcaccgtgcgaaatagtcagagttttgactcaagcttgcatggagctggaaatggaatttcaagaatacaatcttgtattccatcaccgggacagcttcaacacagggtccacagcgtggggcatttcccagtgtctatccgacagcctcttaaagccacagcctatgtgagtccaaccgttcaaggcagcagtaacatgcctttatcaaacggcttacagctgtattccaacacaggaatccccacaccgaacaaagctgcagcttctgggataatgggtcgcagtgcactcccaagaccttcgttggcaataaatgggagtaacctgcctcgaagcaaaattgcacaacctgttagaagttttcttcagcctccaaagcctctgtcttcactcagcactctgagggatggaaattggagagatggttgctactaatgcagttttatgtacccttgaaaaatgggaaagaagtaaaaatgagggttgtgttacctagctggctgggtagcagtggatgttgggatattctttcccttttgtgttttaatatatttactgcattgtttctcaat

SEQ ID NO: 181982 - DNA, 570 bp, Homo sapiens
  Payload ID: 15833
  Gene Symbol: SLAIN1
  Gene Name: SLAIN motif family, member 1
  ENST ID: ENST00000474663
  CDS Start-End: 129-570
aattttcattattatacaggcatgttggctttaatcaaagttacacttccaggggctccccactcagtccccagtcatctatcgacagtgagctgagtacttcagaattggaggatgattctatctccatgggatataaattacaggacctcactgatgttcagatcatggctcgtctgcaagaagaaagtctcaggcaagattatgcttctacttcagcatctgtatcaagacatagttccagtgtgtcattgagttcaggaaaaaaagggacatgtagtgatcaagaatatgaccaatacagtctggaggatgaagaggaatttgatcatttgccaccacctcagcctcgtcttccaagatgttcccctttccaaagaggaattccccattcacagactttctccagcattcgggagtgtaggaggagccccagttcccagtattttccttcaaataattaccagcagcaacagtattattcacctcaagcccaaactccagatcagcaaccaaataggaccaatggagataagctccgaagaagtatgcctaacctagcccggatgc

SEQ ID NO: 181983 - DNA, 2637 bp, Homo sapiens
  Payload ID: 15833
  Gene Symbol: SLAIN1
  Gene Name: SLAIN motif family, member 1
  Uniprot ID: Q8ND83
  ENST ID: ENST00000466548
  CDS Start-End: 27-1733
cggccgcggcgccctcggggcccacgatgatggcggagcaggtgaaatgcgcctcggcaggggtcagctctggagcgggctccgggccggtggtgaacgcggagctggaggtgaagaagctgcaggagctggtgcgcaagctggagaagcagaacgagcagctgcggagtcgagcggccagcgcggccgccgccccgcacctgctgctgctgccgccgccgccgcccgccgcgccgccccccgctggcctgcagcctttgggtcctcggagccccccggccgccacggccaccgccgcggcctcagggggcctgggccccgcgttcccgggcaccttctgcctgcctagccccgcgccctccctgctttgcagcctggcgcagccacccgaggcgcccttcgtctacttcaagccggcagcaggcttcttcggcgcgggcggtggcgggccggagccggggggcgcggggacgccgccaggggcagctgcagcgccgccctcgccgccccccacgctgctggacgaggtggaattgctggatctggagagcgtagccgcctggcgggacgaggacgactacacctggttatacattggctcttcaaagacgttcacctcatcagagaaatccctgactcctttgcagtggtgtagacatgtcctagataacccaactcctgagatggaagcagcgagacgttccctgtgctttagactggagcaaggttacacttccaggggctccccactcagtccccagtcatctatcgacagtgagctgagtacttcagaattggaggatgattctatctccatgggatataaattacaggacctcactgatgttcagatcatggctcgtctgcaagaagaaagtctcaggcaagattatgcttctacttcagcatctgtatcaagacatagttccagtgtgtcattgagttcaggaaaaaaagggacatgtagtgatcaagaatatgaccaatacagtctggaggatgaagaggaatttgatcatttgccaccacctcagcctcgtcttccaagatgttcccctttccaaagaggaattccccattcacagactttctccagcattcgggagtgtaggaggagccccagttcccagtattttccttcaaataattaccagcagcaacagtattattcacctcaagcccaaactccagatcagcaaccaaataggaccaatggagataagctccgaagaagtatgcctaacctagcccggatgccaagtacaactgccattagtagcaacattagttctccggtcaccgtgcgaaatagtcagagttttgactcaagcttgcatggagctggaaatggaatttcaagaatacaatcttgtattccatcaccgggacagcttcaacacagggtccacagcgtggggcatttcccagtgtctatccgacagcctcttaaagccacagcctatgtgagtccaaccgttcaaggcagcagtaacatgcctttatcaaacggcttacagctgtattccaacacaggaatccccacaccgaacaaagctgcagcttctgggataatgggtcgcagtgcactcccaagaccttcgttggcaataaatgggagtaacctgcctcgaagcaaaattgcacaacctgttagaagttttcttcagcctccaaagcctctgtcttcactcagcactctgagggatggaaattggagagatggttgctactaatgcagttttatgtacccttgaaaaatgggaaagaagtaaaaatgagggttgtgttacctagctggctgggtagcagtggatgttgggatattctttcccttttgtgttttaatatatttactgcattgtttctcaatggaccagtcaccagagactaattattgcacttaaatatttgcctgagatactgcaacattctcaaacccatggttgcagtattgtgacacttagatctaggaagtttttgtagaactgctctgtacctgaatactttttgagagaattaagatgtatcaataatgctttgccatatgagttttttaaagtaacttgttcaatttactcacgtgttctaaacatctttccattacatgttctgtattttaatacattgcatattgacaactaggttctataatgtatgctttgaaatttacttttttatagtttacaggaattttattttttgtgcctatttctttttacacctatgtgaaccactatggaacaacttaaattttgtgccataaaaatatttttgtggtaaggtactatttttttagctctagggatatatcagcaaaaacacatcatgcaatttgagacacataattttgtgttgaatgagcacaacataatttgaagcattgcaaggagataaccagacagcagaattaaatggtcctgtctttttcatttttaatttattgtcatacatgggtttcatatttataacggcatcatgagctcattgcacttaatacctgcaatgtttgctactgtaccacaattgattttcaatactttattacgaaggatgaaactgtaatgttttattaacaatgcttctggaaatgaatgcattttaaagcaaataaatctttttgatagaccttttacaaaa

SEQ ID NO: 181984 - DNA, 622 bp, Homo sapiens
  Payload ID: 15833
  Gene Symbol: SLAIN1
  Gene Name: SLAIN motif family, member 1
  ENST ID: ENST00000462234
  CDS Start-End: 325-622
agtcaagttgacctacatagaagagaaggaactggaagtgcatgtctgtgttctggctccgattgggaaaagctgcttaaccactctagccgatggcggagtctcttctcttcaactgcctcactggcttttccttatagtcctgttgcaagactcagcccttatagcaatggcattaatactcccagcttctctaaaacctcaaataaagcaatactaacacctgaaaaaacaggttacacttccaggggctccccactcagtccccagtcatctatcgacagtgagctgagtacttcagaattggaggatgattctatctccatgggatataaattacaggacctcactgatgttcagatcatggctcgtctgcaagaagaaagtctcaggcaagattatgcttctacttcagcatctgtatcaagacatagttccagtgtgtcattgagttcaggaaaaaaagggacatgtagtgatcaagaatatgaccaatacagtctggaggatgaagaggaatttgatcatttgccaccacctcagcctcgtcttccaagatgttcccctttccaaagaggaattccccattcacagactttctccagcattcgggagtgtagga

SEQ ID NO: 181985 - DNA, 576 bp, Homo sapiens
  Payload ID: 15833
  Gene Symbol: SLAIN1
  Gene Name: SLAIN motif family, member 1
  ENST ID: ENST00000496045
  CDS Start-End: 171-576
attgcgaatgtggtttccttgcctagttcttccacatacttaaggaaaagatatttttaatgtaattgttagaatgtgttggttacacttccaggggctccccactcagtccccagtcatctatcgacagtgagctgagtacttcagaattggaggatgattctatctccatgggatataaattacaggacctcactgatgttcagatcatggctcgtctgcaagaagaaagtctcaggcaagattatgcttctacttcagcatctgtatcaagacatagttccagtgtgtcattgagttcaggaaaaaaagggacatgtagtgatcaagaatatgaccaatacagtctggaggatgaagaggaatttgatcatttgccaccacctcagcctcgtcttccaagatgttcccctttccaaagaggaattccccattcacagactttctccagcattcgggagtgtaggaggagccccagttcccagtattttccttcaaataattaccagcagcaacagtattattcacctcaagcccaaactccagatcagcaaccaaataggaccaatggaggta

SEQ ID NO: 181986 - DNA, 6299 bp, Homo sapiens
  Payload ID: 15834
  Gene Symbol: SLAIN2
  Gene Name: SLAIN motif family, member 2
  Uniprot ID: Q9P270
  ENST ID: ENST00000264313
  CDS Start-End: 419-2164
aatccccgcccctcaagcaccggccccgccccataggccccgtccgtggccccgccccgccgcgagctggcgccgggtcctctcagcgcccgccggcggccgcgtccacccccgacgctctgaggtcaccgactgggccggcccgcggggggcggagggacggagggaagatggcggcaggggccggatattggcgccgcctcccccaatcccggagccggcgcagatgaggcagttcggctggggccagcggcgctttggaacccgaggtggggggaccctggcggtggggcctggtcctgctatatgccggcgcctcggctagagtgagcggcggcgacgcctctttcctccgtctctttccctgtcgctgcgagagcgagcgggcggcggaggcggcggcggcggcggggccgggatggaggacgttaactccaacgtgaacgcggaccaggaggtgcggaagctgcaggagctggtgaagaagctggagaagcagaacgaacagctgaggagccgctcgggggccgtgcagggcgccggctcccttgggcccggcagcccggttcgggccggcgcgtccattccctcctccggcgcggcgtctcctcggggcttccccttgggcctcagcgccaagtcgggcggcgggcccgggtcgggcccgaggcggacgagtagcgaagagctgcgggacgccacctccttgctagcggcgggcgagggcggcttgctggacgaggtggagccgctgcggcccgacgagctggagcgcctgtcaggctgggaggaggaggaggagagctggctgtattcatcaccaaagaaaaaacttacaccaatgcagaaatcggttagtccattagtttggtgcaggcaagttttggattacccaagtcctgatgttgagtgtgctaaaaaatctcttatccacaaacttgatcaaactatgtcagctctcaagaggcagaatttatataataatcctttcaactctatgagttacaccagtccttacagtccaaatgccagtagcccatacagcagtggcttcaattctccatcctcaaccccagtgcgacctcctatagtcaaacagcttatacttcctggaaattcaggtaacttgaaaagctcagacagaaatcctccactcagtcctcagtcctctatagatagtgagttaagtgcttcagaattagatgaagattcaattggatccaattataagctaaatgatgtaactgatgtacagattctagcccggatgcaggaagaaagtctccggcaagaatatgcagccaccacgtctcggcgcagttctggttcatcttgcaattctacaagacggggtacttttagtgatcaggaacttgatgcacaaagtttagatgatgaagatgacaatatgcatcatgcagtataccctgctgttaacaggttttcaccatcaccacgcaattcacctcgaccgtcacctaagcagtcacccagaaattcacctcgttcacgatctcctgctcggggaatagaatatagtagagtgtccccacagcctatgattagccgcttacagcaacctcgcctttcacttcaaggccatcccacagatttacagacaagcaatgttaaaaatgaagaaaaactaagacgcagtcttccaaacctgtcccgaacatctaatacacaagttgactcagtgaaaagcagcagaagtgactcaaattttcaagtgccaaacggaggaatacctcgtatgcaacctcaggcttcagccataccttctccaggcaaattccgttcccctgcagcaccatctcctttggctcttcggcaaccagtgaaagcatttagtaaccatggctctggttctcctggtagccaagaaataacacagctcacacaaaccacctcctcacctgggcctcctatggttcagagcacagtctcagcaaatcctcccagcaatatcaacagcgctactctaaccagacctgcagggacaactgcaatgagaagtggcttgcccagacccagtgccccttctgctgggggcataccagtgcctcgcagcaaacttgcacagcctgttcgcagatccttgccagctcctaaaacctatggtagcatgaaagatgacagttggaaagatggctgttactgaccagcaaagacaagaatgcagaagtccacggcttcatggatacccttcaccaggctaaaaaacaacttttatatgcagactgttcagataagactcttgggatttataaaatcccagccctctctgtcttaattagcacaaaccgacagagatcatcaaacagcactttaatgacatttaacatcagatgtgtttggtaatcatacaatcactctccatagaatcacttttagttttgtttaatagaaactaggttgatttttaaaaaatatttgacagaggccaatatctgggcaaatacctaatggatgccaaagagaaatgcccatttgtaaatgagaaaaatgcccatttgtgcacaagaaaatggtgaattcaggctatccaaaacttcacattcaacctaatttactgtataaatagtatcaataaatatttgtgttaatgagaactaatattctgactaattatctaaagtgtttcactagtacaccaggaaactacagattgagattagggggtgggaggaaagaaacctgggctagagattaaaacattcctaaatttagcagaatttcagaaatgatttttgcagattcattagaaaagaaaaattgtcatttaatcttaagttttggatgtagctcacatgtcaccaccaccagatagtgttacagcatgtatccatcatgttgcattgacacatcaaacttgtgtgtgtttgttttgattgccaaaagggcttaatatcagttgtacaatctttctgaactttatagttcctggctcaggaaagatggcctttgctattgaagccaacttcttcacatgctgttatctttacagaactaagagatcttgtttctattagcaggttttcatgataggaaagaacaagtagtgtgtgtctttattcttgatacaacaccacctcggtgcttgcaacctggaacaaaaccataccatgagagagagggggaaaaaaatctatgcacttaacctacaaaatctctggtgatgacagttgtattgttgctattacatggcataacggtctattatgtggtaggaaaatatagcctgctaaatcctacttaagttgatccactttaaactgagtaactgtataaaacatctattgaaaattcttttccttttgacttagattctgccttacatcaatttttgcatttttggtaaaaaaaaaaccctactacgtatgactctaacctgatacttgctctctaatggctcttaatatatccttgaaatcggctatttcaattttatcagacttttaccagagtaaaacttgcttctgtagcaggcctctcattttttattatgaggtctgtttttaaatacttaatttgaacagctctaagatattgtcacttaggtcatctaaaagcttttagagatttgaacataagttcatttcctgttaatcaaagacattccgtaagttggcaaaagaaattgggagagagaaatagaaggcttgatattctggacagcattaaggttgataggttgatgataaaaacttaaaaccaggacctccattctgtcatgactgacaccatggtagtctgtcagcttgaccagtggagagtcattcatttagcacaagcagctggagatttaaactgccagtactatgtatttggtgtataatgcaaggaagaaactttatccttgaatttgagggtgatggggtgggtcaggaaaggatggcgccagaattctacatgataatgaactaaaaaatgttgcttttcagaggaagataaagcatcttcttttgggaggggggtatctcatgtctaagtaagtaaaagaaagaagtagctactgtctcttttaaaaaccacgtacaaaacagaacaagtctcagttttcagtgcaacatttcaaaaaatatatatgctgcaatctaataattaaaaggaattttacctattatgaaacatattacattttttaagttagataatcagtttcaaaaggagtattcaggttatttaactttgtttttaaatggctgcatcagaaaaaaatgtctatttttttttattaaaatatttcatcacttgttaaaacatatttttgatctgagtttggtaaagtattattttacctgctgttgtactaccacagactgttgacttttagtttcttaaagagaaaaattgcctttttactagaaagcctttgtatattgcaatttttctgtttgggaaaatctaaggatttactgtggttagtcttacagaagaaatgtggatttgataaactagtgcctatgattttaacttatgtttgatatatagtagtaagggttttatgaatgttgattattttgtgccaacagcccagaattgtcacttatatgtaagcagaaaacaatgagctctgcttccaaagttatttaattttctcagtgtttgaatgttattttttgtaagtgtgttaataaaagtgtaaagaattggaaaaaatataaatattcttaactcaagcatttgctggatcatttttctacaaaacttgtttgtacaatataaaacactctctgaagagttgactttttttcagtttcgtatcctggaaatcacattttgtaaaactggggaccattcataattgtcagatactttttaaaattatctcaatacatcacttttataaaaaaaaaaagtttttttgaaagaaaattagatacatatgtggccccagatgtttgtataactctagaatgatctagactatgtatgtttaaattaactttttattgaatgtacaggtgtccatttttgacgttaagcatggtcctttaaggtcacatgacgtttgatttgcaaacatttctatagccgaacttgtatatgtggttgcctccttaataaacagcctgaccataatgtttattattaaatttatattctttaagtgtttaattaatctctggatatggtaagattccttttttcctctcagttgcctacacttggttttaataaattactcagttgagtttttctttaaccacagaaacccaaatcatattgccctttcagatttagtcttcatggggttggattatgtcttatattttctctgtcagagttatttcatatatggattttacttgaaggaaatttacagtttactctaaattgatttgttcttggaacttttttacctgctgtgaattgatacctagttataaaaagctagcatttgcctagatcataactatgtatggtatctagttagaaaaaaacaagcaaaaagctattatgagtttccaagagggacaattaatgcattttcataccaaatgcgaatatttaggtgatcacgtgcatcttttcttgtatggatggaaaaatcaagaattgtacactgtttaatgagttctccatattcctttaggagatatttgctttgcaattacatgttacaattagaataattacaattaaaataatattacatgttacaattagattaatagtgatgagagggaaaaaagacacccttctgtttttttctctcaagccagtctaaaaacttgaagagccatttaaaattaaatgtcactatacttgtattataaatcaatacataagtttaaacctgttatatactcagtgcaacagaaaaacccatatggaggttcaaccactgatgtattttgaatgatcctaaatataagtcttgggtggctaaatggccctctgcttaccagtctgaaaatgaaaccgattatactcatcggccttatttactgtaatacaaactggttaaaactatgttaactgaatgctagtttgaaacaaattatctacattaagtcatcttaatgttttctctttaaaagaaataaaaaaatctgtttcttctgatttcgaaagtaatagaaactctgctgtagaacataaactaaaaatattaaaaagtataaaggtaaaaaatgatagttgtctgcaatcccataatccggaaatattgaagtactgtccgtaacatggttatgacatgttaagtggaagggtagaaggtctttttttttttaaggagaaaatgtttcttttaaataaatgtttcttatgtaaaaatgttgacatga

SEQ ID NO: 181987 - DNA, 550 bp, Homo sapiens
  Payload ID: 15834
  Gene Symbol: SLAIN2
  Gene Name: SLAIN motif family, member 2
  ENST ID: ENST00000510595
  CDS Start-End: 1-508
ccgaacatctaatacacaagttgactcagtgaaaagcagcagaagtgactcaaattttcaagtgccaaacggaggaatacctcgtatgcaacctcaggcttcagccacttcgcaaaggctgaaaaatttgcctcgcacttccctcaaagccaaacagttgcttcaaacttcatctacaaaaagagtaccttctccaggcaaattccgttcccctgcagcaccatctcctttggctcttcggcaaccagtgaaagcatttagtaaccatggctctggttctcctggtagccaagaaataacacagctcacacaaaccacctcctcacctgggcctcctatggttcagagcacagtctcagcaaatcctcccagcaatatcaacagcgctactctaaccagacctgcagggacaactgcaatgagaagtggcttgcccagacccagtgccccttctgctgggggcataccagtgcctcgcagcaaacttgcacagcctgttcgcaggtaagtggcagatgttctgtttcagcattcttgagtgcctgaaagt

SEQ ID NO: 181988 - DNA, 4219 bp, Homo sapiens
  Payload ID: 15834
  Gene Symbol: SLAIN2
  Gene Name: SLAIN motif family, member 2
  ENST ID: ENST00000512093
  CDS Start-End: 37-1281
aagaggcagaatttatataataatcctttcaactctatgagttacaccagtccttacagtccaaatgccagtagcccatacagcagtggcttcaattctccatcctcaaccccagtgcgacctcctatagtcaaacagcttatacttcctggaaattcaggtaacttgaaaagctcagacagaaatcctccactcagtcctcagtcctctatagatagtgagttaagtgcttcagaattagatgaagattcaattggatccaattataagctaaatgatgtaactgatgtacagattctagcccggatgcaggaagaaagtctccggcaagaatatgcagccaccacgtctcggcgcagttctggttcatcttgcaattctacaagacggggtacttttagtgatcaggaacttgatgcacaaagtttagatgatgaagatgacaatatgcatcatgcagtataccctgctgttaacaggttttcaccatcaccacgcaattcacctcgaccgtcacctaagcagtcacccagaaattcacctcgttcacgatctcctgctcggggaatagaatatagtagagtgtccccacagcctatgattagccgcttacagcaacctcgcctttcacttcaaggccatcccacagatttacagacaagcaatgttaaaaatgaagaaaaactaagacgcagtcttccaaacctgtcccgaacatctaatacacaagttgactcagtgaaaagcagcagaagtgactcaaattttcaagtgccaaacggaggaatacctcgtatgcaacctcaggcttcagccacttcgcaaaggctgaaaaatttgcctcgcacttccctcaaagccaaacagttgcttcaaacttcatctacaaaaagagtaccttctccaggcaaattccgttcccctgcagcaccatctcctttggctcttcggcaaccagtgaaagcatttagtaaccatggctctggttctcctggtagccaagaaataacacagctcacacaaaccacctcctcacctgggcctcctatggttcagagcacagtctcagcaaatcctcccagcaatatcaacagcgctactctaaccagacctgcagggacaactgcaatgagaagtggcttgcccagacccagtgccccttctgctgggggcataccagtgcctcgcagcaaacttgcacagcctgttcgcagatccttgccagctcctaaaacctatggtagcatgaaagatgacagttggaaagatggctgttactgaccagcaaagacaagaatgcagaagtccacggcttcatggatacccttcaccaggctaaaaaacaacttttatatgcagactgttcagataagactcttgggatttataaaatcccagccctctctgtcttaattagcacaaaccgacagagatcatcaaacagcactttaatgacatttaacatcagatgtgtttggtaatcatacaatcactctccatagaatcacttttagttttgtttaatagaaactaggttgatttttaaaaaatatttgacagaggccaatatctgggcaaatacctaatggatgccaaagagaaatgcccatttgtaaatgagaaaaatgcccatttgtgcacaagaaaatggtgaattcaggctatccaaaacttcacattcaacctaatttactgtataaatagtatcaataaatatttgtgttaatgagaactaatattctgactaattatctaaagtgtttcactagtacaccaggaaactacagattgagattagggggtgggaggaaagaaacctgggctagagattaaaacattcctaaatttagcagaatttcagaaatgatttttgcagattcattagaaaagaaaaattgtcatttaatcttaagttttggatgtagctcacatgtcaccaccaccagatagtgttacagcatgtatccatcatgttgcattgacacatcaaacttgtgtgtgtttgttttgattgccaaaagggcttaatatcagttgtacaatctttctgaactttatagttcctggctcaggaaagatggcctttgctattgaagccaacttcttcacatgctgttatctttacagaactaagagatcttgtttctattagcaggttttcatgataggaaagaacaagtagtgtgtgtctttattcttgatacaacaccacctcggtgcttgcaacctggaacaaaaccataccatgagagagagggggaaaaaaatctatgcacttaacctacaaaatctctggtgatgacagttgtattgttgctattacatggcataacggtctattatgtggtaggaaaatatagcctgctaaatcctacttaagttgatccactttaaactgagtaactgtataaaacatctattgaaaattcttttccttttgacttagattctgccttacatcaatttttgcatttttggtaaaaaaaaaaccctactacgtatgactctaacctgatacttgctctctaatggctcttaatatatccttgaaatcggctatttcaattttatcagacttttaccagagtaaaacttgcttctgtagcaggcctctcattttttattatgaggtctgtttttaaatacttaatttgaacagctctaagatattgtcacttaggtcatctaaaagcttttagagatttgaacataagttcatttcctgttaatcaaagacattccgtaagttggcaaaagaaattgggagagagaaatagaaggcttgatattctggacagcattaaggttgataggttgatgataaaaacttaaaaccaggacctccattctgtcatgactgacaccatggtagtctgtcagcttgaccagtggagagtcattcatttagcacaagcagctggagatttaaactgccagtactatgtatttggtgtataatgcaaggaagaaactttatccttgaatttgagggtgatggggtgggtcaggaaaggatggcgccagaattctacatgataatgaactaaaaaatgttgcttttcagaggaagataaagcatcttcttttgggaggggggtatctcatgtctaagtaagtaaaagaaagaagtagctactgtctcttttaaaaaccacgtacaaaacagaacaagtctcagttttcagtgcaacatttcaaaaaatatatatgctgcaatctaataattaaaaggaattttacctattatgaaacatattacattttttaagttagataatcagtttcaaaaggagtattcaggttatttaactttgtttttaaatggctgcatcagaaaaaaatgtctatttttttttattaaaatatttcatcacttgttaaaacatatttttgatctgagtttggtaaagtattattttacctgctgttgtactaccacagactgttgacttttagtttcttaaagagaaaaattgcctttttactagaaagcctttgtatattgcaatttttctgtttgggaaaatctaaggatttactgtggttagtcttacagaagaaatgtggatttgataaactagtgcctatgattttaacttatgtttgatatatagtagtaagggttttatgaatgttgattattttgtgccaacagcccagaattgtcacttatatgtaagcagaaaacaatgagctctgcttccaaagttatttaattttctcagtgtttgaatgttattttttgtaagtgtgttaataaaagtgtaaagaattggaaaaaatataaatattcttaactcaagcatttgctggatcatttttctacaaaacttgtttgtacaatataaaacactctctgaagagttgactttttttcagtttcgtatcctggaaatcacattttgtaaaactggggaccattcataattgtcagatactttttaaaattatctcaatacatcacttttataaaaaaaaaaagtttttttgaaagaaaattagatacatatgtggccccagatgtttgtataactctagaatgatctagactatgtatgtttaaattaactttttattgaatgtacaggtgtccatttttgacgttaagcatggtcctttaaggtcacatgacgtttgatttgcaaacatttctatagccgaacttgtatatgtggttgcctccttaataaacagcctgaccataatgtttattattaaa

SEQ ID NO: 181989 - DNA, 588 bp, Homo sapiens
  Payload ID: 15834
  Gene Symbol: SLAIN2
  Gene Name: SLAIN motif family, member 2
  ENST ID: ENST00000505131
  CDS Start-End: 10-186
ctagcccggatgcaggaagaaagtctccggcaagaatatgcagccaccacgtctcggcgcagttctggttcatcttgcaattctacaagacggggttttcaccatcaccacgcaattcacctcgaccgtcacctaagcagtcacccagaaattcacctcgttcacgatctcctgctcggggaatagaatatagtagagtgtccccacagcctatgattagccgcttacagcaacctcgcctttcacttcaaggccatcccacagatttacagacaagcaatgttaaaaatgaagaaaaactaagacgcagtcttccaaacctgtcccgaacatctaatacacaagttgactcagtgaaaagcagcagaagtgactcaaattttcaagtgccaaacggaggaatacctcgtatgcaacctcaggcttcagccagtgaattacttttcctttttttcccagaagttgataattaaggaatatatatagggaaaacacaatgggattccaatcattgatttacttttaagtggaaacttcgcaaaggctgaaaaatttgcctcgcacttccctcaaagccaaacagttgct

SEQ ID NO: 181990 - DNA, 730 bp, Homo sapiens
  Payload ID: 15835
  Gene Symbol: SLAMF6
  Gene Name: SLAM family member 6
  Uniprot ID: Q96DU3
  ENST ID: ENST00000368055
  CDS Start-End: 51-716
aaacattgactgcctcaaggtctcaagcaccagtcttcaccgcggaaagcatgttgtggctgttccaatcgctcctgtttgtcttctgctttggcccaggacaactgaggaacatacaagttaccaatcacagtcagctatttcagaatatgacctgtgagctccatctgacttgctctgtggaggatgcagatgacaatgtctcattcagatgggaggccttgggaaacacactttcaagtcagccaaacctcactgtctcctgggaccccaggatttccagtgaacaggactacacctgcatagcagagaatgctgtcagtaatttatccttctctgtctctgcccagaagctttgcgaagatgttaaaattcaatatacagataccaaaatgattctgtttatggtttctgggatatgcatagtcttcggtttcatcatactgctgttacttgttttgaggaaaagaagagattccctatctttgtctactcagcgaacacagggccccgcagagtccgcaaggaacctagagtatgtttcagtgtctccaacgaacaacactgtgtatgcttcagtcactcattcaaacagggaaacagaaatctggacacctagagaaaatgatactatcacaatttactccacaattaatcattccaaagagagtaaacccactttttccagggcaactgcccttgacaatgtcgtgtaagttgctgaaaggcc

SEQ ID NO: 181991 - DNA, 2712 bp, Homo sapiens
  Payload ID: 15835
  Gene Symbol: SLAMF6
  Gene Name: SLAM family member 6
  Uniprot ID: Q96DU3
  ENST ID: ENST00000368057
  CDS Start-End: 62-1060
cagaagggcaaaaacattgactgcctcaaggtctcaagcaccagtcttcaccgcggaaagcatgttgtggctgttccaatcgctcctgtttgtcttctgctttggcccagggaatgtagtttcacaaagcagcttaaccccattgatggtgaacgggattctgggggagtcagtaactcttcccctggagtttcctgcaggagagaaggtcaacttcatcacttggcttttcaatgaaacatctcttgccttcatagtaccccatgaaaccaaaagtccagaaatccacgtgactaatccgaaacagggaaagcgactgaacttcacccagtcctactccctgcaactcagcaacctgaagatggaagacacaggctcttacagagcccagatatccacaaagacctctgcaaagctgtccagttacactctgaggatattaagacaactgaggaacatacaagttaccaatcacagtcagctatttcagaatatgacctgtgagctccatctgacttgctctgtggaggatgcagatgacaatgtctcattcagatgggaggccttgggaaacacactttcaagtcagccaaacctcactgtctcctgggaccccaggatttccagtgaacaggactacacctgcatagcagagaatgctgtcagtaatttatccttctctgtctctgcccagaagctttgcgaagatgttaaaattcaatatacagataccaaaatgattctgtttatggtttctgggatatgcatagtcttcggtttcatcatactgctgttacttgttttgaggaaaagaagagattccctatctttgtctactcagcgaacacagggccccgcagagtccgcaaggaacctagagtatgtttcagtgtctccaacgaacaacactgtgtatgcttcagtcactcattcaaacagggaaacagaaatctggacacctagagaaaatgatactatcacaatttactccacaattaatcattccaaagagagtaaacccactttttccagggcaactgcccttgacaatgtcgtgtaagttgctgaaaggcctcagaggaattcgggaatgacacgtcttctgatcccatgagacagaacaaagaacaggaagcttggttcctgttgttcctggcaacagaatttgaatatctaggataggatgatcacctccagtccttcggacttaaacctgcctacctgagtcaaacacctaaggataacatcatttccagcatgtggttcaaataatattttccaatccacttcaggccaaaacatgctaaagataacacaccagcacattgactctctctttgataactaagcaaatggaattatggttgacagagagtttatgatccagaagacaaccacttctctccttttagaaagcagcaggattgacttattgagaaataatgcagtgtgttggttacatgtgtagtctctggagttggatgggcccatcctgatacaagttgagcatcccttgtctgaaatgcttgggattagaaatgtttcagatttcaattttttttcagattttggaatatttgcattatatttagcggttgagtatccaaatccaaaaatccaaaattcaaaatgctccaataagcatttcccttgagtttcattgatgtcgatgcagtgctcaaaatctcagattttggagcattttggatattggatttttggatttgggatgctcaacttgtacaatgtttattagacacatctcctgggacatactgcctaaccttttggagccttagtctcccagactgaaaaaggaagaggatggtattacatcagctccattgtttgagccaagaatctaagtcatccctgactccagtgtctttgtcaccaggccctttggactctacctcagaaatatttcttggaccttccacttctcctccaactccttgaccaccatcctgtatccaaccatcaccacctctaacctgaatcctaccttaagatcagaacagttgtcctcacttttgttcttgtccctctccaacccactctccacaagatggccagagtaatgtttttaatataaattggatccttcagtttcctgcttaaaaccctgcaggtttcccaatgcactcagaaagaaatccagtttccatggccctggatggtctggcccacctccagcctcagctagcattacccttctgacactctctatgtagcctccctgatcttctttcagctcctctattaaaggaaaagttctttatgttaattatttacatcttcctgcaggcccttcctctgcctgctggggtcctcctattctttaggtttaattttaaatatgtcacctcctaagagaaaccttcccagaccactctttctaaaatgaatcttctaggctgggcatggtggctcacacctgtaatccctgtactttgggaggccaaggggggagatcacttgaggtcaggagttcaagaccagcctggccaacttggtgaaaccccgtctttactaaaaatacaaaaaaattagccaggcgtggtggtgcacccctaaaatcccagctacttgagagactgaggcaggagaatcgcttgaacccaggaggtggaggttccagtgagccaaaatcatgccaatgtattccagtctgggtgacagagtgagactctgtctcaaaaaataaataaa

SEQ ID NO: 181992 - DNA, 2743 bp, Homo sapiens
  Payload ID: 15835
  Gene Symbol: SLAMF6
  Gene Name: SLAM family member 6
  Uniprot ID: Q96DU3
  ENST ID: ENST00000368059
  CDS Start-End: 71-1066
agtttatgacagaagggcaaaaacattgactgcctcaaggtctcaagcaccagtcttcaccgcggaaagcatgttgtggctgttccaatcgctcctgtttgtcttctgctttggcccagggaatgtagtttcacaaagcagcttaaccccattgatggtgaacgggattctgggggagtcagtaactcttcccctggagtttcctgcaggagagaaggtcaacttcatcacttggcttttcaatgaaacatctcttgccttcatagtaccccatgaaaccaaaagtccagaaatccacgtgactaatccgaaacagggaaagcgactgaacttcacccagtcctactccctgcaactcagcaacctgaagatggaagacacaggctcttacagagcccagatatccacaaagacctctgcaaagctgtccagttacactctgaggatattaagacaactgaggaacatacaagttaccaatcacagtcagctatttcagaatatgacctgtgagctccatctgacttgctctgtggaggatgcagatgacaatgtctcattcagatgggaggccttgggaaacacactttcaagtcagccaaacctcactgtctcctgggaccccaggatttccagtgaacaggactacacctgcatagcagagaatgctgtcagtaatttatccttctctgtctctgcccagaagctttgcgaagatgttaaaattcaatatacagataccaaaatgattctgtttatggtttctgggatatgcatagtcttcggtttcatcatactgctgttacttgttttgaggaaaagaagagattccctatctttgtctactcagcgaacacagggccccgagtccgcaaggaacctagagtatgtttcagtgtctccaacgaacaacactgtgtatgcttcagtcactcattcaaacagggaaacagaaatctggacacctagagaaaatgatactatcacaatttactccacaattaatcattccaaagagagtaaacccactttttccagggcaactgcccttgacaatgtcgtgtaagttgctgaaaggcctcagaggaattcgggaatgacacgtcttctgatcccatgagacagaacaaagaacaggaagcttggttcctgttgttcctggcaacagaatttgaatatctaggataggatgatcacctccagtccttcggacttaaacctgcctacctgagtcaaacacctaaggataacatcatttccagcatgtggttcaaataatattttccaatccacttcaggccaaaacatgctaaagataacacaccagcacattgactctctctttgataactaagcaaatggaattatggttgacagagagtttatgatccagaagacaaccacttctctccttttagaaagcagcaggattgacttattgagaaataatgcagtgtgttggttacatgtgtagtctctggagttggatgggcccatcctgatacaagttgagcatcccttgtctgaaatgcttgggattagaaatgtttcagatttcaattttttttcagattttggaatatttgcattatatttagcggttgagtatccaaatccaaaaatccaaaattcaaaatgctccaataagcatttcccttgagtttcattgatgtcgatgcagtgctcaaaatctcagattttggagcattttggatattggatttttggatttgggatgctcaacttgtacaatgtttattagacacatctcctgggacatactgcctaaccttttggagccttagtctcccagactgaaaaaggaagaggatggtattacatcagctccattgtttgagccaagaatctaagtcatccctgactccagtgtctttgtcaccaggccctttggactctacctcagaaatatttcttggaccttccacttctcctccaactccttgaccaccatcctgtatccaaccatcaccacctctaacctgaatcctaccttaagatcagaacagttgtcctcacttttgttcttgtccctctccaacccactctccacaagatggccagagtaatgtttttaatataaattggatccttcagtttcctgcttaaaaccctgcaggtttcccaatgcactcagaaagaaatccagtttccatggccctggatggtctggcccacctccagcctcagctagcattacccttctgacactctctatgtagcctccctgatcttctttcagctcctctattaaaggaaaagttctttatgttaattatttacatcttcctgcaggcccttcctctgcctgctggggtcctcctattctttaggtttaattttaaatatgtcacctcctaagagaaaccttcccagaccactctttctaaaatgaatcttctaggctgggcatggtggctcacacctgtaatccctgtactttgggaggccaaggggggagatcacttgaggtcaggagttcaagaccagcctggccaacttggtgaaaccccgtctttactaaaaatacaaaaaaattagccaggcgtggtggtgcacccctaaaatcccagctacttgagagactgaggcaggagaatcgcttgaacccaggaggtggaggttccagtgagccaaaatcatgccaatgtattccagtctgggtgacagagtgagactctgtctcaaaaaataaataaataaaataaaatgaaatagatcttat

SEQ ID NO: 181993 - DNA, 2559 bp, Homo sapiens
  Payload ID: 15836
  Gene Symbol: SLAMF7
  Gene Name: SLAM family member 7
  Uniprot ID: Q9NQ25
  ENST ID: ENST00000359331
  CDS Start-End: 12-902
cagagagcaatatggctggttccccaacatgcctcaccctcatctatatcctttggcagctcacagggtcagcagcctctggacccgtgaaagagctggtcggttccgttggtggggccgtgactttccccctgaagtccaaagtaaagcaagttgactctattgtctggaccttcaacacaacccctcttgtcaccatacagccagaagggggcactatcatagtgacccaaaatcgtaatagggagagagtagacttcccagatggaggctactccctgaagctcagcaaactgaagaagaatgactcagggatctactatgtggggatatacagctcatcactccagcagccctccacccaggagtacgtgctgcatgtctacgagcacctgtcaaagcctaaagtcaccatgggtctgcagagcaataagaatggcacctgtgtgaccaatctgacatgctgcatggaacatggggaagaggatgtgatttatacctggaaggccctggggcaagcagccaatgagtcccataatgggtccatcctccccatctcctggagatggggagaaagtgatatgaccttcatctgcgttgccaggaaccctgtcagcagaaacttctcaagccccatccttgccaggaagctctgtgaaggtgctgctgatgacccagattcctccatggtcctcctgtgtctcctgttggtgcccctcctgctcagtctctttgtactggggctatttctttggtttctgaagagagagagacaagaagagaacaatcctaaaggaagatccagcaaatacggtttactccactgtggaaataccgaaaaagatggaaaatccccactcactgctcacgatgccagacacaccaaggctatttgcctatgagaatgttatctagacagcagtgcactcccctaagtctctgctcaaaaaaaaaacaattctcggcccaaagaaaacaatcagaagaattcactgatttgactagaaacatcaaggaagaatgaagaacgttgacttttttccaggataaattatctctgatgcttctttagatttaagagttcataattccatccactgctgagaaatctcctcaaacccagaaggtttaatcacttcatcccaaaaatgggattgtgaatgtcagcaaaccataaaaaaagtgcttagaagtattcctataaaaatgtaaatgcaaggtcacacatattaatgacagcctgttgtattaatgatggctccaggtcagtgtctggagtttcattccatcccagggcttggatgtcaggattataccaagagtcttgctaccaggagggcaagaagaccaaaacagacagacaagtccagcagaagcagatgcacctgacaaaaatggatgtattaattggctctataaactatgtgcccagcactatgctgagcttacactaattggtcagacatgctgtctgccctcatgaaattggctccaaatgaatgaactactttcatgagcagttgtagcaggcctgaccacagattcccagagggccaggtgtggatccacaggacttgaaggtcaaagttcacaaagatgaagaatcagggtagctgaccatgtttggcagatactataatggagacacagaagtgtgcatggcccaaggacaaggacctccagccaggcttcatttatgcacttgtgctgcaaaagaaaagtctaggttttaaggctgtgccagaacccatcccaataaagagaccgagtctgaagtcacattgtaaatctagtgtaggagacttggagtcaggcagtgagactggtggggcacggggggcagtgggtacttgtaaacctttaaagatggttaattcattcaatagatatttattaagaacctatgcggcccggcatggtggctcacacctgtaatcccagcactttgggaggccaaggtgggtgggtcatctgaggtcaggagttcaagaccagcctggccaacatggtgaaaccccatctctactaaagatacaaaaatttgctgagcgtggtggtgtgcacctgtaatcccagctactcgagaggccaaggcatgagaatcgcttgaacctgggaggtggaggttgcagtgagctgagatggcaccactgcactccggcctaggcaacgagagcaaaactccaatacaaacaaacaaacaaacacctgtgctaggtcagtctggcacgtaagatgaacatccctaccaatacagagctcaccatctcttatacttaagtgaaaaacatggggaaggggaaaggggaatggctgcttttgatatgttccctgacacatatcttgaatggagacctccctaccaagtgatgaaagtgttgaaaaacttaataacaaatgcttgttgggcaagaatgggattgaggattatcttctctcagaaaggcattgtgaaggaattgagccagatctctctccctactgcaaaaccctattgtagtaaaaaagtcttctttactatcttaataaaacagatattgtgagattcacatacaaaaa

SEQ ID NO: 181994 - DNA, 2365 bp, Homo sapiens
  Payload ID: 15836
  Gene Symbol: SLAMF7
  Gene Name: SLAM family member 7
  Uniprot ID: Q9NQ25
  ENST ID: ENST00000368042
  CDS Start-End: 35-721
gcttcatttcagtggctgacttccagagagcaatatggctggttccccaacatgcctcaccctcatctatatcctttggcagctcacagagcacctgtcaaagcctaaagtcaccatgggtctgcagagcaataagaatggcacctgtgtgaccaatctgacatgctgcatggaacatggggaagaggatgtgatttatacctggaaggccctggggcaagcagccaatgagtcccataatgggtccatcctccccatctcctggagatggggagaaagtgatatgaccttcatctgcgttgccaggaaccctgtcagcagaaacttctcaagccccatccttgccaggaagctctgtgaaggtgctgctgatgacccagattcctccatggtcctcctgtgtctcctgttggtgcccctcctgctcagtctctttgtactggggctatttctttggtttctgaagagagagagacaagaagagtacattgaagagaagaagagagtggacatttgtcgggaaactcctaacatatgcccccattctggagagaacacagagtacgacacaatccctcacactaatagaacaatcctaaaggaagatccagcaaatacggtttactccactgtggaaataccgaaaaagatggaaaatccccactcactgctcacgatgccagacacaccaaggctatttgcctatgagaatgttatctagacagcagtgcactcccctaagtctctgctcaaaaaaaaaacaattctcggcccaaagaaaacaatcagaagaattcactgatttgactagaaacatcaaggaagaatgaagaacgttgacttttttccaggataaattatctctgatgcttctttagatttaagagttcataattccatccactgctgagaaatctcctcaaacccagaaggtttaatcacttcatcccaaaaatgggattgtgaatgtcagcaaaccataaaaaaagtgcttagaagtattcctataaaaatgtaaatgcaaggtcacacatattaatgacagcctgttgtattaatgatggctccaggtcagtgtctggagtttcattccatcccagggcttggatgtcaggattataccaagagtcttgctaccaggagggcaagaagaccaaaacagacagacaagtccagcagaagcagatgcacctgacaaaaatggatgtattaattggctctataaactatgtgcccagcactatgctgagcttacactaattggtcagacatgctgtctgccctcatgaaattggctccaaatgaatgaactactttcatgagcagttgtagcaggcctgaccacagattcccagagggccaggtgtggatccacaggacttgaaggtcaaagttcacaaagatgaagaatcagggtagctgaccatgtttggcagatactataatggagacacagaagtgtgcatggcccaaggacaaggacctccagccaggcttcatttatgcacttgtgctgcaaaagaaaagtctaggttttaaggctgtgccagaacccatcccaataaagagaccgagtctgaagtcacattgtaaatctagtgtaggagacttggagtcaggcagtgagactggtggggcacggggggcagtgggtacttgtaaacctttaaagatggttaattcattcaatagatatttattaagaacctatgcggcccggcatggtggctcacacctgtaatcccagcactttgggaggccaaggtgggtgggtcatctgaggtcaggagttcaagaccagcctggccaacatggtgaaaccccatctctactaaagatacaaaaatttgctgagcgtggtggtgtgcacctgtaatcccagctactcgagaggccaaggcatgagaatcgcttgaacctgggaggtggaggttgcagtgagctgagatggcaccactgcactccggcctaggcaacgagagcaaaactccaatacaaacaaacaaacaaacacctgtgctaggtcagtctggcacgtaagatgaacatccctaccaatacagagctcaccatctcttatacttaagtgaaaaacatggggaaggggaaaggggaatggctgcttttgatatgttccctgacacatatcttgaatggagacctccctaccaagtgatgaaagtgttgaaaaacttaataacaaatgcttgttgggcaagaatgggattgaggattatcttctctcagaaaggcattgtgaaggaattgagccagatctctctccctactgcaaaaccctattgtagtaaaaaagtcttctttactatcttaataaaacagatattgtgagattcacatacaaaaa

SEQ ID NO: 181995 - DNA, 2689 bp, Homo sapiens
  Payload ID: 15836
  Gene Symbol: SLAMF7
  Gene Name: SLAM family member 7
  Uniprot ID: Q9NQ25
  ENST ID: ENST00000368043
  CDS Start-End: 38-1045
gtggcttcatttcagtggctgacttccagagagcaatatggctggttccccaacatgcctcaccctcatctatatcctttggcagctcacagggtcagcagcctctggacccgtgaaagagctggtcggttccgttggtggggccgtgactttccccctgaagtccaaagtaaagcaagttgactctattgtctggaccttcaacacaacccctcttgtcaccatacagccagaagggggcactatcatagtgacccaaaatcgtaatagggagagagtagacttcccagatggaggctactccctgaagctcagcaaactgaagaagaatgactcagggatctactatgtggggatatacagctcatcactccagcagccctccacccaggagtacgtgctgcatgtctacgagcacctgtcaaagcctaaagtcaccatgggtctgcagagcaataagaatggcacctgtgtgaccaatctgacatgctgcatggaacatggggaagaggatgtgatttatacctggaaggccctggggcaagcagccaatgagtcccataatgggtccatcctccccatctcctggagatggggagaaagtgatatgaccttcatctgcgttgccaggaaccctgtcagcagaaacttctcaagccccatccttgccaggaagctctgtgaaggtgctgctgatgacccagattcctccatggtcctcctgtgtctcctgttggtgcccctcctgctcagtctctttgtactggggctatttctttggtttctgaagagagagagacaagaagagtacattgaagagaagaagagagtggacatttgtcgggaaactcctaacatatgcccccattctggagagaacacagagtacgacacaatccctcacactaatagaacaatcctaaaggaagatccagcaaatacggtttactccactgtggaaataccgaaaaagatggaaaatccccactcactgctcacgatgccagacacaccaaggctatttgcctatgagaatgttatctagacagcagtgcactcccctaagtctctgctcaaaaaaaaaacaattctcggcccaaagaaaacaatcagaagaattcactgatttgactagaaacatcaaggaagaatgaagaacgttgacttttttccaggataaattatctctgatgcttctttagatttaagagttcataattccatccactgctgagaaatctcctcaaacccagaaggtttaatcacttcatcccaaaaatgggattgtgaatgtcagcaaaccataaaaaaagtgcttagaagtattcctataaaaatgtaaatgcaaggtcacacatattaatgacagcctgttgtattaatgatggctccaggtcagtgtctggagtttcattccatcccagggcttggatgtcaggattataccaagagtcttgctaccaggagggcaagaagaccaaaacagacagacaagtccagcagaagcagatgcacctgacaaaaatggatgtattaattggctctataaactatgtgcccagcactatgctgagcttacactaattggtcagacatgctgtctgccctcatgaaattggctccaaatgaatgaactactttcatgagcagttgtagcaggcctgaccacagattcccagagggccaggtgtggatccacaggacttgaaggtcaaagttcacaaagatgaagaatcagggtagctgaccatgtttggcagatactataatggagacacagaagtgtgcatggcccaaggacaaggacctccagccaggcttcatttatgcacttgtgctgcaaaagaaaagtctaggttttaaggctgtgccagaacccatcccaataaagagaccgagtctgaagtcacattgtaaatctagtgtaggagacttggagtcaggcagtgagactggtggggcacggggggcagtgggtacttgtaaacctttaaagatggttaattcattcaatagatatttattaagaacctatgcggcccggcatggtggctcacacctgtaatcccagcactttgggaggccaaggtgggtgggtcatctgaggtcaggagttcaagaccagcctggccaacatggtgaaaccccatctctactaaagatacaaaaatttgctgagcgtggtggtgtgcacctgtaatcccagctactcgagaggccaaggcatgagaatcgcttgaacctgggaggtggaggttgcagtgagctgagatggcaccactgcactccggcctaggcaacgagagcaaaactccaatacaaacaaacaaacaaacacctgtgctaggtcagtctggcacgtaagatgaacatccctaccaatacagagctcaccatctcttatacttaagtgaaaaacatggggaaggggaaaggggaatggctgcttttgatatgttccctgacacatatcttgaatggagacctccctaccaagtgatgaaagtgttgaaaaacttaataacaaatgcttgttgggcaagaatgggattgaggattatcttctctcagaaaggcattgtgaaggaattgagccagatctctctccctactgcaaaaccctattgtagtaaaaaagtcttctttactatcttaataaaacagatattgtgagattcacatacaaaaa

SEQ ID NO: 181996 - DNA, 2345 bp, Homo sapiens
  Payload ID: 15836
  Gene Symbol: SLAMF7
  Gene Name: SLAM family member 7
  ENST ID: ENST00000458104
  CDS Start-End: 246-695
agctaaaatataaaatgggaatataccaaatgctgatgaagatggggagcaaatagatctctcatagattgctggtggcaaggtaaaatgctctattcactctgaaaataatttagcaattactcaatctcacatgtctgcggcgtgacccctcctgcttctttaaatatcagctggggaagaggtctgagtaatacctaagagggaagtggcttcatttcagtggctgacttccagagagcaatatggctggttccccaacatgcctcaccctcatctatatcctttggcagctcacagagcacctgtcaaagcctaaagtcaccatgggtctgcagagcaataagaatggcacctgtgtgaccaatctgacatgctgcatggaacatggggaagaggatgtgatttatacctggaaggccctggggcaagcagccaatgagtcccataatgggtccatcctccccatctcctggagatggggagaaagtgatatgaccttcatctgcgttgccaggaaccctgtcagcagaaacttctcaagccccatccttgccaggaagctctgtgaagagaacaatcctaaaggaagatccagcaaatacggtttactccactgtggaaataccgaaaaagatggaaaatccccactcactgctcacgatgccagacacaccaaggctatttgcctatgagaatgttatctagacagcagtgcactcccctaagtctctgctcaaaaaaaaaacaattctcggcccaaagaaaacaatcagaagaattcactgatttgactagaaacatcaaggaagaatgaagaacgttgacttttttccaggataaattatctctgatgcttctttagatttaagagttcataattccatccactgctgagaaatctcctcaaacccagaaggtttaatcacttcatcccaaaaatgggattgtgaatgtcagcaaaccataaaaaaagtgcttagaagtattcctataaaaatgtaaatgcaaggtcacacatattaatgacagcctgttgtattaatgatggctccaggtcagtgtctggagtttcattccatcccagggcttggatgtcaggattataccaagagtcttgctaccaggagggcaagaagaccaaaacagacagacaagtccagcagaagcagatgcacctgacaaaaatggatgtattaattggctctataaactatgtgcccagcactatgctgagcttacactaattggtcagacatgctgtctgccctcatgaaattggctccaaatgaatgaactactttcatgagcagttgtagcaggcctgaccacagattcccagagggccaggtgtggatccacaggacttgaaggtcaaagttcacaaagatgaagaatcagggtagctgaccatgtttggcagatactataatggagacacagaagtgtgcatggcccaaggacaaggacctccagccaggcttcatttatgcacttgtgctgcaaaagaaaagtctaggttttaaggctgtgccagaacccatcccaataaagagaccgagtctgaagtcacattgtaaatctagtgtaggagacttggagtcaggcagtgagactggtggggcacggggggcagtgggtacttgtaaacctttaaagatggttaattcattcaatagatatttattaagaacctatgcggcccggcatggtggctcacacctgtaatcccagcactttgggaggccaaggtgggtgggtcatctgaggtcaggagttcaagaccagcctggccaacatggtgaaaccccatctctactaaagatacaaaaatttgctgagcgtggtggtgtgcacctgtaatcccagctactcgagaggccaaggcatgagaatcgcttgaacctgggaggtggaggttgcagtgagctgagatggcaccactgcactccggcctaggcaacgagagcaaaactccaatacaaacaaacaaacaaacacctgtgctaggtcagtctggcacgtaagatgaacatccctaccaatacagagctcaccatctcttatacttaagtgaaaaacatggggaaggggaaaggggaatggctgcttttgatatgttccctgacacatatcttgaatggagacctccctaccaagtgatgaaagtgttgaaaaacttaataacaaatgcttgttgggcaagaatgggattgaggattatcttctctcagaaaggcattgtgaaggaattgagccagatctctctccctactgcaaaaccctattgtagtaaaaaagtcttctttactatcttaataaaacagatattgtgagattcacat

SEQ ID NO: 181997 - DNA, 2497 bp, Homo sapiens
  Payload ID: 15836
  Gene Symbol: SLAMF7
  Gene Name: SLAM family member 7
  Uniprot ID: Q9NQ25
  ENST ID: ENST00000441662
  CDS Start-End: 246-860
agctaaaatataaaatgggaatataccaaatgctgatgaagatggggagcaaatagatctctcatagattgctggtggcaaggtaaaatgctctattcactctgaaaataatttagcaattactcaatctcacatgtctgcggcgtgacccctcctgcttctttaaatatcagctggggaagaggtctgagtaatacctaagagggaagtggcttcatttcagtggctgacttccagagagcaatatggctggttccccaacatgcctcaccctcatctatatcctttggcagctcacagggtcagcagcctctggacccgtgaaagagctggtcggttccgttggtggggccgtgactttccccctgaagtccaaagtaaagcaagttgactctattgtctggaccttcaacacaacccctcttgtcaccatacagccagaagggggcactatcatagtgacccaaaatcgtaatagggagagagtagacttcccagatggaggctactccctgaagctcagcaaactgaagaagaatgactcagggatctactatgtggggatatacagctcatcactccagcagccctccacccaggagtacgtgctgcatgtctacgagtacattgaagagaagaagagagtggacatttgtcgggaaactcctaacatatgcccccattctggagagaacacagagtacgacacaatccctcacactaatagaacaatcctaaaggaagatccagcaaatacggtttactccactgtggaaataccgaaaaagatggaaaatccccactcactgctcacgatgccagacacaccaaggctatttgcctatgagaatgttatctagacagcagtgcactcccctaagtctctgctcaaaaaaaaaacaattctcggcccaaagaaaacaatcagaagaattcactgatttgactagaaacatcaaggaagaatgaagaacgttgacttttttccaggataaattatctctgatgcttctttagatttaagagttcataattccatccactgctgagaaatctcctcaaacccagaaggtttaatcacttcatcccaaaaatgggattgtgaatgtcagcaaaccataaaaaaagtgcttagaagtattcctataaaaatgtaaatgcaaggtcacacatattaatgacagcctgttgtattaatgatggctccaggtcagtgtctggagtttcattccatcccagggcttggatgtcaggattataccaagagtcttgctaccaggagggcaagaagaccaaaacagacagacaagtccagcagaagcagatgcacctgacaaaaatggatgtattaattggctctataaactatgtgcccagcactatgctgagcttacactaattggtcagacatgctgtctgccctcatgaaattggctccaaatgaatgaactactttcatgagcagttgtagcaggcctgaccacagattcccagagggccaggtgtggatccacaggacttgaaggtcaaagttcacaaagatgaagaatcagggtagctgaccatgtttggcagatactataatggagacacagaagtgtgcatggcccaaggacaaggacctccagccaggcttcatttatgcacttgtgctgcaaaagaaaagtctaggttttaaggctgtgccagaacccatcccaataaagagaccgagtctgaagtcacattgtaaatctagtgtaggagacttggagtcaggcagtgagactggtggggcacggggggcagtgggtacttgtaaacctttaaagatggttaattcattcaatagatatttattaagaacctatgcggcccggcatggtggctcacacctgtaatcccagcactttgggaggccaaggtgggtgggtcatctgaggtcaggagttcaagaccagcctggccaacatggtgaaaccccatctctactaaagatacaaaaatttgctgagcgtggtggtgtgcacctgtaatcccagctactcgagaggccaaggcatgagaatcgcttgaacctgggaggtggaggttgcagtgagctgagatggcaccactgcactccggcctaggcaacgagagcaaaactccaatacaaacaaacaaacaaacacctgtgctaggtcagtctggcacgtaagatgaacatccctaccaatacagagctcaccatctcttatacttaagtgaaaaacatggggaaggggaaaggggaatggctgcttttgatatgttccctgacacatatcttgaatggagacctccctaccaagtgatgaaagtgttgaaaaacttaataacaaatgcttgttgggcaagaatgggattgaggattatcttctctcagaaaggcattgtgaaggaattgagccagatctctctccctactgcaaaaccctattgtagtaaaaaagtcttctttactatcttaataaaacagatattgtgagattcacat

SEQ ID NO: 181998 - DNA, 2449 bp, Homo sapiens
  Payload ID: 15836
  Gene Symbol: SLAMF7
  Gene Name: SLAM family member 7
  Uniprot ID: Q9NQ25
  ENST ID: ENST00000458602
  CDS Start-End: 246-812
agctaaaatataaaatgggaatataccaaatgctgatgaagatggggagcaaatagatctctcatagattgctggtggcaaggtaaaatgctctattcactctgaaaataatttagcaattactcaatctcacatgtctgcggcgtgacccctcctgcttctttaaatatcagctggggaagaggtctgagtaatacctaagagggaagtggcttcatttcagtggctgacttccagagagcaatatggctggttccccaacatgcctcaccctcatctatatcctttggcagctcacagagcacctgtcaaagcctaaagtcaccatgggtctgcagagcaataagaatggcacctgtgtgaccaatctgacatgctgcatggaacatggggaagaggatgtgatttatacctggaaggccctggggcaagcagccaatgagtcccataatgggtccatcctccccatctcctggagatggggagaaagtgatatgaccttcatctgcgttgccaggaaccctgtcagcagaaacttctcaagccccatccttgccaggaagctctgtgaagagtacattgaagagaagaagagagtggacatttgtcgggaaactcctaacatatgcccccattctggagagaacacagagtacgacacaatccctcacactaatagaacaatcctaaaggaagatccagcaaatacggtttactccactgtggaaataccgaaaaagatggaaaatccccactcactgctcacgatgccagacacaccaaggctatttgcctatgagaatgttatctagacagcagtgcactcccctaagtctctgctcaaaaaaaaaacaattctcggcccaaagaaaacaatcagaagaattcactgatttgactagaaacatcaaggaagaatgaagaacgttgacttttttccaggataaattatctctgatgcttctttagatttaagagttcataattccatccactgctgagaaatctcctcaaacccagaaggtttaatcacttcatcccaaaaatgggattgtgaatgtcagcaaaccataaaaaaagtgcttagaagtattcctataaaaatgtaaatgcaaggtcacacatattaatgacagcctgttgtattaatgatggctccaggtcagtgtctggagtttcattccatcccagggcttggatgtcaggattataccaagagtcttgctaccaggagggcaagaagaccaaaacagacagacaagtccagcagaagcagatgcacctgacaaaaatggatgtattaattggctctataaactatgtgcccagcactatgctgagcttacactaattggtcagacatgctgtctgccctcatgaaattggctccaaatgaatgaactactttcatgagcagttgtagcaggcctgaccacagattcccagagggccaggtgtggatccacaggacttgaaggtcaaagttcacaaagatgaagaatcagggtagctgaccatgtttggcagatactataatggagacacagaagtgtgcatggcccaaggacaaggacctccagccaggcttcatttatgcacttgtgctgcaaaagaaaagtctaggttttaaggctgtgccagaacccatcccaataaagagaccgagtctgaagtcacattgtaaatctagtgtaggagacttggagtcaggcagtgagactggtggggcacggggggcagtgggtacttgtaaacctttaaagatggttaattcattcaatagatatttattaagaacctatgcggcccggcatggtggctcacacctgtaatcccagcactttgggaggccaaggtgggtgggtcatctgaggtcaggagttcaagaccagcctggccaacatggtgaaaccccatctctactaaagatacaaaaatttgctgagcgtggtggtgtgcacctgtaatcccagctactcgagaggccaaggcatgagaatcgcttgaacctgggaggtggaggttgcagtgagctgagatggcaccactgcactccggcctaggcaacgagagcaaaactccaatacaaacaaacaaacaaacacctgtgctaggtcagtctggcacgtaagatgaacatccctaccaatacagagctcaccatctcttatacttaagtgaaaaacatggggaaggggaaaggggaatggctgcttttgatatgttccctgacacatatcttgaatggagacctccctaccaagtgatgaaagtgttgaaaaacttaataacaaatgcttgttgggcaagaatgggattgaggattatcttctctcagaaaggcattgtgaaggaattgagccagatctctctccctactgcaaaaccctattgtagtaaaaaagtcttctttactatcttaataaaacagatattgtgagattcacat

SEQ ID NO: 181999 - DNA, 2393 bp, Homo sapiens
  Payload ID: 15836
  Gene Symbol: SLAMF7
  Gene Name: SLAM family member 7
  Uniprot ID: Q9NQ25
  ENST ID: ENST00000444090
  CDS Start-End: 246-743
agctaaaatataaaatgggaatataccaaatgctgatgaagatggggagcaaatagatctctcatagattgctggtggcaaggtaaaatgctctattcactctgaaaataatttagcaattactcaatctcacatgtctgcggcgtgacccctcctgcttctttaaatatcagctggggaagaggtctgagtaatacctaagagggaagtggcttcatttcagtggctgacttccagagagcaatatggctggttccccaacatgcctcaccctcatctatatcctttggcagctcacagggtcagcagcctctggacccgtgaaagagctggtcggttccgttggtggggccgtgactttccccctgaagtccaaagtaaagcaagttgactctattgtctggaccttcaacacaacccctcttgtcaccatacagccagaagggggcactatcatagtgacccaaaatcgtaatagggagagagtagacttcccagatggaggctactccctgaagctcagcaaactgaagaagaatgactcagggatctactatgtggggatatacagctcatcactccagcagccctccacccaggagtacgtgctgcatgtctacgagaacaatcctaaaggaagatccagcaaatacggtttactccactgtggaaataccgaaaaagatggaaaatccccactcactgctcacgatgccagacacaccaaggctatttgcctatgagaatgttatctagacagcagtgcactcccctaagtctctgctcaaaaaaaaaacaattctcggcccaaagaaaacaatcagaagaattcactgatttgactagaaacatcaaggaagaatgaagaacgttgacttttttccaggataaattatctctgatgcttctttagatttaagagttcataattccatccactgctgagaaatctcctcaaacccagaaggtttaatcacttcatcccaaaaatgggattgtgaatgtcagcaaaccataaaaaaagtgcttagaagtattcctataaaaatgtaaatgcaaggtcacacatattaatgacagcctgttgtattaatgatggctccaggtcagtgtctggagtttcattccatcccagggcttggatgtcaggattataccaagagtcttgctaccaggagggcaagaagaccaaaacagacagacaagtccagcagaagcagatgcacctgacaaaaatggatgtattaattggctctataaactatgtgcccagcactatgctgagcttacactaattggtcagacatgctgtctgccctcatgaaattggctccaaatgaatgaactactttcatgagcagttgtagcaggcctgaccacagattcccagagggccaggtgtggatccacaggacttgaaggtcaaagttcacaaagatgaagaatcagggtagctgaccatgtttggcagatactataatggagacacagaagtgtgcatggcccaaggacaaggacctccagccaggcttcatttatgcacttgtgctgcaaaagaaaagtctaggttttaaggctgtgccagaacccatcccaataaagagaccgagtctgaagtcacattgtaaatctagtgtaggagacttggagtcaggcagtgagactggtggggcacggggggcagtgggtacttgtaaacctttaaagatggttaattcattcaatagatatttattaagaacctatgcggcccggcatggtggctcacacctgtaatcccagcactttgggaggccaaggtgggtgggtcatctgaggtcaggagttcaagaccagcctggccaacatggtgaaaccccatctctactaaagatacaaaaatttgctgagcgtggtggtgtgcacctgtaatcccagctactcgagaggccaaggcatgagaatcgcttgaacctgggaggtggaggttgcagtgagctgagatggcaccactgcactccggcctaggcaacgagagcaaaactccaatacaaacaaacaaacaaacacctgtgctaggtcagtctggcacgtaagatgaacatccctaccaatacagagctcaccatctcttatacttaagtgaaaaacatggggaaggggaaaggggaatggctgcttttgatatgttccctgacacatatcttgaatggagacctccctaccaagtgatgaaagtgttgaaaaacttaataacaaatgcttgttgggcaagaatgggattgaggattatcttctctcagaaaggcattgtgaaggaattgagccagatctctctccctactgcaaaaccctattgtagtaaaaaagtcttctttactatcttaataaaacagatattgtgagattcacat

SEQ ID NO: 182000 - DNA, 708 bp, Homo sapiens
  Payload ID: 15836
  Gene Symbol: SLAMF7
  Gene Name: SLAM family member 7
  ENST ID: ENST00000495334
  CDS Start-End: 1-708
ggctggttccccaacatgcctcaccctcatctatatcctttggcagctcacagggtcagcagcctctggacccgtgaaagagctggtcggttccgttggtggggccgtgactttccccctgaagtccaaagtaaagcaagttgactctattgtctggaccttcaacacaacccctcttgtcaccatacagccagaagggggcactatcatagtgacccaaaatcgtaatagggagagagtagacttcccagatggaggctactccctgaagctcagcaaactgaagaagaatgactcagggatctactatgtggggatatacagctcatcactccagcagccctccacccaggagtacgtgctgcatgtctacgagcacctgtcaaagcctaaagtcaccatgggtctgcagagcaataagaatggcacctgtgtgaccaatctgacatgctgcatggaacatggggaagaggatgtgatttatacctggaaggccctggggcaagcagccaatgagtcccataatgggtccatcctccccatctcctggagatggggagaaagtgatatgaccttcatctgcgttgccaggaaccctgtcagcagaaacttctcaagccccatccttgccaggaagctctgtgaagagaacaatcctaaaggaagatccagcaaatacggtttactccactgtggaaataccgaaaa

SEQ ID NO: 182001 - DNA, 2608 bp, Homo sapiens
  Payload ID: 15836
  Gene Symbol: SLAMF7
  Gene Name: SLAM family member 7
  ENST ID: ENST00000621377
  CDS Start-End: 246-971
agctaaaatataaaatgggaatataccaaatgctgatgaagatggggagcaaatagatctctcatagattgctggtggcaaggtaaaatgctctattcactctgaaaataatttagcaattactcaatctcacatgtctgcggcgtgacccctcctgcttctttaaatatcagctggggaagaggtctgagtaatacctaagagggaagtggcttcatttcagtggctgacttccagagagcaatatggctggttccccaacatgcctcaccctcatctatatcctttggcagctcacagagcacctgtcaaagcctaaagtcaccatgggtctgcagagcaataagaatggcacctgtgtgaccaatctgacatgctgcatggaacatggggaagaggatgtgatttatacctggaaggccctggggcaagcagccaatgagtcccataatgggtccatcctccccatctcctggagatggggagaaagtgatatgaccttcatctgcgttgccaggaaccctgtcagcagaaacttctcaagccccatccttgccaggaagctctgtgaaggtgactgcctctcccctctccacaggagactctgcccaggtgctgctgatgacccagattcctccatggtcctcctgtgtctcctgttggtgcccctcctgctcagtctctttgtactggggctatttctttggtttctgaagagagagagacaagaagagtacattgaagagaagaagagagtggacatttgtcgggaaactcctaacatatgcccccattctggagagaacacagagtacgacacaatccctcacactaatagaacaatcctaaaggaagatccagcaaatacggtttactccactgtggaaataccgaaaaagatggaaaatccccactcactgctcacgatgccagacacaccaaggctatttgcctatgagaatgttatctagacagcagtgcactcccctaagtctctgctcaaaaaaaaaacaattctcggcccaaagaaaacaatcagaagaattcactgatttgactagaaacatcaaggaagaatgaagaacgttgacttttttccaggataaattatctctgatgcttctttagatttaagagttcataattccatccactgctgagaaatctcctcaaacccagaaggtttaatcacttcatcccaaaaatgggattgtgaatgtcagcaaaccataaaaaaagtgcttagaagtattcctataaaaatgtaaatgcaaggtcacacatattaatgacagcctgttgtattaatgatggctccaggtcagtgtctggagtttcattccatcccagggcttggatgtcaggattataccaagagtcttgctaccaggagggcaagaagaccaaaacagacagacaagtccagcagaagcagatgcacctgacaaaaatggatgtattaattggctctataaactatgtgcccagcactatgctgagcttacactaattggtcagacatgctgtctgccctcatgaaattggctccaaatgaatgaactactttcatgagcagttgtagcaggcctgaccacagattcccagagggccaggtgtggatccacaggacttgaaggtcaaagttcacaaagatgaagaatcagggtagctgaccatgtttggcagatactataatggagacacagaagtgtgcatggcccaaggacaaggacctccagccaggcttcatttatgcacttgtgctgcaaaagaaaagtctaggttttaaggctgtgccagaacccatcccaataaagagaccgagtctgaagtcacattgtaaatctagtgtaggagacttggagtcaggcagtgagactggtggggcacggggggcagtgggtacttgtaaacctttaaagatggttaattcattcaatagatatttattaagaacctatgcggcccggcatggtggctcacacctgtaatcccagcactttgggaggccaaggtgggtgggtcatctgaggtcaggagttcaagaccagcctggccaacatggtgaaaccccatctctactaaagatacaaaaatttgctgagcgtggtggtgtgcacctgtaatcccagctactcgagaggccaaggcatgagaatcgcttgaacctgggaggtggaggttgcagtgagctgagatggcaccactgcactccggcctaggcaacgagagcaaaactccaatacaaacaaacaaacaaacacctgtgctaggtcagtctggcacgtaagatgaacatccctaccaatacagagctcaccatctcttatacttaagtgaaaaacatggggaaggggaaaggggaatggctgcttttgatatgttccctgacacatatcttgaatggagacctccctaccaagtgatgaaagtgttgaaaaacttaataacaaatgcttgttgggcaagaatgggattgaggattatcttctctcagaaaggcattgtgaaggaattgagccagatctctctccctactgcaaaaccctattgtagtaaaaaagtcttctttactatcttaataaaacagatattgtgagattcacat

SEQ ID NO: 182002 - DNA, 2996 bp, Homo sapiens
  Payload ID: 15837
  Gene Symbol: SLAMF8
  Gene Name: SLAM family member 8
  Uniprot ID: Q9P0V8
  ENST ID: ENST00000289707
  CDS Start-End: 150-1007
acttttgggacatcctgttctgagtcaagattcctccttctgaacatgggactttccagaaggaccacagctcctcccgtgcatccactcggcctgggaggttctggattttggctgtcgagggagtttgcctgcctctccagagaaagatggtcatgaggcccctgtggagtctgcttctctgggaagccctacttcccattacagttactggtgcccaagtgctgagcaaagtcgggggctcggtgctgctggtggcagcgcgtccccctggcttccaagtccgtgaggctatctggcgatctctctggccttcagaagagctcctggccacgtttttccgaggctccctggagactctgtaccattcccgcttcctgggccgagcccagctacacagcaacctcagcctggagctcgggccgctggagtctggagacagcggcaacttctccgtgttgatggtggacacaaggggccagccctggacccagaccctccagctcaaggtgtacgatgcagtgcccaggcccgtggtacaagtgttcattgctgtagaaagggatgctcagccctccaagacctgccaggttttcttgtcctgttgggcccccaacatcagcgaaataacctatagctggcgacgggagacaaccatggactttggtatggaaccacacagcctcttcacagacggacaggtgctgagcatttccctgggaccaggagacagagatgtggcctattcctgcattgtctccaaccctgtcagctgggacttggccacagtcacgccctgggatagctgtcatcatgaggcagcaccagggaaggcctcctacaaagatgtgctgctggtggtggtgcctgtctcgctgctcctgatgctggttactctcttctctgcctggcactggtgcccctgctcagggaaaaagaaaaaggatgtccatgctgacagagtgggtccagagacagagaacccccttgtgcaggatctgccataaaggacaatatgaactgatgcctggactatcagtaaccccactgcacaggcacacgatgctctgggacataactggtgcctggaaatcaccatggtcctcatatctcccatgggaatcctgtcctgcctcgaaggagcagcctgggcagccatcacaccacgaggacaggaagcaccagcacgtttcacacctcccccttccctctcccatcttctcatatcctggctcttctctgggcaagatgagccaagcagaacattccatccaggacactggaagttctccaggatccagatccatggggacattaatagtccaaggcattccctcccccaccactattcataaagtattaaccaactggcaccaaggaattgcctccagcctgagtcctaggctctaaaagatattacatatttgaactaatagaggaactctgagtcacccatgccagcatcagcttcagccccagaccctgcagtttgagatctgatgcttcctgagggccaaggcattgctgtaagaaaaggtctagaaataggtgaaagtgagaggtgggggacaggggtttctctttctggcctaaggactttcaggtaatcagagttcatgggccctcaaaggtaaattgcagttgtagacaccgaggatggttgacaacccatggttgagatgggcaccgttttgcaggaaacaccatattaatagacatcctcaccatctccatccgctctcacgcctcctgcaggatctgggagtgagggtggagagtctttcctcacgctccagcacagtggccaggaaaagaaatactgaatttgccccagccaacaggacgttcttgcacaacttcaagaaaagcagctcagctcaggatgagtcttcctgcctgaaactgagagagtgaagaaccataaaacgctatgcagaaggaacattatggagagaaagggtactgaggcactctagaatctgccacattcattttcaaatgcaaatgcagaagacttaccttagttcaaggggaggggacaaagaccccacagcccaacagcaggactgtagaggtcactctgactccatcaaactttttattgtggccatcttaggaaaatacattctgcccctgaatgattctgtctagaaaagctctggagtattgatcactactggaaaaacacttaaggagctaaacttaccttcggggattattagctgataaggttcacagtttctctcacccaggtgtaactggattttttctggggcctcaatccagtcttgataacagcgaggaaagaggtattgaagaaacaggggtgggtttgaagtactattttcccagggtggcttcaatctccccacctaggatgtcagccctgtccaaggaccttccctcttctccccagttcctgggcaatcacttcaccttggacaaaggatcagcacagctggcctccagatccacatcaccactcttccactcgattgttcccagatcctccctgcctggcctgctcagaggttccctgttggtaacctggctttatcaaattctcatccctttcccacacccacttctctcctatcaccttcccccaagattacctgaacagggtccatggccactcaacctgtcagcttgcaccatccccacctgccacctacagtcaggccacatgcctggtcactgaatcatgcaaaactggcctcagtccctaaaaatgatgtggaaaggaaagcccaggatctgacaatgagccctggtggatttgtggggaaaaaatacacagcactccccacctttctttcgttcatctccagggccccacctcagatcaaagcagctctggatgagatgggacctgcagctctccctccacaaggtgactcttagcaacctcatttcgacagtggtttgtagcgtggtgcaccagggccttgttgaacagatccacactgctctaataaagttcccatccttaatga

SEQ ID NO: 182003 - DNA, 1038 bp, Homo sapiens
  Payload ID: 15837
  Gene Symbol: SLAMF8
  Gene Name: SLAM family member 8
  Uniprot ID: Q9P0V8
  ENST ID: ENST00000368104
  CDS Start-End: 89-619
ggaccacagctcctcccgtgcatccactcggcctgggaggttctggattttggctgtcgagggagtttgcctgcctctccagagaaagatggtcatgaggcccctgtggagtctgcttctctgggaagatgcagtgcccaggcccgtggtacaagtgttcattgctgtagaaagggatgctcagccctccaagacctgccaggttttcttgtcctgttgggcccccaacatcagcgaaataacctatagctggcgacgggagacaaccatggactttggtatggaaccacacagcctcttcacagacggacaggtgctgagcatttccctgggaccaggagacagagatgtggcctattcctgcattgtctccaaccctgtcagctgggacttggccacagtcacgccctgggatagctgtcatcatgaggcagcaccagggaaggcctcctacaaagatgtgctgctggtggtggtgcctgtctcgctgctcctgatgctggttactctcttctctgcctggcactggtgcccctgctcagggaaaaagaaaaaggatgtccatgctgacagagtgggtccagagacagagaacccccttgtgcaggatctgccataaaggacaatatgaactgatgcctggactatcagtaaccccactgcacaggcacacgatgctctgggacataactggtgcctggaaatcaccatggtcctcatatctcccatgggaatcctgtcctgcctcgaaggagcagcctgggcagccatcacaccacgaggacaggaagcaccagcacgtttcacacctcccccttccctctcccatcttctcatatcctggctcttctctgggcaagatgagccaagcagaacattccatccaggacactggaagttctccaggatccagatccatggggacattaatagtccaaggcattccctcccccaccactattcataaagtattaaccaactggcaccaaggaattgcctccagcctgagtcctaggctctaaaagatattacatattt

SEQ ID NO: 182004 - DNA, 849 bp, Homo sapiens
  Payload ID: 15838
  Gene Symbol: SLAMF9
  Gene Name: SLAM family member 9
  Uniprot ID: Q96A28
  ENST ID: ENST00000368092
  CDS Start-End: 84-680
ctaggagcctcctaatgcagtcttctgcacagtcctggggactgactgactgaatcacacctctggggctgggggctgctgacatgtgtgcctttccttggctgcttcttctcctgctgctccaggagggcagccaaaggagactctggagatggtgtggatccgaggaagtggttgcggtccttcaggagtccatcagcctccccctggaaataccaccagatgaagaggttgagaacatcatctggtcctctcacaaaagtcttgccactgtggtgccagggaaagagggacatccagctaccatcatggtgaccaatccacactaccagggccaagtgagcttcctggaccccagctattccctgcatatcagcaatctgagctgggaggattcagggctttaccaagctcaagtcaacctgagaacatcccagatctctaccatgcagcagtacaatatatgtgtctaccatcctaactatgcttctgagaagccttcaacagccttctgcctcctggccaagggattgctcatcttcttgctcttggtaattctggccatgggactctgggtcatccgagtccagaaaagacacaaaatgccaaggatgaagaaactcatgagaaacagaatgaaattgaggaaggaggcaaagcctggctccagccctgcctgactgctccttgggaaccccagtcctgagcttggtttcttcccagcacccagagaatccttcctcagctctcttctttccaggggaaggaggtgctcaggggtgggtatccagagagccatacttctgagggaagactggctggcaataaagtcaaattaagtgaccacaa

SEQ ID NO: 182005 - DNA, 1156 bp, Homo sapiens
  Payload ID: 15838
  Gene Symbol: SLAMF9
  Gene Name: SLAM family member 9
  Uniprot ID: Q96A28
  ENST ID: ENST00000368093
  CDS Start-End: 118-987
cttttctcaggaccatcagtcaggctctttgtgtctaggagcctcctaatgcagtcttctgcacagtcctggggactgactgactgaatcacacctctggggctgggggctgctgacatgtgtgcctttccttggctgcttcttctcctgctgctccaggagggcagccaaaggagactctggagatggtgtggatccgaggaagtggttgcggtccttcaggagtccatcagcctccccctggaaataccaccagatgaagaggttgagaacatcatctggtcctctcacaaaagtcttgccactgtggtgccagggaaagagggacatccagctaccatcatggtgaccaatccacactaccagggccaagtgagcttcctggaccccagctattccctgcatatcagcaatctgagctgggaggattcagggctttaccaagctcaagtcaacctgagaacatcccagatctctaccatgcagcagtacaatatatgtgtctaccgatggctgtcagagccccagatcactgtgaactttgagagttctggggaaggtgcctgcagtatgtccctggtgtgctctgtggagaaggcaggcatggatatgacctacagctggctctcccggggggatagcacttatacattccatgaaggccctgtcctcagcacatcctggaggccgggggacagtgccctctcctacacctgcagagccaacaaccccatcagcaacgtcagttcttgccccatccctgatgggcccttctatgcagatcctaactatgcttctgagaagccttcaacagccttctgcctcctggccaagggattgctcatcttcttgctcttggtaattctggccatgggactctgggtcatccgagtccagaaaagacacaaaatgccaaggatgaagaaactcatgagaaacagaatgaaattgaggaaggaggcaaagcctggctccagccctgcctgactgctccttgggaaccccagtcctgagcttggtttcttcccagcacccagagaatccttcctcagctctcttctttccaggggaaggaggtgctcaggggtgggtatccagagagccatacttctgagggaagactggctggcaataaagtcaaattaagtgaccacaa

SEQ ID NO: 182006 - DNA, 1731 bp, Homo sapiens
  Payload ID: 15839
  Gene Symbol: SLC2A4RG
  Gene Name: SLC2A4 regulator
  Uniprot ID: Q9NR83
  ENST ID: ENST00000266077
  CDS Start-End: 53-1216
gtcctgagagtcagccctcgccgctgcagcctcggcgcccggccggccggccatggagcgccccccgccccgcgccgccggccgggaccccagtgcgctgcgggccgaggcgccgtggctgcgcgcggagggtccggggccgcgcgccgcgcccgtgacggtgcccacgccgccgcagggctcttccgtgggcggcggcttcgcgggcttggagttcgcgcggccgcaggagtcggagccgcgggcctcggacctgggggccccccggacgtggacgggggcggcggcggggccccggactccgtcggcgcacatccccgtcccagcgcagagagccaccccaggaaaagcccggctggacgaggtcatggctgccgctgcccttacaagcctgtccaccagccctctccttctgggggccccggttgcagccttcagcccagagcctggcctggagccctggaaggaggccctggtgcggcccccaggcagctacagcagcagcagcaacagtggagactggggatgggacctggccagtgaccagtcctctccgtccaccccgtcacccccactgccccccgaggcagcccactttctgtttggggagcccaccctgagaaaaaggaagagcccggcccaggtcatgttccagtgtctgtggaagagctgcgggaaggtgctgagcacggcgtcggcgatgcagagacacatccgcctggtgcacctggggaggcaggcagagcctgagcagagtgatggtgaggaggacttctactacacagagctggatgttggtgtggacacgctgaccgacgggctgtccagcctgactccagtgtcccccacggcctccatgccgcctgccttcccccgcctggagctgccagagctgctggagcccccagccctgcctagtcccctgcggccgcctgccccgcccctgcccccgccccctgtcctgagcaccgttgctaacccccagtcctgtcacagtgaccgtgtctaccagggctgcctgacgcccgcccgcctggagccgcagcccacggaggtcggagcctgcccacccgccttgtcctccaggatcggagtcaccctgaggaagccccgcggcgacgcgaagaagtgccggaaggtgtatggcatggagcgccgggacctctggtgcacagcctgccgctggaagaaagcctgccagcggttcctggactaagtccggctcgttcaagaacataagctaccaccttctccctccccaccccctccaggcccggggctgaaacagcccgaggacagccccaggggctggctttcaccagctgcagggtctgcttttacttggggtgggggggcggggctgaccctgaaccctcccccccgccaggtcggggaggggtcccaccactcaaagtgcctctaaagaaaccagctttttgcactaaagccaaaccacaccgctgtccccttagccccaagggccctgggggcagccaccctcccgcctgtcggcccgtagatttatcaagggtgttatgggcccagctttggggggccagtcccgatgcactttgaggggtgttggagaggggactcccccactcgcacttaactcaacggctctcgggccctggggctgtttttaccatgtttgtttttgaagctcaggtgtctcacgtctgggctgcaccaggcgaagagagaaattaaagatttgaggtttttccagaa

SEQ ID NO: 182007 - DNA, 13040 bp, Homo sapiens
  Payload ID: 15840
  Gene Symbol: SSH1
  Gene Name: slingshot protein phosphatase 1
  Uniprot ID: Q8WYL5
  ENST ID: ENST00000326495
  CDS Start-End: 95-3244
cggctccaggaggccccgggcccggcccgggcggcggtggcggtggcggctctagctcgagacgtctgtggcgccctcgcaccgcgccgcagccatggccctggtgaccctgcagcgctcgcccacgcccagcgccgcctcctcctcggccagcaacagcgagttggaggctggcagcgaagaagatcgaaaattaaacctcagcttaagtgagagctttttcatggtgaaaggcgcagccctcttcttacaacagggaagcagccctcaaggccagcggagtcttcagcacccccacaagcatgcaggtgatctgcctcaacatcttcaggtgatgatcaaccttctgcgttgcgaagacagaatcaagctggcagtgcgcctggagagcgcctgggcggaccgggtccggtacatggtggtggtgtacagcagcgggcgccaggacaccgaggagaatatcttgctgggagtggacttttccagtaaggaaagtaaaagctgcaccattgggatggttctccgactgtggagcgacacgaaaatccaccttgatggagatggtgggttcagcgtgagcacagcaggaaggatgcacatatttaagcctgtgtctgtccaggccatgtggtctgccctgcaggtgcttcacaaggcctgcgaagtggcccggaggcacaactacttccccgggggtgtagctctcatctgggctacctactatgagagctgcatcagctccgagcagagctgcatcaacgagtggaacgccatgcaggacctggagtctacgcggcccgactcccccgcgctatttgtggacaagcccactgaaggggaaaggaccgagcgcctcatcaaagccaagctccgaagcatcatgatgagccaggatctagaaaatgtgacttccaaagagattcgtaatgaattagagaaacagatgaattgtaacttgaaggaactcaaggaatttatagacaatgagatgctacttatcttgggacagatggacaagccctcccttatcttcgatcatctttatctcggctctgaatggaatgcatccaatctggaggaactgcagggctcaggggttgattacattttaaatgttaccagagaaatcgataatttttttcctggcttatttgcatatcataacatccgagtctacgatgaagagaccacagacctcctcgcccactggaatgaagcgtatcattttataaacaaagcgaagaggaaccattccaagtgcctggtgcattgcaaaatgggcgtgagtcgctcggcctccacagtcatagcctatgcaatgaaggaattcggctggcctctggaaaaagcatataactatgtaaagcagaagcgcagcatcacgcgccccaacgcgggctttatgaggcagctgtctgagtatgaaggcatcttggatgcaagcaaacagcggcacaacaagctgtggcgtcagcagacagacagcagcctccagcagcctgtggatgaccctgcaggacctggcgacttcttgccagagaccccagatggcaccccggaaagccagctgcccttcttggatgatgccgcccagcccggcttagggccccccctcccctgctgtttccggcgactctcagacccccttctgccttcccctgaggatgaaactggcagcttggtccacctggaggatccggagagggaggctctgttggaggaagctgctccacctgcagaggtgcacaggccggccagacagccccagcaaggttccggactctgtgagaaggatgtgaagaagaaactagagtttgggagtcccaaaggtcggagcggctccttgctgcaggtggaggagacggaaagggaggagggcctgggagcagggaggtgggggcagcttccaacccagctcgatcaaaacctgctcaactcggagaacctaaacaacaacagcaagaggagctgtcccaacggcatggaggatgatgctatatttgggatccttaacaaagtgaagccttcctataaatcctgtgccgactgcatgtaccctacagccagcggggctcctgaggcctccagggagcgatgtgaggaccccaatgctcccgccatctgcacccagccagccttcctaccccacatcacgtcctcccctgtggcccacttggccagcaggtcccgtgttccggagaagccagcctctggcccaaccgaacctcccccgttcctaccaccagcaggctccaggagggcagacaccagtggccctggggctggagctgccctagagccaccagccagccttttggaaccttccagagagaccccaaaagtcctgccaaagtccctccttttgaagaattctcactgtgataagaaccctcccagcacagaagtggtaataaaggaagaatcgtcacccaagaaagatatgaagccagccaaggacctgaggcttctgttcagtaatgaatctgagaagccgacaaccaacagctacctgatgcagcaccaggagtccatcattcagctgcagaaggcaggcttggtccgcaagcacaccaaagagctagagcggctgaagagcgtgcctgcagacccagcacctccctccagggatggccctgccagcaggctggaggccagcatccccgaggagagccaggatccagccgcgctccacgagctgggccccctggttatgcccagccaggccgggagtgatgagaagtcagaggccgcccccgcttcattggaaggaggctcactgaagagcccccctcctttcttctaccgcctggaccacaccagtagtttctcaaaagactttctgaagaccatctgctacacccccacctcctcttccatgagctccaacctgacccggagctccagcagcgatagcatccacagtgtccgtgggaagcccgggctggtgaagcagcggacacaggagattgagacccggctccggctggcgggcctcaccgtctcttccccactgaagcgctcacactctcttgccaagctggggagtctcaccttctcaacggaagacctgtccagtgaggctgacccgtccaccgtcgctgactcccaggacaccactttgagtgaatcttccttcttgcatgagccccagggaaccccgagggacccagctgcaacctccaaaccatcagggaaacccgccccagaaaacttaaagagcccttcgtggatgagcaaaagctgacccgccttttgctgcgtcaggctgggcggatattttcatatgatccctccctcactttcactgtggatttggatcgaccccttacatcttgatttcccttaaacgagtgaagtcatcctaacttttcccctactcttgccatagagaggaggagaagaaactaaccaacatgcagcacaagaaggggagctgtcagtcgtgtggcctgggagaaccaggagccgccggccaggagacacaaaactccgctcccaccgtgtcttcaagaagaaccatgttttaggaagaacgtgcacacataggcgcacacatccagactgttcccttcgcatcctgcagaagagtcctggtggtggcagcctcaccgcggcacacgttctagctcattcttggcctcgcagaaaactctcggatggcaacattaagtcctacctctgttctcgctgcgctttttatttttaaaacacacgaatgaccaaggcttgttccagggaataatgctctgtctgaaagcgtttttccaaaaaaagaatttttcgttttgtgttttggttgggaccccagacgtgtcaagacttttaacccgacagccccaagcactgctgagtaaagtcatcagatgagtagtcccacgctgttgttgagctgactctgtgcccgaatggtggtgcaggcgccctgtcctggttgtgttgttacgtgtttgaccagcacaggggtccggtggggaaaatgtatgggttgttctcagttgttgctaatgctgaagtttaaatctcaaggggaagggcccacctgcattgttgagtgtctgctgctgaaacacatgattgtgtttaggtttgaaattgctcaagtgtctggctcaggtggtggttctgagacacatcgtcctgctgagagcccagatgcttaggtccactagggcccatctagggaagggaaaggagatttcagcggcttccccgaaaggaacgggactgtcgggatgcttcccggatgtctacagttgccccttcctgcagtgagattactgcttcctgtttccctccagctcttcccagcagcagtgagggagtataagagggatctgtagtcgctgcctggctctgtgggcggcccctttaagactcaggtgagctcagccagtcccgctgcgccaggcttgaatcaaaggtgtcagcaagctagatgtcaaaacatttcgagagagaggcagcttgcagaaaagcagaaaggttgaattcaggggtcagcaaactatggcatgtggccccgtgagctaggaatggtttttcctctttaagacagggcctggctctgtcacctaggctggagtacagtagtgcaatcatgactcactgcagcatcaacctccctggctcaagcgatggcttttacctttttaaggagttgtaaaaaaaagaaataatatgtgacagaattcatgtggcccacaaagcctgaggtacttactgtcaggccctttgtagaaaaagttgctgacccctggtttgatttgccacacagggctgctcatggccctgtaggaagaaactgggtaaatgtgaagccctctgcctctctgacacctaaggccagacccttccctcctcccgaccacaagctttgccagccccgcactagcctcacctgtgcaggatggagtaggttgcgtacatgggggaaggcaggtgaacacagttggctgaagctcttccacaattccatcttgccctcagctgggtccgccagattaactcagtgaaaccagaaagccttcaaggaccagctgaattctgaaagtgagtgagtgagccatcatcttaacattggccagaactgtgttccccaaagctattctagaaagcaccccaggagggatctgcaggaacaaggctagttcatattttacctagtgagcacagtttttgcaaaaatcctccctccaggactttgtctccttggagtgatttttaaaaatacatacattactttatagggagctgttttcccactagtgtcaattaaaatcaccttaaaaggtgattatccacttattcctaaacccctgtgggttgttccccctttccctcagccaacaaaagcatagcctcaaaaaatatcaagttcggtatgttttgccaaatcaaatttcatgtggtagatcaatttttgtgtcaaaataatcttttaaatttagtgatgacaggcttttgttggttttttaaccacgtctatgtatgagaatgatatatttttgaaaactttaattttgaaagccataatttttcttatctaaagagttggggggtggggtgtggaatctggagagtacaagttggtctttggcttctggcaaacttacccattcatttttggaagcacagctagcatatcaacatccagacgagagcgctggtcccgtccacagagcagagtgaagcattctggacttgatgcttaatagcctggcctggagaaaagggtaaggtttatttttggaaacccagatcagttgcatgtaaacagatggcacatggctatttaaaatgctgtatgatggggccgggcgcggtggctcacgcctgtaatcctagcactttgggaggccgaggcaggcggatcatctgaggtcaggagttctagaccagcctggccaacatggtgaaaccccgtctctactaaaaatacaaaaacttagctgggtgtggtagtgcgtgcctgtaatcctagctacttaggaggctgaggcaggagaatcgcttgaacctgggtggcggaggttgcaatgagccgagatcgcgccactgcactccagcctgggtgcaatgaaactgggagtgaaactccgtctcaaaaaaataaaatgctgtatgaacaagatgagcattctgtcaggtgtcgggacacctgggcaaagacgaattcatgctgtctgtgaaaaggaagtttgcactgtaacatatgccatagcttggcccttgctttgtatgcaaccttagctgatggggaaaattccaaacataagtggcacaggaaagaggcaggcagaggaggcaggggtctgtgctgtgcaagtcactggttttttatgactatcattttcattgaatgcatttgttgaattgggacaaaaggaacattttctaaatcagcttgatactctttataaaaaacagctgaatcttatcttctgcctcacattaattcatgtggcatgccaaaagttagactgaacttttctacatcttcaccttgcattgatacaggaaagtcttctctttaagtcttgctaagtataagggggatagtggtcacgggaagaggagaaccggggctgctctcggatggtaattgacaatgccgatttccatttctttgtcttacggctacttccgagccttctagcaaggtccctggttgcatgtatttcctaagagcagagtttatttctctttacattccctgcttccttgctctccatgcagggaccccagccaacctctgggctgttgaatagctctctgctgggtggcaagcccttctccttggcaccctgttgcttaagcatacagattgctcaccaggtgcacacagacagctgtactgtccaagcccattctgctccaccctgtcctcttcagctaaagagcattccagtaatctaaagcccttttcccctggagaagtccagagtttgcagcagtgtggagctgagcttgaacagaacagaccctcagcacggccctggactaatgcactcttatctgagggcagtccattctagaaggttgatgaatttccctaccactctcctggggaccttttctctctagtgggaacaaatgctacataatttagtcaagatcctattaagtcatctcacctgaggcatctggagagggagttgccttccattggtgggaaattgttggtgccagaatacattttgcccaaaactcttctcattggctggccacctagcagggctcctctaaacacgcaactcagcgaggggacccccttcacctctggcaagagagctgggtagatcagaaacttggtgacacctggctagcacagagcaggctcacttgtcttggtcccactacccagattcctgcagacattgcaaaccaaatgaaggttgttgaatgacccctgtccccagccacttgttttgttatcatctgctctgcagtggaatgcctgtgtgtttgagttcactctgcatctgtatatttgagtatagaaaccgagtcaagtgatcatgtgcatccagacacactgtgtcacctgagccacagagcaaatcaccttaacgatctggaatgaaactgtgaccagtgccgccctgggtggttctggagagactgccgtcttcttgtttggccataggtgctggggccccggcttcagtcactgtctcagacaggagtcccgataagcagatcaccagtcctccactgtccttcctgtcggccttgctgcatgagaagatagctgcttcctccctcttttcctacactgtaattattgttttacaattgagtgccttaataatagtttacaaatactatgtatttatgcaaaactgttaaagtctcatctgttatgattggatacttggtcttgtcagtagtggtcagcattgggttgtgagcttgtcctactccatacgtgtttatcctgctatgcagttttacattgtgtgttcacatctattccaaggagccttgctagaaacaacactggcggttcctgcaggccaggcaggcattggcccatgctgtgtcccataggagccaatgaaagaacgtagcttggtctgctagccagccgtggggtggcgcaggccaggcagcctctgcaccagagtccagcacctgcccattccccagtcacacaatcatactcttctttcatagagattttattaccacctagaccaccctagttttcctctctgttagtgtcctgagctcttttgcaacaaaatgtaggtacagaccaatccctgtcccttccccaatcaggagctccacaccatgagttgtttggttttccagaagctgccagtgggttcccgtgaattgcgttaagatatcgatgattttttttattgtttttcttcttgtttttttaaataatatatttaaaggcagtatcttttgtactgtgaatttgcagtagaagatgcagaatgcactttttttttacttctgttggtgtgtattgtatatagtgtgtgtgcttcttgtgatgaaaataaactttttctttataaattcctgatgactgagtttatataaaaggaaactgcttcctcagcccttgccaaaacagtctgatacatcgtcatcatcatcgtcattgacatggccagtctttattgagcatctattacatgctcagttctttgctagaaaacctggacaagttacaccaaagaaaggaccacaggaagaaatgatagttcctcctggaactagtctgttttctttctaattttgtcagtaagcaagaacaggcccacctgtgggtggtcctttgtgtaccaaaaaaaaaaagttacccaccaggaaaggatttggactttgggtgggttctcttcccgtacaagtaggaaatgtaaagccagaggtgtgcactaaagaacatctaacctgctcccaccagccctggtgggagagggaggaccctggaggctaagtactgctggtttccaaggtgcatgctcatgtcccagtccacttcaccccaggcagcttttggtggctcttctcccttggacactcaggaggcagagctgcttccatttttttttttttaatttttttttttttttttttgagactgggtctggctctcttgctcaggctggagttcagtggtgccatcatagctcactgcaacctcgacttcctaggctaaagtgatcctcctgcctcaagcaatcctcccacctcagcctccccagtagctgggactacaggcgtgcaccaccttgccccgctaatttttacaatttattatagacatgaagtctcgctttgctgcccaggctggtctttaattcctgtcttcaagtgatcctcccaccttggcctcccaaagtgctgggattacaggtgtgagccacctcaacttccatcttaaaattctgcctccttagagttctttgctttctgctgtgtagtcagggaggagtcacattcactcagtctcctctgtctggatgcgatacatcatttctacttgctttccagtgggcagggcccagtcacagggtcccaatgcaacagccagggagactgggaaatgtatggggcacatgtatttggtgagcactaactgtcacaagtacctgggcgtgacccctaaattccagtgcctgcagagccaggaagtattttgttcagttcatctggacttgctctgtctctcaactggactcaaaagactgatgaataaaccagaatgcaagtttattactttaccaaaagaattataatcatcaagcagaccagattgctcacatgctgattagcacatttagtcctgctaggtaagtctttctttttttgagacagcctggagtgcagtggcagtcatggctcactgaagtgttgatctcctgggctccagcaatcctgcctcagcctcccaagtagctgggaccagagccacacactgctgcacccagctaaatttatttatttatttatttaaaagatagggtctcactatgttgcccagactggtcttgaactcctggtttctgatgatcctcctgcctcagcctcccaaagtgttgagattataggcatgagccactgtgcccagccccttctaggtaaatctctatggggtgccaaattttggttaagaattgcttattgaatattaaaagtttagtgggatgcttcttttttttttttcttttgagatggagtttagctcttgttgcccagactggagtgcaatggtgtgatctcagctcaccgcaacctctgcctcctgggttcaagtgattttcctgcctcagcctcccgagtagctgggaatacaggcatgtgccaccacgcctggctaattttgtatttttaatcgaaatggggtttctccatgttggtcaggctgttctcaaactcccaacctcaggtaatccacccgccttggcctcccaaagtgctgggattataggcatgagccaccgcgccaagccacaggatgcttctaatagtgttatcaagctataatgcagccctctctgtaaaatgttttaaaaacaaatcactgagggtcatggttcaagacactgttctctggcaaggttgaagatagctaacaaattctctttgggttccagccatgaatggggtgggatgggccccagcaatctgtatgtttctgagattccctgggaattctgatggccaagtttagaaaccatcaaaataagaatatgatgcaactgagtaggctcacgctttgctaattacattgcacacatgctttttggagacaacacccacactaccctaacaatgtgtgttcataaaactcatccgatacttatttgttcaaggccctaggacaatattcctgtaatgggctgcttttgccctgatttcctcctcagagtaactgtctcgcggttgggcacgatcccagatcacatctacagtggaggtggttttgctggggaggatccgcatgcttgtttgtgtttatgcctggggaaccccctcttggcaagatgttcgggagaggctccaaaggcagcacagaggacggcttggaacttagggggattcactttatggtaaagaagccctttctaaaggagagctccacccaggaaacaccacccacccacgcatccttgcctcctaaaaccaggttatgtttatcacataccttctatgtgctttacataaagaatcccctggaattctccaaactgggcattgtggtctgtgatgcatatctcaaaagaggtgagagggttgggcacggtggctcacgcctgtaatcccagcactttgggaagccaaggcaggtggatcacttgaggtcagaagctcaagaccagcctggctcacatggtgaaacgccgtctcaactaaaaatacaaaaattagccgggcatgatggcgggcgcctgtaatcccagctactcgggaggctgaggcaggagaatcgcttgaacccaggaggtggaggttgctgtgagccaagattgcaccactgcactccagcctgggtgacagagtgagactctgtctcaaaaaacaaaaaaaagaaaaaaaaaggtagaggagagtcctttttctaactttcttgaactctttggactaccttgggatccttctattaactgccttgttggcattattctcagtttatgaaaaaacaggcccacagagtggaagtaatttgcctacaggtacatctaaaaattgatgaagccagataggaactgctccctcatcatctgaaacccttcccagagctgtctctcccaccccagaagtagaaagaagccagacaaagatgcatcttgatctcccttgtggtttcagcaaggaagcagatgagttggagatgaagcccccagcccctgggaaattggacccacttcttgctccaaaggctattggggtgacacaaggtgtgtttctttcccgtagatcatattcaccatattttgcctttaaatggaaattgtgcatcctgaagtaccttgttaagagtccattttcaacctgaaattccttttttttgtaaaccacttcagcaaatacagtgtggcatttacattagcaacctcccagcctaggagaggatgctccagcatccgactctaaaagacaaatttgggcacggtggcttgacgcctgttatcccaacaccttgagaggccgaggcaggcagattgcttgagcccaggagttcaagaccagcccaggtaacatggtgaacccccatctctaccaataatacaaaaattagccaggcatggtggtgtgccagtggtcccagctacttgagtggctgaggtgaaggatctcctgagcctgggaggcagaggttgcagtgagccgagatcgaaccactgcactccagcttatgcaacagagcaagaccgtgtctcaaaaacaaataaaaataaaagattttaaaaagacaaattatcccacaaatggtacattgtggtggtggtggtggtggtggtggtagacctccctcttgctcttgaaattggatcagaacaaactgacaatgctacctacttcatggggtcattggtgaattcactgataatgcatgcaaatccccttctgcctggcacactacctaataaataaatggtggttgttattgttggaattggaggatatattcctagttgcaagggtttcacatgtattaccaagttaatcctcaccgcagatatgattctgttttacagaggaagcagtggatgctcagagaggttaggtaacgtgggtcagggacacacagccaggaaggggcagaggctgggagtgcctgactccaaattcatgcaatttctaccccaccatcttctccccaaggaaaatagtccctaatgcatgtgtgcaatgcttagagggcagtagatgctcaacagatgctgagagagtgagggagtaaatgagatatgccatgaaaaggagcccctgtggacttatgcgtgcgtttgtttaacttgtgggcaagtacttatagacaggtgcaaacaataaatctccttttgcaactg

SEQ ID NO: 182008 - DNA, 2432 bp, Homo sapiens
  Payload ID: 15840
  Gene Symbol: SSH1
  Gene Name: slingshot protein phosphatase 1
  Uniprot ID: Q8WYL5
  ENST ID: ENST00000326470
  CDS Start-End: 147-2258
tttttcagccaaaatatcagaggaagacaagagttccacaagagccatttgcttttcgggtaggactctgaggaggagttggctccccagccctcgtggaagcactcggcagcctcctggcttttcctgatctccatagggagcagatggccagagctcggagggcagttgtagggagcgttagagatgtgagcactgcagccacgaacctcttttattttaccgacttctgcatcttccttcagccaacccactgcttctgctgtccagaggtttccagctcaaattacttaagtgagagctttttcatggtgaaaggcgcagccctcttcttacaacagggaagcagccctcaaggccagcggagtcttcagcacccccacaagcatgcaggtgatctgcctcaacatcttcaggtgatgatcaaccttctgcgttgcgaagacagaatcaagctggcagtgcgcctggagagcgcctgggcggaccgggtccggtacatggtggtggtgtacagcagcgggcgccaggacaccgaggagaatatcttgctgggagtggacttttccagtaaggaaagtaaaagctgcaccattgggatggttctccgactgtggagcgacacgaaaatccaccttgatggagatggtgggttcagcgtgagcacagcaggaaggatgcacatatttaagcctgtgtctgtccaggccatgtggtctgccctgcaggtgcttcacaaggcctgcgaagtggcccggaggcacaactacttccccgggggtgtagctctcatctgggctacctactatgagagctgcatcagctccgagcagagctgcatcaacgagtggaacgccatgcaggacctggagtctacgcggcccgactcccccgcgctatttgtggacaagcccactgaaggggaaaggaccgagcgcctcatcaaagccaagctccgaagcatcatgatgagccaggatctagaaaatgtgacttccaaagagattcgtaatgaattagagaaacagatgaattgtaacttgaaggaactcaaggaatttatagacaatgagatgctacttatcttgggacagatggacaagccctcccttatcttcgatcatctttatctcggctctgaatggaatgcatccaatctggaggaactgcagggctcaggggttgattacattttaaatgttaccagagaaatcgataatttttttcctggcttatttgcatatcataacatccgagtctacgatgaagagaccacagacctcctcgcccactggaatgaagcgtatcattttataaacaaagcgaagaggaaccattccaagtgcctggtgcattgcaaaatgggcgtgagtcgctcggcctccacagtcatagcctatgcaatgaaggaattcggctggcctctggaaaaagcatataactatgtaaagcagaagcgcagcatcacgcgccccaacgcgggctttatgaggcagctgtctgagtatgaaggcatcttggatgcaagcaaacagcggcacaacaagctgtggcgtcagcagacagacagcagcctccagcagcctgtggatgaccctgcaggacctggcgacttcttgccagagaccccagatggcaccccggaaagccagctgcccttcttggatgatgccgcccagcccggcttagggccccccctcccctgctgtttccggcgactctcagacccccttctgccttcccctgaggatgaaactggcagcttggtccacctggaggatccggagagggaggctctgttggaggaagctgctccacctgcagaggtgcacaggccggccagacagccccagcaaggttccggactctgtgagaaggatgtgaagaagaaactagagtttgggagtcccaaaggtcggagcggctccttgctgcaggtggaggagacggaaagggaggagggcctgggagcagggaggtgggggcagcttccaacccagctcgatcaaaacctgctcaactcggagaacctaaacaacaacagcaagaggagctgtcccaacggcatggaggtaggcagagcccggcctgcagggtggcacaccccatcccttccatcccactctaattggcctacctcagcctctgtagtagggactacaggcacccgccaccacacccagctgatttttttctattgtctcctctgggcccccagctcccatctccagggacctgagggttctttcacagggtgattctgctggtgggtacgtagtgcataccttatatagcaaattgagaatctgttgggaataacacatatctctgcacaccatcttcaccccatgtaccttattcataccctgggcagggcttccaactcaatttctttttgtgtatgtaaaattaaaacatataatttatcagcc

SEQ ID NO: 182009 - DNA, 583 bp, Homo sapiens
  Payload ID: 15840
  Gene Symbol: SSH1
  Gene Name: slingshot protein phosphatase 1
  ENST ID: ENST00000546697
  CDS Start-End: 122-583
aacatggaggaggaacagctggccttgtaagtgatcacagagtgaaaccagcctagtctgttgcattgttcctttttttttccaaaggaaatataagggaaaccaaggggaatttttgctcatggtttccaaggcaaaggtcatcgttaatggttggctgtttccagcgtgcttgggtttctgcttaagtgagagctttttcatggtgaaaggcgcagccctcttcttacaacagggaagcagccctcaaggccagcggagtcttcagcacccccacaagcatgcaggtgatctgcctcaacatcttcaggtgatgatcaaccttctgcgttgcgaagacagaatcaagctggcagtgcgcctggagagcgcctgggcggaccgggtccggtacatggtggtggtgtacagcagcgggcgccaggacaccgaggagaatatcttgctgggagtggacttttccagtaaggaaagtaaaagctgcaccattgggatggttctccgactgtggagcgacacgaaaatccaccttgatggagatggtgggttcagcgtgagcacagcaggaaggatgcacatattt

SEQ ID NO: 182010 - DNA, 5621 bp, Homo sapiens
  Payload ID: 15840
  Gene Symbol: SSH1
  Gene Name: slingshot protein phosphatase 1
  ENST ID: ENST00000546433
  CDS Start-End: 1-287
acgccatgcaggacctggagtctacgcggcccgactcccccgcgctatttgtggacaagcccactgaaggggaaaggaccgagcgcctcatcaaagccaagctccgaagcatcatgatgagccaggatctagaaaatgtgacttccaaagagattcgtaatgaattagagaaacagatgaattgtaacttgaaggaactcaaggaatttatagacaatgagatgctacttatcttgggacagatggacaagccctcccttatcttcgatcatctttatctcggttgattacattttaaatgttaccagagaaatcgataatttttttcctggcttatttgcatatcataacatccgagtctacgatgaagagaccacagacctcctcgcccactggaatgaagcgtatcattttataaacaaagcgaagaggaaccattccaagtgcctggtgcattgcaaaatgggcgtgagtcgctcggcctccacagtcatagcctatgcaatgaaggaattcggctggcctctggaaaaagcatataactatgtaaagcagaagcgcagcatcacgcgccccaacgcgggctttatgaggcagctgtctgagtatgaaggcatcttggatgcaagcaaacagcggcacaacaagctgtggcgtcagcagacagacagcagcctccagcagcctgtggatgaccctgcaggacctggcgacttcttgccagagaccccagatggcaccccggaaagccagctgcccttcttggatgatgccgcccagcccggcttagggccccccctcccctgctgtttccggcgactctcagacccccttctgccttcccctgaggatgaaactggcagcttggtccacctggaggatccggagagggaggctctgttggaggaagctgctccacctgcagaggtgcacaggccggccagacagccccagcaaggttccggactctgtgagaaggatgtgaagaagaaactagagtttgggagtcccaaaggtcggagcggctccttgctgcaggtggaggagacggaaagggaggagggcctgggagcagggaggtgggggcagcttccaacccagctcgatcaaaacctgctcaactcggagaacctaaacaacaacagcaagaggagctgtcccaacggcatggaggatgatgctatatttgggatccttaacaaagtgaagccttcctataaatcctgtgccgactgcatgtaccctacagccagcggggctcctgaggcctccagggagcgatgtgaggaccccaatgctcccgccatctgcacccagccagccttcctaccccacatcacgtcctcccctgtggcccacttggccagcaggtcccgtgttccggagaagccagcctctggcccaaccgaacctcccccgttcctaccaccagcaggctccaggagggcagacaccagtggccctggggctggagctgccctagagccaccagccagccttttggaaccttccagagagaccccaaaagtcctgccaaagtccctccttttgaagaattctcactgtgataagaaccctcccagcacagaagtggtaataaaggaagaatcgtcacccaagaaagatatgaagccagccaaggacctgaggcttctgttcagtaatgaatctgagaagccgacaaccaacagctacctgatgcagcaccaggagtccatcattcagctgcagaaggcaggcttggtccgcaagcacaccaaagagctagagcggctgaagagcgtgcctgcagacccagcacctccctccagggatggccctgccagcaggctggaggccagcatccccgaggagagccaggatccagccgcgctccacgagctgggccccctggttatgcccagccaggccgggagtgatgagaagtcagaggccgcccccgcttcattggaaggaggctcactgaagagcccccctcctttcttctaccgcctggaccacaccagtagtttctcaaaagactttctgaagaccatctgctacacccccacctcctcttccatgagctccaacctgacccggagctccagcagcgatagcatccacagtgtccgtgggaagcccgggctggtgaagcagcggacacaggagattgagacccggctccggctggcgggcctcaccgtctcttccccactgaagcgctcacactctcttgccaagctggggagtctcaccttctcaacggaagacctgtccagtgaggctgacccgtccaccgtcgctgactcccaggacaccactttgagtgaatcttccttcttgcatgagccccagggaaccccgagggacccagctgcaacctccaaaccatcagggaaacccgccccagaaaacttaaagagcccttcgtggatgagcaaaagctgacccgccttttgctgcgtcaggctgggcggatattttcatatgatccctccctcactttcactgtggatttggatcgaccccttacatcttgatttcccttaaacgagtgaagtcatcctaacttttcccctactcttgccatagagaggaggagaagaaactaaccaacatgcagcacaagaaggggagctgtcagtcgtgtggcctgggagaaccaggagccgccggccaggagacacaaaactccgctcccaccgtgtcttcaagaagaaccatgttttaggaagaacgtgcacacataggcgcacacatccagactgttcccttcgcatcctgcagaagagtcctggtggtggcagcctcaccgcggcacacgttctagctcattcttggcctcgcagaaaactctcggatggcaacattaagtcctacctctgttctcgctgcgctttttatttttaaaacacacgaatgaccaaggcttgttccagggaataatgctctgtctgaaagcgtttttccaaaaaaagaatttttcgttttgtgttttggttgggaccccagacgtgtcaagacttttaacccgacagccccaagcactgctgagtaaagtcatcagatgagtagtcccacgctgttgttgagctgactctgtgcccgaatggtggtgcaggcgccctgtcctggttgtgttgttacgtgtttgaccagcacaggggtccggtggggaaaatgtatgggttgttctcagttgttgctaatgctgaagtttaaatctcaaggggaagggcccacctgcattgttgagtgtctgctgctgaaacacatgattgtgtttaggtttgaaattgctcaagtgtctggctcaggtggtggttctgagacacatcgtcctgctgagagcccagatgcttaggtccactagggcccatctagggaagggaaaggagatttcagcggcttccccgaaaggaacgggactgtcgggatgcttcccggatgtctacagttgccccttcctgcagtgagattactgcttcctgtttccctccagctcttcccagcagcagtgagggagtataagagggatctgtagtcgctgcctggctctgtgggcggcccctttaagactcaggtgagctcagccagtcccgctgcgccaggcttgaatcaaaggtgtcagcaagctagatgtcaaaacatttcgagagagaggcagcttgcagaaaagcagaaaggttgaattcaggggtcagcaaactatggcatgtggccccgtgagctaggaatggtttttcctctttaagacagggcctggctctgtcacctaggctggagtacagtagtgcaatcatgactcactgcagcatcaacctccctggctcaagcgatggcttttacctttttaaggagttgtaaaaaaaagaaataatatgtgacagaattcatgtggcccacaaagcctgaggtacttactgtcaggccctttgtagaaaaagttgctgacccctggtttgatttgccacacagggctgctcatggccctgtaggaagaaactgggtaaatgtgaagccctctgcctctctgacacctaaggccagacccttccctcctcccgaccacaagctttgccagccccgcactagcctcacctgtgcaggatggagtaggttgcgtacatgggggaaggcaggtgaacacagttggctgaagctcttccacaattccatcttgccctcagctgggtccgccagattaactcagtgaaaccagaaagccttcaaggaccagctgaattctgaaagtgagtgagtgagccatcatcttaacattggccagaactgtgttccccaaagctattctagaaagcaccccaggagggatctgcaggaacaaggctagttcatattttacctagtgagcacagtttttgcaaaaatcctccctccaggactttgtctccttggagtgatttttaaaaatacatacattactttatagggagctgttttcccactagtgtcaattaaaatcaccttaaaaggtgattatccacttattcctaaacccctgtgggttgttccccctttccctcagccaacaaaagcatagcctcaaaaaatatcaagttcggtatgttttgccaaatcaaatttcatgtggtagatcaatttttgtgtcaaaataatcttttaaatttagtgatgacaggcttttgttggttttttaaccacgtctatgtatgagaatgatatatttttgaaaactttaattttgaaagccataatttttcttatctaaagagttggggggtggggtgtggaatctggagagtacaagttggtctttggcttctggcaaacttacccattcatttttggaagcacagctagcatatcaacatccagacgagagcgctggtcccgtccacagagcagagtgaagcattctggacttgatgcttaatagcctggcctggagaaaagggtaaggtttatttttggaaacccagatcagttgcatgtaaacagatggcacatggctatttaaaatgctgtatgatggggccgggcgcggtggctcacgcctgtaatcctagcactttgggaggccgaggcaggcggatcatctgaggtcaggagttctagaccagcctggccaacatggtgaaaccccgtctctactaaaaatacaaaaacttagctgggtgtggtagtgcgtgcctgtaatcctagctacttaggaggctgaggcaggagaatcgcttgaacctgggtggcggaggttgcaatgagccgagatcgcgccactgcactccagcctgggtgcaatgaaactgggagtgaaactccgtctcaaaaaaataaaatgctgtatgaacaagatgagcattctgtcaggtgtcgggacacctgggcaaagacgaattcatgctgtctgtgaaaaggaagtttgcactgtaacatatgccatagcttggcccttgctttgtatgcaaccttagctgatggggaaaattccaaacataagtggcacaggaaagaggcaggcagaggaggcaggggtctgtgctgtgcaagtcactggttttttatgactatcattttcattgaatgcatttgttgaattgggacaaaaggaacattttctaaatcagcttgatactctttataaaaaacagctgaatctt

SEQ ID NO: 182011 - DNA, 602 bp, Homo sapiens
  Payload ID: 15840
  Gene Symbol: SSH1
  Gene Name: slingshot protein phosphatase 1
  ENST ID: ENST00000548522
  CDS Start-End: 18-131
cgcaccgcgccgcagccatggccctggtgaccctgcagcgctcgcccacgcccagcgccgcctcctcctcggccagcaacagcgagttggaggctggcagcgaagaagatcgaaaattaaacctcaggtgatctgcctcaacatcttcaggtgatgatcaaccttctgcgttgcgaagacagaatcaagctggcagtgcgcctggagagcgcctgggcggaccgggtccggtacatggtggtggtgtacagcagcgggcgccaggacaccgaggagaatatcttgctgggagtggacttttccagtaaggaaagtaaaagctgcaccattgggatggttctccgactgtggagcgacacgaaaatccaccttgatggagatggtgggttcagcgtgagcacagcaggaaggatgcacatatttaagcctgtgtctgtccaggccatgtggtctgccctgcaggtgcttcacaaggcctgcgaagtggcccggaggcacaactacttccccgggggtgtagctctcatctgggctacctactatgagagctgcatcagctccgagcagagctgcatcaacgagtggaacgccatgcaggacct

SEQ ID NO: 182012 - DNA, 2354 bp, Homo sapiens
  Payload ID: 15840
  Gene Symbol: SSH1
  Gene Name: slingshot protein phosphatase 1
  Uniprot ID: Q8WYL5
  ENST ID: ENST00000551165
  CDS Start-End: 95-2173
cggctccaggaggccccgggcccggcccgggcggcggtggcggtggcggctctagctcgagacgtctgtggcgccctcgcaccgcgccgcagccatggccctggtgaccctgcagcgctcgcccacgcccagcgccgcctcctcctcggccagcaacagcgagttggaggctggcagcgaagaagatcgaaaattaaacctcagcttaagtgagagctttttcatggtgaaaggcgcagccctcttcttacaacagggaagcagccctcaaggccagcggagtcttcagcacccccacaagcatgcaggtgatctgcctcaacatcttcaggtgatgatcaaccttctgcgttgcgaagacagaatcaagctggcagtgcgcctggagagcgcctgggcggaccgggtccggtacatggtggtggtgtacagcagcgggcgccaggacaccgaggagaatatcttgctgggagtggacttttccagtaaggaaagtaaaagctgcaccattgggatggttctccgactgtggagcgacacgaaaatccaccttgatggagatggtgggttcagcgtgagcacagcaggaaggatgcacatatttaagcctgtgtctgtccaggccatgtggtctgccctgcaggtgcttcacaaggcctgcgaagtggcccggaggcacaactacttccccgggggtgtagctctcatctgggctacctactatgagagctgcatcagctccgagcagagctgcatcaacgagtggaacgccatgcaggacctggagtctacgcggcccgactcccccgcgctatttgtggacaagcccactgaaggggaaaggaccgagcgcctcatcaaagccaagctccgaagcatcatgatgagccaggatctagaaaatgtgacttccaaagagattcgtaatgaattagagaaacagatgaattgtaacttgaaggaactcaaggaatttatagacaatgagatgctacttatcttgggacagatggacaagccctcccttatcttcgatcatctttatctcggctctgaatggaatgcatccaatctggaggaactgcagggctcaggggttgattacattttaaatgttaccagagaaatcgataatttttttcctggcttatttgcatatcataacatccgagtctacgatgaagagaccacagacctcctcgcccactggaatgaagcgtatcattttataaacaaagcgaagaggaaccattccaagtgcctggtgcattgcaaaatgggcgtgagtcgctcggcctccacagtcatagcctatgcaatgaaggaattcggctggcctctggaaaaagcatataactatgtaaagcagaagcgcagcatcacgcgccccaacgcgggctttatgaggcagctgtctgagtatgaaggcatcttggatgcaagcaaacagcggcacaacaagctgtggcgtcagcagacagacagcagcctccagcagcctgtggatgaccctgcaggacctggcgacttcttgccagagaccccagatggcaccccggaaagccagctgcccttcttggatgatgccgcccagcccggcttagggccccccctcccctgctgtttccggcgactctcagacccccttctgccttcccctgaggatgaaactggcagcttggtccacctggaggatccggagagggaggctctgttggaggaagctgctccacctgcagaggtgcacaggccggccagacagccccagcaaggttccggactctgtgagaaggatgtgaagaagaaactagagtttgggagtcccaaaggtcggagcggctccttgctgcaggtggaggagacggaaagggaggagggcctgggagcagggaggtgggggcagcttccaacccagctcgatcaaaacctgctcaactcggagaacctaaacaacaacagcaagaggagctgtcccaacggcatggaggtaggcagagcccggcctgcagggtggcacaccccatcccttccatcccactctaattggcctacctcagcctctgtagtagggactacaggcacccgccaccacacccagctgatttttttctattgtctcctctgggcccccagctcccatctccagggacctgagggttctttcacagggtgattctgctggtgggtacgtagtgcataccttatatagcaaattgagaatctgttgggaataacacatatctctgcacaccatcttcaccccatgtaccttattcataccctgggcagggcttccaactcaatttctttttgtgtatgtaaaattaaaacatataatttatcagccaacttca

SEQ ID NO: 182013 - DNA, 9327 bp, Homo sapiens
  Payload ID: 15841
  Gene Symbol: SSH2
  Gene Name: slingshot protein phosphatase 2
  Uniprot ID: Q76I76
  ENST ID: ENST00000269033
  CDS Start-End: 153-4424
gcggagtctgcggccgttcccgcggcctcctcctcctccccgttcccttcacccccaccccgcacccctttccccatcccggctccgtcaccctcccgtcccccacactcaggacaagaatgccctgcccggaacaacccagcagcgcctagatggctttggtcacggtccagcggtcacctacccccagcaccacctccagcccctgcgcctcggaggcagacagtggggaggaagaatgccggtcacagcccaggagcatcagcgagagctttctaactgtcaaaggtgctgccctttttctaccacggggaaatggctcatccacaccaagaatcagccacagacggaacaagcatgcaggcgatctccaacagcatctccaagcaatgttcattttactccgcccagaagacaacatcaggctggctgtaagactggaaagtacttaccagaatcgaacacgctatatggtagtggtttcaactaatggtagacaagacactgaagaaagcatcgtcctaggaatggatttctcctctaatgacagtagcacttgtaccatgggcttagttttgcctctctggagcgacacgctaattcatttggatggtgatggtgggttcagtgtatcgacggataacagagttcacatattcaaacctgtatctgtgcaggcaatgtggtctgcactacagagcttacacaaggcttgtgaagtcgccagagcgcataactactacccaggcagcctatttctcacttgggtgagttattatgagagccatatcaactcagatcaatcctcagtcaatgaatggaatgcaatgcaagatgtacagtcccaccggcccgactctccagctctcttcaccgacatacctactgaacgtgaacgaacagaaaggctaattaaaaccaaattaagggagatcatgatgcagaaggatttggagaatattacatccaaagagataagaacagagttggaaatgcaaatggtgtgcaacttgcgggaattcaaggaatttatagacaatgaaatgatagtgatccttggtcaaatggatagccctacacagatatttgagcatgtgttcctgggctcagaatggaatgcctccaacttagaggacttacagaaccgaggggtacggtatatcttgaatgtcactcgagagatagataacttcttcccaggagtctttgagtatcataacattcgggtatatgatgaagaggcaacggatctcctggcgtactggaatgacacttacaaattcatctctaaagcaaagaaacatggatctaaatgccttgtgcactgcaaaatgggggtgagtcgctcagcctccaccgtgattgcctatgcaatgaaggaatatggctggaatctggaccgagcctatgactatgtgaaagaaagacgaacggtaaccaagcccaacccaagcttcatgagacaactggaagagtatcaggggatcttgctggcaagcaaacagcggcataacaaactatggagatctcattcagatagtgacctctcagaccaccacgaacccatctgcaaacctgggctagaactcaacaagaaggatatcaccacctcagcagaccagattgctgaggtgaagaccatggagagtcacccacccatacctcctgtctttgtggaacatatggtcccacaagatgcaaatcagaaaggcctgtgtaccaaagaaagaatgatctgcttggagtttacttctagggaatttcatgctggacagattgaggatgaattaaacttaaatgacatcaatggatgctcatcagggtgttgtctgaatgaatcaaaatttcctcttgacaattgccatgcatccaaagccttaattcagcctggacatgtcccagaaatggccaacaagtttccagacttaacagtggaagatttggagacagatgcactgaaagcagacatgaatgtccacctactgcctatggaagaattgacatctccactgaaagacccccccatgtcccctgatcctgagtcaccaagcccccaacccagttgccagactgaaatctcagatttcagtacagatcgcattgacttttttagtgccctagagaagtttgtggagctctcccaagaaacccggtcacgatctttttcccattcaaggatggaggaactgggtggaggaaggaatgagagctgtcgactgtcagtggtagaagtagccccttccaaagtgacagctgatgaccagagaagcagctctttgagtaatactccccatgcatcagaagaatcttcaatggatgaggaacagtcaaaggcaatttcagaactggtcagcccagacatcttcatgcagtctcactcggaaaatgcaatttcagtcaaagaaattgtcactgaaattgagtccatcagtcaaggagttgggcagattcaactgaaaggagacatcttacccaacccatgccatacaccaaagaagaacagcatccatgagctgctccttgagagggcccagactccagagaacaaacctggacatatggagcaagatgaggactcctgcacagcccagcctgaactagccaaagactcagggatgtgcaacccagaaggctgcctaaccacacactcatctatagcagacttggaagaaggggaaccagctgagggggaacaagagctccagggctcagggatgcacccaggtgccaagtggtaccctgggtctgtgaggcgagccaccttggagttcgaagagcgcttacggcaggagcaagagcatcatggtgctgccccaacatgtacctcattgtccactcgtaagaattcaaagaatgattcttctgtggcagacctagcaccaaaagggaaaagtgatgaagcccccccagaacattcatttgtcctcaaggaaccagaaatgagcaaaggcaaagggaaatacagtgggtctgaggctggctcactgtcccattctgagcagaatgccactgttccagctcccagggtgctggagtttgaccacttgccagatcctcaggagggcccagggtcagatactggaacacagcaggaaggagtcctgaaggatctgaggactgtgattccataccaggagtctgaaacacaagcagtccctcttccccttcccaagagggtagaaatcattgaatatacccacatagttacatcacccaatcacactgggccagggagtgaaatagccaccagtgagaagagcggagagcaagggctgaggaaagtgaacatggaaaaatctgtcactgtgctctgcacactggatgaaaatctaaacaggactctggaccccaaccaggtttctctgcacccccaagtgctacctctgcctcattcttcctcccctgagcacaacagacccactgaccatccaacctccatcctgagtagccctgaagacagaggcagcagcctgtccacagccctggagacagcagcaccttttgtcagtcatacaacccatttactgtctgccagtttggattacctgcatccccagactatggttcacctggagggcttcacagagcagagcagcactacagatgagccctctgcagaacaggttagctgggaagaaagtcaggagagccctctctccagtggcagtgaggtgccatataaggactcccagctaagtagcgcagacctaagtttaattagcaaacttggtgacaacactggggagttacaggagaaaatggacccattgcctgtagcctgtcgactcccacatagctctagtagtgaaaacataaagagtctcagccacagccccggtgtggtgaaggagcgtgctaaagaaatcgagtctcgagtggttttccaggcagggctcaccaaaccatcccaaatgaggcgctcagcttctctcgccaaattaggttacttggacctctgtaaagactgcttaccagagagggagcctgcctcctgtgaatcccctcatctcaaactgcttcagcctttcctcagaacagactcaggcatgcacgcgatggaggaccaagagtccctagaaaacccaggtgccccccacaacccagagcccaccaagtcttttgtagaacaactcacaacaacagagtgtattgtgcagagcaagccagtggagaggccccttgtgcagtatgccaaagaatttggttctagtcagcagtatttgctccccagggcaggacttgaattgactagttctgaaggaggccttcccgtgctacagacccagggactgcagtgtgcatgcccagctccagggctggccgtggcaccccgtcagcaacacggcagaactcacccccttaggagactgaaaaaggcaaatgacaaaaaacggacaaccaaccccttctataataccatgtgattctgagcctacacatgtgactttctagaagaaatgtttgtaaaaggggcaggtgtaatatgtaaggaacatgcactttattggttaattttataatattttggtcattttactgtttctggtgcatgcagggtttgggtgtttttcagtgtgtatgtgtgtgtatatgtaaggggaaagagagattgatctggatggcaagaccgtttatcattttttatttaaaaaaatcaaacctcaaaaaagtcattttcagagaacacctttatcaaaggcaaattgctgtttttcagtcagctgccacctgcttctcattttgccctctgagaaaaggcatggtttcttaattgagggaaggaagcagattcggaggggtggagataaagctggggattggagatgttcccctgcctttgtgatgatggtttggtttccagacctgaggcatcgaatgggctaaaggtcagccagaagtcagagggctctcagccttcatccagccgcagccctttagagttcctgaaggaggcaggttccgctttgctttaaaagagggtcttccggtgttccagagtgtatcgttacagtaagacatgataatggccggctctgcaaatttatcatatagtttttttcccaagaaaattatttttgaaattaaaacaggaccccaaatgaaatccaagtggtcttctgtagaggaaagcatgataagaggaggaagacataaagttgggggtggagaggctgctgcccagaaactgctgggttggtgggatccacacagatgggcatcttggctctccctgccagaaaaatgtgctctgcagtgtcctcccaactgaaaacaacagtgacatgtttgaaaagcagcaatcgaaagtcagtgtgttcttgtaaaatgaatatgtatgtagggttttaacccttccattacttgaataattctttgggccttctgagtttaatggccatattttcttccagtttattttccttccccatgctgttgtccccatgctgcctatttttttaaatttcatagattatatttgaattgttacatatgtttaacatccattgaatgcaacgttttatttttggtattatcactgttaacacttttttttccttttcctggaaggtttgtcatttctctaaagtttgtacacagtatttatgtacataatattgtcactgtcttagtgtcttgttcatgttgtagggtaattttgatttattctttttaagaaggagtagagttgcaactggaaaacacagacaccagaaatgaaagtgttgggtgttgataggaatctgtacaatatgttgatggtggctgtagttgtttaaatggagacttccaatcaccagctcctgccaaattatgcattagtaactttttcctcagagacacccctaaaggctcccattaggtcacagcgtgactgaaagctgatttctctgtgagactgaaatcccagaacattgtttgccagtatctcaaccacagccaggaagtatatgtgagttgcccagagtggaagctcctagtagaggctgaaggccacaggggaggcctcagccaggggcaagtgcccacagtgactccatttaggatgctgtcgttttgctactgttgtggagatccttaacgcagcagcgcctgtcataaacaagcctcttgtagcttcttacagaaaacagatttagtctagcatgaaacacctctgcatctcattgaaactgaagaggcttgcagatttgctttcgttgatgtccacgttactgaggattgactgagtatagactggagacaggtttttggcttatcacagcactgaggaaaatacaaatgcacagactgtcagcatgatgtcagaggccagagtttggtgggggcagatggcagggcgacccaaaagatgcagaaaaggtagactggggccactgggtcttaagaggagctgtgaagttgtgtggaagccaaggctgggtctgacatccctgccaggaagcaggttggacagaaaccacttgctaaaagcgtctctatggtgcagtgattatgtgtaccctgtgctgttgctcagtagtctccttgaatgttcaagtatctcatccactcagttttgtgattcctggatatttgtgtgttgtaaagtgttttgttaggtggtatgaaccaatgtgaggaggcttgagacagggttatggatttccagagctcttccatgtagaataccctgccttcttgaagcagttccaccaccaatatgatggggaagggcaggaacttatggcagggtggggagagggtttgcctggaagttaagagagtggcatccacttgtggtaaccccttacgatgatgacatcccacacactaagaggtacaagcaggaccaaagttttggactgttccctcttctcccctccactgtgtttaatgttcactcactgcattaaataacaacaaagatgggacaaaacccactaatactgtggggaaaaaaaattttcaagagcagaggaaagtctttctgcctttttataattactttttttatcatttaatttacctgcctaaataaacatcttctacagaatatctgtcattcaaccatgccaaggagtttgtgccagccttttcagactcccagaattgggtgttcctgggttatttacatagctgagcagtgtccaggggaggtgcgcagtgaactgtcaaggactttccagactgtcttctcttcagacttttataatctccagtggcatctttcccttttcttttgttcatgacctgacctgaagcagcagatttgatagactggcaaagatgaataggaaaaactttgactcttgcccagtgcctgcctgcctctctctctctcctctctctctctctctttttaaaccaccatagactctcacttattttggaggagtgtatgtgcatgtgtacacatatgtacatatataaaaacagttgatgttttggtgtatggggtaaaagccccaggagcatacagaacttgagctgaacctggtcagtagaaagggaaaccccaaccctttcttgatttttggagacacccaggactaatggatactgtagtagacatgtagtactatagtaccgtaatattcatctctcctcattttagttgcctttcagattctaaatgtttgggatcattcctatcatcttagtctcttcaggatctttagtattttcctggttctgaggaggcttgagacagggttatggatttccttgttctgtgtctttatccctactgatagttcctctttctcattttgcaaactacccagagctccaaggacagcctgaagatctcagtgcctcaggctctgaggtactctgctcacaggccccagacagatgctgttgggtaaactcaaagcttcctatgagaagcttctgagatgtagcaggtcacagaagtgttcacctgtttcatctgaggatttcagttctgaagtgatctaggcatgtttggtaaaaatgtttttgtgagagttctttttttaagaaagcattatgcaaaaagtcacttttaagggcatttaaaaatttttaagtaaagccattctttggcttttttggactatttgtggatactttgtttacattttgaatattaaaatgtgcatcatcttgtcggccatgcagtcctgcaggcatcagtgccctggctgtcctgtgagtcctcatgcagagcagggccatcatggtcagcccttgtgagtaagtgggtatacgctgaagctgacttccgtctgtgtcctgccctcccatccagcactctctatggaaatagttgtcatttcctcagtgatggtgtgtcttatagtgatggttgtaatggtgaatggctagtgtcattttgtttaattttgttttgctttttgatggtggataagatgaaattttagctgtttcagcatcaatccaacttaaaagcatcttggactttgttttcccttccaaactaaaagatcaaggcatgtattagacacaagcatatttgctgcctcaactcctctgacacccatattaggaaaaggcctgccaccaaagcaggaagctgcacactcctaacccttctcccagggtgtggggtcccttgacgtcatgaagagctattgcaaggtgcttctgtacttttccagcctggaaatggagggtgactggccctggctcctgctatgagaagataaccagcctcattttctcagtgccccagaggtctaggataggatttctaaactggaatcatccttaatcaccttgaagatcccttaagaggcatttgactggtgctgccgtctgtgtcctcaaagcaatgctggtggcagcgtcctgtgtacacatgcagagctaatacccaaactaaaaactgggtaactggccctgaagtgcttcccaatcagtaagcccacagggaaatgtttgatttttatgttctgttggattttggtttgcttggcatatctaaaggtgcctttacttttctttttttttttttttctttctgctttgttttgtaggacttgttctaacatggaaaacaagtccagaagactctcctctgactgttacctttgccccaagccaccccaaacttttatgctcatgttttattaaagcaggtgctccctggaatctctgggacatttttgaggcatttgaagcagaatatagagtggtctcatctccttccttaatcttcctggtggttgggatgttccacttgtatcatagatttttttattacagatatgctccactgtttttaaatgtgaacttgtgcgcaaatgtgcagattcaatgttcttgttacagattgaataaatttttattttgaagatgaaa

SEQ ID NO: 182014 - DNA, 4538 bp, Homo sapiens
  Payload ID: 15841
  Gene Symbol: SSH2
  Gene Name: slingshot protein phosphatase 2
  ENST ID: ENST00000540801
  CDS Start-End: 94-4446
ccgcacccctttccccatcccggctccgtcaccctcccgtcccccacactcaggacaagaatgccctgcccggaacaacccagcagcgcctagatggctttggtcacggtccagcggtcacctacccccagcaccacctccagcccctgcgcctcgagctctcatttggaagacagtgaatcagcagcattactttgctgtgaatgtgaagaatcagaaatctttactgattccaatgaggcagacagtggggaggaagaatgccggtcacagcccaggagcatcagcgagagctttctaactgtcaaaggtgctgccctttttctaccacggggaaatggctcatccacaccaagaatcagccacagacggaacaagcatgcaggcgatctccaacagcatctccaagcaatgttcattttactccgcccagaagacaacatcaggctggctgtaagactggaaagtacttaccagaatcgaacacgctatatggtagtggtttcaactaatggtagacaagacactgaagaaagcatcgtcctaggaatggatttctcctctaatgacagtagcacttgtaccatgggcttagttttgcctctctggagcgacacgctaattcatttggatggtgatggtgggttcagtgtatcgacggataacagagttcacatattcaaacctgtatctgtgcaggcaatgtggtctgcactacagagcttacacaaggcttgtgaagtcgccagagcgcataactactacccaggcagcctatttctcacttgggtgagttattatgagagccatatcaactcagatcaatcctcagtcaatgaatggaatgcaatgcaagatgtacagtcccaccggcccgactctccagctctcttcaccgacatacctactgaacgtgaacgaacagaaaggctaattaaaaccaaattaagggagatcatgatgcagaaggatttggagaatattacatccaaagagataagaacagagttggaaatgcaaatggtgtgcaacttgcgggaattcaaggaatttatagacaatgaaatgatagtgatccttggtcaaatggatagccctacacagatatttgagcatgtgttcctgggctcagaatggaatgcctccaacttagaggacttacagaaccgaggggtacggtatatcttgaatgtcactcgagagatagataacttcttcccaggagtctttgagtatcataacattcgggtatatgatgaagaggcaacggatctcctggcgtactggaatgacacttacaaattcatctctaaagcaaagaaacatggatctaaatgccttgtgcactgcaaaatgggggtgagtcgctcagcctccaccgtgattgcctatgcaatgaaggaatatggctggaatctggaccgagcctatgactatgtgaaagaaagacgaacggtaaccaagcccaacccaagcttcatgagacaactggaagagtatcaggggatcttgctggcaagcaaacagcggcataacaaactatggagatctcattcagatagtgacctctcagaccaccacgaacccatctgcaaacctgggctagaactcaacaagaaggatatcaccacctcagcagaccagattgctgaggtgaagaccatggagagtcacccacccatacctcctgtctttgtggaacatatggtcccacaagatgcaaatcagaaaggcctgtgtaccaaagaaagaatgatctgcttggagtttacttctagggaatttcatgctggacagattgaggatgaattaaacttaaatgacatcaatggatgctcatcagggtgttgtctgaatgaatcaaaatttcctcttgacaattgccatgcatccaaagccttaattcagcctggacatgtcccagaaatggccaacaagtttccagacttaacagtggaagatttggagacagatgcactgaaagcagacatgaatgtccacctactgcctatggaagaattgacatctccactgaaagacccccccatgtcccctgatcctgagtcaccaagcccccaacccagttgccagactgaaatctcagatttcagtacagatcgcattgacttttttagtgccctagagaagtttgtggagctctcccaagaaacccggtcacgatctttttcccattcaaggatggaggaactgggtggaggaaggaatgagagctgtcgactgtcagtggtagaagtagccccttccaaagtgacagctgatgaccagagaagcagctctttgagtaatactccccatgcatcagaagaatcttcaatggatgaggaacagtcaaaggcaatttcagaactggtcagcccagacatcttcatgcagtctcactcggaaaatgcaatttcagtcaaagaaattgtcactgaaattgagtccatcagtcaaggagttgggcagattcaactgaaaggagacatcttacccaacccatgccatacaccaaagaagaacagcatccatgagctgctccttgagagggcccagactccagagaacaaacctggacatatggagcaagatgaggactcctgcacagcccagcctgaactagccaaagactcagggatgtgcaacccagaaggctgcctaaccacacactcatctatagcagacttggaagaaggggaaccagctgagggggaacaagagctccagggctcagggatgcacccaggtgccaagtggtaccctgggtctgtgaggcgagccaccttggagttcgaagagcgcttacggcaggagcaagagcatcatggtgctgccccaacatgtacctcattgtccactcgtaagaattcaaagaatgattcttctgtggcagacctagcaccaaaagggaaaagtgatgaagcccccccagaacattcatttgtcctcaaggaaccagaaatgagcaaaggcaaagggaaatacagtgggtctgaggctggctcactgtcccattctgagcagaatgccactgttccagctcccagggtgctggagtttgaccacttgccagatcctcaggagggcccagggtcagatactggaacacagcaggaaggagtcctgaaggatctgaggactgtgattccataccaggagtctgaaacacaagcagtccctcttccccttcccaagagggtagaaatcattgaatatacccacatagttacatcacccaatcacactgggccagggagtgaaatagccaccagtgagaagagcggagagcaagggctgaggaaagtgaacatggaaaaatctgtcactgtgctctgcacactggatgaaaatctaaacaggactctggaccccaaccaggtttctctgcacccccaagtgctacctctgcctcattcttcctcccctgagcacaacagacccactgaccatccaacctccatcctgagtagccctgaagacagaggcagcagcctgtccacagccctggagacagcagcaccttttgtcagtcatacaacccatttactgtctgccagtttggattacctgcatccccagactatggttcacctggagggcttcacagagcagagcagcactacagatgagccctctgcagaacaggttagctgggaagaaagtcaggagagccctctctccagtggcagtgaggtgccatataaggactcccagctaagtagcgcagacctaagtttaattagcaaacttggtgacaacactggggagttacaggagaaaatggacccattgcctgtagcctgtcgactcccacatagctctagtagtgaaaacataaagagtctcagccacagccccggtgtggtgaaggagcgtgctaaagaaatcgagtctcgagtggttttccaggcagggctcaccaaaccatcccaaatgaggcgctcagcttctctcgccaaattaggttacttggacctctgtaaagactgcttaccagagagggagcctgcctcctgtgaatcccctcatctcaaactgcttcagcctttcctcagaacagactcaggcatgcacgcgatggaggaccaagagtccctagaaaacccaggtgccccccacaacccagagcccaccaagtcttttgtagaacaactcacaacaacagagtgtattgtgcagagcaagccagtggagaggccccttgtgcagtatgccaaagaatttggttctagtcagcagtatttgctccccagggcaggacttgaattgactagttctgaaggaggccttcccgtgctacagacccagggactgcagtgtgcatgcccagctccagggctggccgtggcaccccgtcagcaacacggcagaactcacccccttaggagactgaaaaaggcaaatgacaaaaaacggacaaccaaccccttctataataccatgtgattctgagcctacacatgtgactttctagaagaaatgtttgtaaaaggggcaggtgtaatatgtaaggaacatgcactttattggttaatttt

SEQ ID NO: 182015 - DNA, 560 bp, Homo sapiens
  Payload ID: 15841
  Gene Symbol: SSH2
  Gene Name: slingshot protein phosphatase 2
  ENST ID: ENST00000582084
  CDS Start-End: 159-305
ggggagaggcggtagctgacaggtggcgcctgcgcactgggagcgctcattgtgccccgcagctgcggaaccgcccgcccgccgcccgttcggagcgtcagtcggcgacagtctggtggacaagaatgccctgcccggaacaacccagcagcgcctagatggctttggtcacggtccagcggtcacctacccccagcaccacctccagcccctgcgcctcgagatggggacttgcttggggtcttgctgcccaggctggtcttgaactcgtggcgtcaagggatcctcctgtctcagcctcctaaagaattgggattatagtcatgagccactgtgaccggctacaattttcaagtctacaatatattattattgactgtagaaaccatattgtacaatagctcttcataacttactcctcctgtctaatggaaactttgtaccctttgaccatcatctcctccccattctcccaccaatccccaatctggtgtgaattttctgaattgatacctatattgatccagggttaaataaacaaagtataatactataataat

SEQ ID NO: 182016 - DNA, 965 bp, Homo sapiens
  Payload ID: 15841
  Gene Symbol: SSH2
  Gene Name: slingshot protein phosphatase 2
  ENST ID: ENST00000579040
  CDS Start-End: 174-511
ggcgacagtctggtggtgggtgcggagtctgcggccgttcccgcggcctcctcctcctccccgttcccttcacccccaccccgcacccctttccccatcccggctccgtcaccctcccgtcccccacactcaggacaagaatgccctgcccggaacaacccagcagcgcctagatggctttggtcacggtccagcggtcacctacccccagcaccacctccagcccctgcgcctcggaggcagacagtggggaggaagaatgccggtcacagcccaggagcatcagcgagagctttctaactgtcaaaggtgctgccctttttctaccacggggaaatggctcatccacaccaagaatcagccacagacggaacaagcatgcaggcgatctccaacagcatctccaagcaatgttcattttactccgcccagaagacaacatcaggctggctgtaagactggaaagtacttaccagaatcgaacacgctatatggtagtggtttcaactaatggtagacaagacactgaagaaagcatcgtcctaggaatggatttctcctctaatgacagtagcacttgtaccatgggcttagttttgcctctctggagcgacacgctaattcatttggatggtgatggtgggttcagtgtatcgacggataacagagttcacatattcaaacctgtatctgtgcaggcaatgtgggttgacagggattcaaggaacaaacactgtgatgtactattggtggaagaatgaactggagcagcctttctggagagtgatttgccaatatgccttatcattttgcatgatctttgtcctagtaactctatttctatggatttactctaagtttgtaaacatggatgtgtgcaaagattttagctctaagaatgtttgtcagtgttctaataatagcaaaaaataaaaaacaaatgattgaaaaatagaattagtaaa

SEQ ID NO: 182017 - DNA, 493 bp, Homo sapiens
  Payload ID: 15841
  Gene Symbol: SSH2
  Gene Name: slingshot protein phosphatase 2
  ENST ID: ENST00000577991
  CDS Start-End: 1-350
gtcgactcccacatagctctagtagtgaaaacataaagagtctcagccacagccccggtgtggtgaaggagcgtgctaaagaaatcgagtctcgagtggttttccaggcagggctcaccaaaccatcccaaatgaggcgctcagcttctctcgccaaattaggttacttggacctctgtaaagactgcttaccagagagggagcctgcctcctgtgaatcccctcatctcaaactgcttcagcctttcctcagaacagactcaggcatgcacgcgatggaggaccaagagtccctagaaaacccaggtgtaatatgtaaggaacatgcactttattggttaattttataatattttggtcattttactgtttctggtgcatgcagggtttgggtgtttttcagtgtgtatgtgtgtgtatatgtaaggggaaagagagattgatctggatggcaagaccgtttatcattttttatttaaaaaaatcaaacctc

SEQ ID NO: 182018 - DNA, 570 bp, Homo sapiens
  Payload ID: 15841
  Gene Symbol: SSH2
  Gene Name: slingshot protein phosphatase 2
  ENST ID: ENST00000590153
  CDS Start-End: 229-375
attgtgccccgcagctgcggaaccgcccgcccgccgcccgttcggagcgtcagtcggcgacagtctggtggtgggtgcggagtctgcggccgttcccgcggcctcctcctcctccccgttcccttcacccccaccccgcacccctttccccatcccggctccgtcaccctcccgtcccccacactcaggacaagaatgccctgcccggaacaacccagcagcgcctagatggctttggtcacggtccagcggtcacctacccccagcaccacctccagcccctgcgcctcgagatggggacttgcttggggtcttgctgcccaggctggtcttgaactcgtggcgtcaagggatcctcctgtctcagcctcctaaagaattgggattatagtcatgagccactgtgaccggctacaattttcaagtctacaatatattattattgactgtagaaaccatattgtacaatagctcttcataacttactcctcctgtctaatggaaactttgtaccctttgaccatcatctcctccccattctcccaccaatccccaatctggtgtgaattt

SEQ ID NO: 182019 - DNA, 574 bp, Homo sapiens
  Payload ID: 15841
  Gene Symbol: SSH2
  Gene Name: slingshot protein phosphatase 2
  ENST ID: ENST00000592397
  CDS Start-End: 214-574
atggtgatggaagcctggcataccataagcagccagcttccacggctgacactggggaacgtgatggctcctggaagcttagagatgccaggaaccacagatccctaaagagggtgtcacaaccctggctcattgagctcctaggtctgggttccccaaagggccacagctcttctctccttattgtcttctttccctattgtcgcctgcaacatggaggcagacagtggggaggaagaatgccggtcacagcccaggagcatcagcgagagctttctaactgtcaaaggtgctgccctttttctaccacggggaaatggctcatccacaccaagaatcagccacagacggaacaagcatgcaggcgatctccaacagcatctccaagcaatgttcattttactccgcccagaagacaacatcaggctggctgtaagactggaaagtacttaccagaatcgaacacgctatatggtagtggtttcaactaatggtagacaagacactgaagaaagcatcgtcctaggaatggatttctcctctaatgacagtagcacttgtaccatgggcttag

SEQ ID NO: 182020 - DNA, 428 bp, Homo sapiens
  Payload ID: 15841
  Gene Symbol: SSH2
  Gene Name: slingshot protein phosphatase 2
  ENST ID: ENST00000579954
  CDS Start-End: 63-191
ccctcccgtcccccacactcaggacaagaatgccctgcccggaacaacccagcagcgcctagatggctttggtcacggtccagcggtcacctacccccagcaccacctccagcccctgcgcctcgagagcagaactgggattcttggttcagggaggcagatttccagtgattgtaaggaagaatttgtaacagtggagtgcactgccttgcaaaatagtgagtgcacattgctggaaatattcaagcaaaggctggagaacattttgcctgggaggtggtataaagaattcctgcagtgggggacttctaagactatttctaatctaagattttgtgatttgagaatacttgtacttcaaagctggtaaaacattttagggtcatctgaagacaagtatcataggaataaatctttaatataattta

SEQ ID NO: 182021 - DNA, 2046 bp, Homo sapiens
  Payload ID: 15842
  Gene Symbol: SSH3
  Gene Name: slingshot protein phosphatase 3
  ENST ID: ENST00000308298
  CDS Start-End: 147-1331
ctggccctttaagggccgcccccgaggaggtgccaggcccgggtggcgccgtccgtccttcctggtcctgcgggtccaggactgtccgcggggttgagggaaggggccgtgcccggtgccagcccaggtgctcgcggcctggctccatggccctggtcacagtgagccgttcgcccccgggcagcggcgcctccacgcccgtggggccctgggaccaggcggtccagcgaaggagtcgactccagcgaaggcagagctttgcggtgctccgtggggctgtcctgggactgcaggatggaggggacaatgatgatgcagcagaggccagttctgagccaacagagaaggccccgagtgaggaggagctccacggggaccagacagacttcgggcaaggatcccagagtccccagaagcaggaggagcagaggcagcacctgcacctcatggtacagctgctgaggccgcaggatgacatccgcctggcagcccagctggaggcaccccggcctccccggctccgctacctgctggtagtttctacacgagaaggagaaggtctgagccaggatgagacggtcctcctgggcgtggatttccctgacagcagctcccccagctgcaccctgggcctggtcttgcccctctggagtgacacccaggtgtacttagatggagacgggggcttcagcgtgacgtctggtgggcaaagccggatcttcaagcccatctccatccagaccatgtgggccacactccaggtattgcaccaagcatgtgaggcagctctaggcagcggccttgtaccgggtggcagtgccctcacctgggccagccactaccaggagagactgaactccgaacagagctgcctcaatgagtggacggctatggccgacctggagtctctgcggcctcccagcgccgagcctggcgggtcctcagaacaggagcagatggagcaggcgatccgtgctgagctgtggaaagtgttggatctggagagcacctcagagaccagtgacatgccagaggtcttctcttcccacgagtcttcacatgaagagcctctgcagcccttcccacagcttgcaaggaccaagggaggccagcaggtggacagggggcctcagcctgccctgaagtcccgccagtcagtggttaccctccagggcagtgccgtggtggccaaccggacccaggccttccaggagcaggagcaggggcaggggcaggggcagggagagccctgcatttcctctacgcccaggttccggaaggtggtgagacaggccagcgtgcatgacagtggagaggagggcgaggcctgagccctcacacatgcccacgctcccctgacactgaagaggatccacaactccttggagaaacaccctcacgtctgttgccgcacacattcctctcagctccgccccatacccgtcactacagcctcacctcccacccctgtcactacggcctcacctcccacccctgtcactacagcctcacctcctacagccttaagtcccaggcccatgtctgcctgtccaagggctcaagactttctaactgggatgtggtagagggactgaaggtacctttgggggcaacagcaccctagtttcattctcaactctagccctgcacactcacctgtggcacggaatgaaaacagagcttcccgtgcaaaaagggtcacgcctcccacccccgccccctccctgcacctcctgtcctctcccagttcattcctggaaccagccaggccaggcaaccagtggcccccaaaggcaggcaggatcctcaggccccagccgcgggaggctggaagggctggcagatcgcttccctcatccacctccaccggtccaggtctttgctgctgtccccagacctcctgtgacaccacgccagatcacagggcaccaggccagagatagtcttctttttgtcctttctggcctctggctagtcagtttttcatagccttacagtatctggctttgtactgagaaataaaacacattttcatatttggttatt

SEQ ID NO: 182022 - DNA, 2871 bp, Homo sapiens
  Payload ID: 15842
  Gene Symbol: SSH3
  Gene Name: slingshot protein phosphatase 3
  Uniprot ID: Q8TE77
  ENST ID: ENST00000308127
  CDS Start-End: 179-2158
gagaagctccgcgggcccggctgggcgagtgtctggccctttaagggccgcccccgaggaggtgccaggcccgggtggcgccgtccgtccttcctggtcctgcgggtccaggactgtccgcggggttgagggaaggggccgtgcccggtgccagcccaggtgctcgcggcctggctccatggccctggtcacagtgagccgttcgcccccgggcagcggcgcctccacgcccgtggggccctgggaccaggcggtccagcgaaggagtcgactccagcgaaggcagagctttgcggtgctccgtggggctgtcctgggactgcaggatggaggggacaatgatgatgcagcagaggccagttctgagccaacagagaaggccccgagtgaggaggagctccacggggaccagacagacttcgggcaaggatcccagagtccccagaagcaggaggagcagaggcagcacctgcacctcatggtacagctgctgaggccgcaggatgacatccgcctggcagcccagctggaggcaccccggcctccccggctccgctacctgctggtagtttctacacgagaaggagaaggtctgagccaggatgagacggtcctcctgggcgtggatttccctgacagcagctcccccagctgcaccctgggcctggtcttgcccctctggagtgacacccaggtgtacttagatggagacgggggcttcagcgtgacgtctggtgggcaaagccggatcttcaagcccatctccatccagaccatgtgggccacactccaggtattgcaccaagcatgtgaggcagctctaggcagcggccttgtaccgggtggcagtgccctcacctgggccagccactaccaggagagactgaactccgaacagagctgcctcaatgagtggacggctatggccgacctggagtctctgcggcctcccagcgccgagcctggcgggtcctcagaacaggagcagatggagcaggcgatccgtgctgagctgtggaaagtgttggatgtcagtgacctggagagtgtcacttccaaagagatccgccaggctctggagctgcgcctggggctccccctccagcagtaccgtgacttcatcgacaaccagatgctgctgctggtggcacagcgggaccgagcctcccgcatcttcccccacctctacctgggctcagagtggaacgcagcaaacctggaggagctgcagaggaacagggtcacccacatcttgaacatggcccgggagattgacaacttctaccctgagcgcttcacctaccacaatgtgcgcctctgggatgaggagtcggcccagctgctgccgcactggaaggagacgcaccgcttcattgaggctgcaagagcacagggcacccacgtgctggtccactgcaagatgggcgtcagccgctcagcggccacagtgctggcctatgccatgaagcagtacgaatgcagcctggagcaggccctgcgccacgtgcaggagctccggcccatcgcccgccccaaccctggcttcctgcgccagctgcagatctaccagggcatcctgacggccagccgccagagccatgtctgggagcagaaagtgggtggggtctccccagaggagcacccagcccctgaagtctctacaccattcccacctcttccgccagaacctgagggtggtggggaggagaaggttgtaggcatggaagagagccaggcagccccgaaagaagagcctgggccacggccacgtataaacctccgaggggtcatgaggtccatcagtcttctggagccctccttggagctggagagcacctcagagaccagtgacatgccagaggtcttctcttcccacgagtcttcacatgaagagcctctgcagcccttcccacagcttgcaaggaccaagggaggccagcaggtggacagggggcctcagcctgccctgaagtcccgccagtcagtggttaccctccagggcagtgccgtggtggccaaccggacccaggccttccaggagcaggagcaggggcaggggcaggggcagggagagccctgcatttcctctacgcccaggttccggaaggtggtgagacaggccagcgtgcatgacagtggagaggagggcgaggcctgagccctcacacatgcccacgctcccctgacactgaagaggatccacaactccttggagaaacaccctcacgtctgttgccgcacacattcctctcagctccgccccatacccgtcactacagcctcacctcccacccctgtcactacggcctcacctcccacccctgtcactacagcctcacctcctacagccttaagtcccaggcccatgtctgcctgtccaagggctcaagactttctaactgggatgtggtagagggactgaaggtacctttgggggcaacagcaccctagtttcattctcaactctagccctgcacactcacctgtggcacggaatgaaaacagagcttcccgtgcaaaaagggtcacgcctcccacccccgccccctccctgcacctcctgtcctctcccagttcattcctggaaccagccaggccaggcaaccagtggcccccaaaggcaggcaggatcctcaggccccagccgcgggaggctggaagggctggcagatcgcttccctcatccacctccaccggtccaggtctttgctgctgtccccagacctcctgtgacaccacgccagatcacagggcaccaggccagagatagtcttctttttgtcctttctggcctctggctagtcagtttttcatagccttacagtatctggctttgtactgagaaataaaacacattttcatatttggtta

SEQ ID NO: 182023 - DNA, 2990 bp, Homo sapiens
  Payload ID: 15842
  Gene Symbol: SSH3
  Gene Name: slingshot protein phosphatase 3
  Uniprot ID: Q8TE77
  ENST ID: ENST00000376757
  CDS Start-End: 731-2272
gtctggccctttaagggccgcccccgaggaggtgccaggcccgggtggcgccgtccgtccttcctggtcctgcgggtccaggactgtccgcggggttgagggaaggggccgtgcccggtgccagcccaggtgctcgcggcctggctccatggccctggtcacagtgagccgttcgcccccgggcagcggcgcctccacgcccgtggggccctggaattcctgagagaggggaggggacagccctccccgccctcaccctgccctggggctgctctctccgcaggaccaggcggtccagcgaaggagtcgactccagcgaagagctttgcggtgctccgtggggctgtcctgggactgcaggatggaggggacaatgatgatgcagcagaggccagttctgagccaacagagaaggccccgagtgaggaggagctccacggggaccagacagacttcgggcaaggatcccagagtccccagaagcaggaggagcagaggcagcacctgcacctcatggtacagctgctgaggccgcaggatgacatccgcctggcagcccagctggaggcaccccggcctccccggctccgctacctgctggtagtttctacacgagaaggagaaggtctgagccaggatgagacggtcctcctgggcgtggatttccctgacagcaggttcgagcagggagaggaaaggaggggcaaagaggtgagggacaggggggacaatggctttccctctgtcccctgccagctcccccagctgcaccctgggcctggtcttgcccctctggagtgacacccaggtgtacttagatggagacgggggcttcagcgtgacgtctggtgggcaaagccggatcttcaagcccatctccatccagaccatgtgggccacactccaggtattgcaccaagcatgtgaggcagctctaggcagcggccttgtaccgggtggcagtgccctcacctgggccagccactaccaggagagactgaactccgaacagagctgcctcaatgagtggacggctatggccgacctggagtctctgcggcctcccagcgccgagcctggcgggtcctcagaacaggagcagatggagcaggcgatccgtgctgagctgtggaaagtgttggatgtcagtgacctggagagtgtcacttccaaagagatccgccaggctctggagctgcgcctggggctccccctccagcagtaccgtgacttcatcgacaaccagatgctgctgctggtggcacagcgggaccgagcctcccgcatcttcccccacctctacctgggctcagagtggaacgcagcaaacctggaggagctgcagaggaacagggtcacccacatcttgaacatggcccgggagattgacaacttctaccctgagcgcttcacctaccacaatgtgcgcctctgggatgaggagtcggcccagctgctgccgcactggaaggagacgcaccgcttcattgaggctgcaagagcacagggcacccacgtgctggtccactgcaagatgggcgtcagccgctcagcggccacagtgctggcctatgccatgaagcagtacgaatgcagcctggagcaggccctgcgccacgtgcaggagctccggcccatcgcccgccccaaccctggcttcctgcgccagctgcagatctaccagggcatcctgacggccagccgccagagccatgtctgggagcagaaagtgggtggggtctccccagaggagcacccagcccctgaagtctctacaccattcccacctcttccgccagaacctgagggtggtggggaggagaaggttgtaggcatggaagagagccaggcagccccgaaagaagagcctgggccacggccacgtataaacctccgaggggtcatgaggtccatcagtcttctggagccctccttggagctggagagcacctcagagaccagtgacatgccagaggtcttctcttcccacgagtcttcacatgaagagcctctgcagcccttcccacagcttgcaaggaccaagggaggccagcaggtggacagggggcctcagcctgccctgaagtcccgccagtcagtggttaccctccagggcagtgccgtggtggccaaccggacccaggccttccaggagcaggagcaggggcaggggcaggggcagggagagccctgcatttcctctacgcccaggttccggaaggtggtgagacaggccagcgtgcatgacagtggagaggagggcgaggcctgagccctcacacatgcccacgctcccctgacactgaagaggatccacaactccttggagaaacaccctcacgtctgttgccgcacacattcctctcagctccgccccatacccgtcactacagcctcacctcccacccctgtcactacggcctcacctcccacccctgtcactacagcctcacctcctacagccttaagtcccaggcccatgtctgcctgtccaagggctcaagactttctaactgggatgtggtagagggactgaaggtacctttgggggcaacagcaccctagtttcattctcaactctagccctgcacactcacctgtggcacggaatgaaaacagagcttcccgtgcaaaaagggtcacgcctcccacccccgccccctccctgcacctcctgtcctctcccagttcattcctggaaccagccaggccaggcaaccagtggcccccaaaggcaggcaggatcctcaggccccagccgcgggaggctggaagggctggcagatcgcttccctcatccacctccaccggtccaggtctttgctgctgtccccagacctcctgtgacaccacgccagatcacagggcaccaggccagagatagtcttctttttgtcctttctggcctctggctagtcagtttttcatagccttacagtatctggctttgtactgagaaataaaacacattttcatatttggttattttc

SEQ ID NO: 182024 - DNA, 2587 bp, Homo sapiens
  Payload ID: 15842
  Gene Symbol: SSH3
  Gene Name: slingshot protein phosphatase 3
  Uniprot ID: Q8TE77
  ENST ID: ENST00000532881
  CDS Start-End: 1-1416
atggccctggtcacagtgagccgttcgcccccgggcagcggcgcctccacgcccgtggggccctgggaccaggcggtccagcgaaggagtcgactccagcgaaggcagagctttgcggtgctccgtggggctgtcctgggactgcaggatggaggggacaatgatgatgcagcagaggccagttctgagccaacagagaaggccccgagtgaggaggagctccacggggaccagacagacttcgggcaaggatcccagagtccccagaagcaggaggagcagaggcagcacctgcacctcatggtacagctgctgaggccgcaggatgacatccgcctggcagcccagctggaggcaccccggcctccccggctccgctacctgctggtagtttctacacgagaaggagaaggtctgagccaggatgagacggtcctcctgggcgtggatttccctgacagcagctcccccagctgcaccctgggcctggtcttgcccctctggagtgacacccaggtgtacttagatggagacgggggcttcagcgtgacgtctggtgggcaaagccggatcttcaagcccatctccatccagaccatgtgggccacactccaggtattgcaccaagcatgtgaggcagctctaggcagcggccttgtaccgggtggcagtgccctcacctgggccagccactaccaggagagactgaactccgaacagagctgcctcaatgagtggacggctatggccgacctggagtctctgcggcctcccagcgccgagcctggcgggtcctcagaacaggagcagatggagcaggcgatccgtgctgagctgtggaaagtgttggatgtcagtgacctggagagtgtcacttccaaagagatccgccaggctctggagctgcgcctggggctccccctccagcagtaccgtgacttcatcgacaaccagatgctgctgctggtggcacagcgggaccgagcctcccgcatcttcccccacctctacctgggctcagagtggaacgcagcaaacctggaggagctgcagaggaacagggtcacccacatcttgaacatggcccgggagattgacaacttctaccctgagcgcttcacctaccacaatgtgcgcctctgggatgaggagtcggcccagctgctgccgcactggaaggagacgcaccgcttcattgaggctgcaagagcacagggcacccacgtgctggtccactgcaagatgggcgtcagccgctcagcggccacagtgctggcctatgccatgaagcagtacgaatgcagcctggagcaggccctgcgccacgtgcaggagctccggcccatcgcccgccccaaccctggcttcctgcgccagctgcagatctaccagggcatcctgacggccagaacctgagggtggtggggaggagaaggttgtaggcatggaagagagccaggcagccccgaaagaagagcctgggccacggccacgtataaacctccgaggggtcatgaggtccatcagtcttctggagccctccttggagctggagagcacctcagagaccagtgacatgccagaggtcttctcttcccacgagtcttcacatgaagagcctctgcagcccttcccacagcttgcaaggaccaagggaggccagcaggtggacagggggcctcagcctgccctgaagtcccgccagtcagtggttaccctccagggcagtgccgtggtggccaaccggacccaggccttccaggagcaggagcaggggcaggggcaggggcagggagagccctgcatttcctctacgcccaggttccggaaggtggtgagacaggccagcgtgcatgacagtggagaggagggcgaggcctgagccctcacacatgcccacgctcccctgacactgaagaggatccacaactccttggagaaacaccctcacgtctgttgccgcacacattcctctcagctccgccccatacccgtcactacagcctcacctcccacccctgtcactacggcctcacctcccacccctgtcactacagcctcacctcctacagccttaagtcccaggcccatgtctgcctgtccaagggctcaagactttctaactgggatgtggtagagggactgaaggtacctttgggggcaacagcaccctagtttcattctcaactctagccctgcacactcacctgtggcacggaatgaaaacagagcttcccgtgcaaaaagggtcacgcctcccacccccgccccctccctgcacctcctgtcctctcccagttcattcctggaaccagccaggccaggcaaccagtggcccccaaaggcaggcaggatcctcaggccccagccgcgggaggctggaagggctggcagatcgcttccctcatccacctccaccggtccaggtctttgctgctgtccccagacctcctgtgacaccacgccagatcacagggcaccaggccagagatagtcttctttttgtcctttctggcctctggctagtcagtttttcatagccttacagtatctggctttgtactgagaaataaaacacattttcata

SEQ ID NO: 182025 - DNA, 555 bp, Homo sapiens
  Payload ID: 15842
  Gene Symbol: SSH3
  Gene Name: slingshot protein phosphatase 3
  ENST ID: ENST00000532600
  CDS Start-End: 97-222
gtccgtccttcctggtcctgcgggtccaggactgtccgcggggttgagggaaggggccgtgcccggtgccagcccaggtgctcgcggcctggctccatggccctggtcacagtgagccgttcgcccccgggcagcggcgcctccacgcccgtggggccctgggcagagctttgcggtgctccgtggggctgtcctgggactgcaggatggaggggacaatgatgatgcagcagaggccagttctgagccaacagagaaggccccgagtgaggaggagctccacggggaccagacagacttcgggcaaggatcccagagtccccagaagcaggaggagcagaggcagcacctgcacctcatggtacagctgctgaggccgcaggatgacatccgcctggcagcccagctggaggcaccccggcctccccggctccgctacctgctggtagtttctacacgagaaggagaaggtctgagccaggatgagacggtcctcctgggcgtggatttccctgacagcagctcccccagctgcaccctgggcctggtcttgcc

SEQ ID NO: 182026 - DNA, 656 bp, Homo sapiens
  Payload ID: 15842
  Gene Symbol: SSH3
  Gene Name: slingshot protein phosphatase 3
  ENST ID: ENST00000527821
  CDS Start-End: 1-656
ctccgaacagagctgcctcaatgagtggacggctatggccgacctggagtctctgcggcctcccagcgccgagcctggcgggtcctcagaacaggagcagatggagcaggcgatccgtgctgagctgtggaaagtgttggatgtcagtgacctggagagtgtcacttccaaagagatccgccaggctctggagctgcgcctggggctccccctccagcagtaccgtgacttcatcgacaaccagatgctgctgctggtggcacagcgggaccgagcctcccgcatcttcccccacctctacctgggctcagagtggaacgcagcaaacctggaggagctgcagaggaacagagcacagggcacccacgtgctggtccactgcaagatgggcgtcagccgctcagcggccacagtgctggcctatgccatgaagcagtacgaatgcagcctggagcaggccctgcgccacgtgcaggagctccggcccatcgcccgccccaaccctggcttcctgcgccagctgcagatctaccagggcatcctgacggccagccgccagagccatgtctgggagcagaaagtgggtggggtctccccagaggagcacccagcccctgaagtctctacaccattcccacctcttccgccagaacctg

SEQ ID NO: 182027 - DNA, 948 bp, Homo sapiens
  Payload ID: 15842
  Gene Symbol: SSH3
  Gene Name: slingshot protein phosphatase 3
  ENST ID: ENST00000532181
  CDS Start-End: 1-948
ggcggtccagcgaaggagtcgactccagcgaaggcagagctttgcggtgctccgtggggctgtcctgggactgcaggatggaggggacaatgatgatgcagcagaggccagttctgagccaacagagaaggccccgagtgaggaggagctccacggggaccagacagacttcgggcaaggatcccagagtccccagaagcaggaggagcagaggcagcacctgcacctcatggtacagctgctgaggccgcaggatgacatccgcctggcagcccagctggaggcaccccggcctccccggctccgctacctgctggtagtttctacacgagaaggagaaggtctgagccaggatgagacggtcctcctgggcgtggatttccctgacagcagctcccccagctgcaccctgggcctggtcttgcccctctggagtgacacccaggtgtacttagatggagacgggggcttcagcgtgacgtctggtgggcaaagccggatcttcaagcccatctccatccagaccatgtggtcctcagaacaggagcagatggagcaggcgatccgtgctgagctgtggaaagtgttggatgtcagtgacctggagagtgtcacttccaaagagatccgccaggctctggagctgcgcctggggctccccctccagcagtaccgtgacttcatcgacaaccagatgctgctgctggtggcacagcgggaccgagcctcccgcatcttcccccacctctacctgggctcagagtggaacgcagcaaacctggaggagctgcagaggaacagggtcacccacatcttgaacatggcccgggagattgacaacttctaccctgagcgcttcacctaccacaatgtgcgcctctgggatgaggagtcggcccagctgctgccgcactggaaggagacgcaccgcttcattgaggctgcaag

SEQ ID NO: 182028 - DNA, 5189 bp, Homo sapiens
  Payload ID: 15843
  Gene Symbol: SLITRK1
  Gene Name: SLIT and NTRK-like family, member 1
  Uniprot ID: Q96PX8
  ENST ID: ENST00000377084
  CDS Start-End: 887-2977
cgcgctctcttcctccctcagacaactcgccccccgccctccgcccccctccacgtaattccgaaagagcagaagaaagagaaggagaacaggaaaagaagagctagtaagcgagagcgagagcacagaaaagaaaaaaaaaagccttaagaggaccgaaggggaggaaaggaaaaggatggacaaccacaaaacgcagcgattgcggaaattttccagcgccattggctgggcagcgtgagtccttcggtcgggcgtgatttcagcaccgggggaactggacagcacctcggggggacttctgggcaacccgcaaccacagcaagaactccaccagcagcctcaacaacagaagccgcggaaaaccctgctttgtatcagagaggcaaggtcagtccgacgcacagccatgcacaggcagtgcgcctgtactacgctgcaaaccctctgcttgtttctctaacatgcacttgcttctaattactagcattgtttcatttctgatcagtgaagatcagtagatgagattctgtaagggtgtacttttaatttatatgtatatatttaacttctttttctgttatttttaaagtgttgtgggggagtggggtttttttcctacttttttttttttttttttttctttgcttgccttgcactacgtgcctggatagtttgtggatataattattgactggcgtctgggctattgcagtgcgggggggttagggaggaaggaatccacccccacccccccaaacccttttcttctcctttcctggcttcggacattggagcactaaatgaacttgaattgtgtctgtggcgagcaggatggtcgctgttactttgtgatgagatcggggatgaattgctcgctttaaaaatgctgctttggattctgttgctggagacgtctctttgttttgccgctggaaacgttacaggggacgtttgcaaagagaagatctgttcctgcaatgagatagaaggggacctacacgtagactgtgaaaaaaagggcttcacaagtctgcagcgtttcactgccccgacttcccagttttaccatttatttctgcatggcaattccctcactcgacttttccctaatgagttcgctaacttttataatgcggttagtttgcacatggaaaacaatggcttgcatgaaatcgttccgggggcttttctggggctgcagctggtgaaaaggctgcacatcaacaacaacaagatcaagtcttttcgaaagcagacttttctggggctggacgatctggaatatctccaggctgattttaatttattacgagatatagacccgggggccttccaggacttgaacaagctggaggtgctcattttaaatgacaatctcatcagcaccctacctgccaacgtgttccagtatgtgcccatcacccacctcgacctccggggtaacaggctgaaaacgctgccctatgaggaggtcttggagcaaatccctggtattgcggagatcctgctagaggataacccttgggactgcacctgtgatctgctctccctgaaagaatggctggaaaacattcccaagaatgccctgatcggccgagtggtctgcgaagcccccaccagactgcagggtaaagacctcaatgaaaccaccgaacaggacttgtgtcctttgaaaaaccgagtggattctagtctcccggcgccccctgcccaagaagagacctttgctcctggacccctgccaactcctttcaagacaaatgggcaagaggatcatgccacaccagggtctgctccaaacggaggtacaaagatcccaggcaactggcagatcaaaatcagacccacagcagcgatagcgacgggtagctccaggaacaaacccttagctaacagtttaccctgccctgggggctgcagctgcgaccacatcccagggtcgggtttaaagatgaactgcaacaacaggaacgtgagcagcttggctgatttgaagcccaagctctctaacgtgcaggagcttttcctacgagataacaagatccacagcatccgaaaatcgcactttgtggattacaagaacctcattctgttggatctgggcaacaataacatcgctactgtagagaacaacactttcaagaaccttttggacctcaggtggctatacatggatagcaattacctggacacgctgtcccgggagaaattcgcggggctgcaaaacctagagtacctgaacgtggagtacaacgctatccagctcatcctcccgggcactttcaatgccatgcccaaactgaggatcctcattctcaacaacaacctgctgaggtccctgcctgtggacgtgttcgctggggtctcgctctctaaactcagcctgcacaacaattacttcatgtacctcccggtggcaggggtgctggaccagttaacctccatcatccagatagacctccacggaaacccctgggagtgctcctgcacaattgtgcctttcaagcagtgggcagaacgcttgggttccgaagtgctgatgagcgacctcaagtgtgagacgccggtgaacttctttagaaaggatttcatgctcctctccaatgacgagatctgccctcagctgtacgctaggatctcgcccacgttaacttcgcacagtaaaaacagcactgggttggcggagaccgggacgcactccaactcctacctagacaccagcagggtgtccatctcggtgttggtcccgggactgctgctggtgtttgtcacctccgccttcaccgtggtgggcatgctcgtgtttatcctgaggaaccgaaagcggtccaagagacgagatgccaactcctccgcgtccgagattaattccctacagacagtctgtgactcttcctactggcacaatgggccttacaacgcagatggggcccacagagtgtatgactgtggctctcactcgctctcagactaagaccccaaccccaataggggagggcagagggaaggcgatacatccttccccaccgcaggcaccccgggggctggaggggcgtgtacccaaatccccgcgccatcagcctggatgggcataagtagataaataactgtgagctcgcacaaccgaaagggcctgaccccttacttagctccctccttgaaacaaagagcagactgtggagagctgggagagcgcagccagctcgctctttgctgagagccccttttgacagaaagcccagcacgaccctgctggaagaactgacagtgccctcgccctcggccccggggcctgtggggttggatgccgcggttctatacatatatacatatatccacatctatatagagagatagatatctatttttcccctgtggattagccccgtgatggctccctgttggctacgcagggatgggcagttgcacgaaggcatgaatgtattgtaaataagtaactttgacttctgacaaaaaacaaaaagtgctgcatggctcgcatggaatccacgcgctccagggactctgcccgcccccgcgactggagacggcatctcgttcacagcacccaccctcttacctgataagttccatcgtatcaaactttctataaacaaaatacagtataatcagaaagtgccatttcgccattatttgtgatcggtaggcagttcagagcataagttaactgtgaaaaaaatgtaaaggttttatttaggacatttgcatggctagtcatcagtccattttatgagttaacaatgtattttgttgagggaagtttttaggggttgttttgggttcttttattttgatggtgatgttttattttattttatttttttcagggggtcttttttttaatacatatccaataatgccttccatctgaatgtaaaataagtacccatgatttctattatagtatcagtgtaattatttaaaaaatgattttgaggcagttaagcatgaccaattaatgtcactctagtgcttaggctgcgatcctatggtagcaattctgtgctggtataaatcttacttataaagtaggaaaagagaaccgaggaagcacgtgaaacttactaattctattcgaggattttataatggcatattttttcagtattaaagcgaaaatgttttcaactctgggtccttacctttttccagcttcatatttgcaagtggtaaattggatttgcggtggaagagacaggggagggaaacggttggggttagatcccttcctgagctacattaaggctctttctctaatcgccttacttagctttttaccctttaagtagctcctcttccctcgcccccaccctctaccccacccccaccttcgctcagactttaccggctttccccagtccataaaggtcttgccccaacactcaccccttctttttttcccctctccaaatgcagcagtgaatccctttattaatactggaaatccctctctgctgcttttgttggtgctgcccacactgcagatatattaaggatgttaggagagatttgatttaattgactctgcctagataggtctcattaaacagagtggagatttcattggtcagcactcctcaatgaaagacagacctaatgactggcatttgagatgctgctggcattttgaattcaacatctgctgaaaacggtaaaactaattagtgcccacccaccctccccgccccagcaactgcatattgaaatttgttaaagcactcatctttatggaaattaatcattatcctaaagaagtgtttctctcccatcatccggatttctggttgtggcccagcaattaacaaaaacagcttcaactgttcgaattttatgaaccaatgtaactctggcctcaatcatattcctctgggatttctaaacagcagttaagctacaaaaagcaaacaaaaccacacatattgatggagtctgcattccaccacatatccacccttgagaagtatgtcaaaagactgcagactatagatttttttttaatataggattataaatcagctagtgaaagacctcagagcagttgtaagtagatctgccatctagaactcatattctaaagggaagtgatttctcagaacagtgatgttctggaatatgtattatttattttaacacttttttaataaaatctttattataaaccatga

SEQ ID NO: 182029 - DNA, 3159 bp, Homo sapiens
  Payload ID: 15844
  Gene Symbol: SLITRK2
  Gene Name: SLIT and NTRK-like family, member 2
  ENST ID: ENST00000335565
  CDS Start-End: 988-3159
cttcctgcaagaagcgttgcccgttggctagctgctcggtggggatctgcctgccctgggggcgccgcccgcgctccccgcggtgctctcgctcctgggctgcgccagtccgaggcggtgccggctcctttgcctccccgagtcgcagatgctgcgggcgcctccgggaaaagatctgggcggcgcgctcgctcgatggacacaggaagatccagaagctagtggcacatctagcaacagagccagatcagaacccaggttggaggtggagtagttcagaatcaactgacgcagccgggaattgagctttgcaaagccacttgcaaggaagggaagcatctgcccaaccctcccccaccgcgcgccctggatcctctgcctgccccctcccccgtgacgtcaccctagtcctgtcccggggagcctgcaaagcctctcagattcaaactgctagacgcactgctgccaccgccaccgaattggaaacgcgcgcccaggctccgtcgtcgccttcgcccgccgaccgggccagccggctctccgacctccctacagaatcgcaccccagtccctccctggcagctcggcttccctcagctccaactcttctcttccgctcctgcctcctgtcggatttttaatttctgcgcacccccagtcaaattaaatcaaccaacaaaaagcagggcatcccccctggaagcagcgtcttattttaccttgttctcccacttcctgaagatgctaaactcctggtggactgcagaggagagggattcagtcttctcctgatgtcgattgcgatttctgctgggagctcaagacgggcgagctgcccgagatctcttcgagataccccaggggaggaggagatgggcaggatttagtaggacaactcggttactaatgacttggcggctggctgcgaccccccgggaaatcaggtttgcctgtaggtacctgagttgacaccgaaggtgcctaaagatgctgagcggcgtttggttcctcagtgtgttaaccgtggccgggatcttacagacagagagtcgcaaaactgccaaagacatttgcaagatccgctgtctgtgcgaagaaaaggaaaacgtactgaatatcaactgtgagaacaaaggatttacaacagttagcctgctccagcccccccagtatcgaatctatcagctttttctcaatggaaacctcttgacaagactgtatccaaacgaatttgtcaattactccaacgcggtgactcttcacctaggtaacaacgggttacaggagatccgaacgggggcattcagtggcctgaaaactctcaaaagactgcatctcaacaacaacaagcttgagatattgagggaggacaccttcctaggcctggagagcctggagtatctccaggccgactacaattacatcagtgccatcgaggctggggcattcagcaaacttaacaagctcaaagtgctcatcctgaatgacaaccttctgctttcactgcccagcaatgtgttccgctttgtcctgctgacccacttagacctcagggggaataggctaaaagtaatgccttttgctggcgtccttgaacatattggagggatcatggagattcagctggaggaaaatccatggaattgcacttgtgacttacttcctctcaaggcctggctagacaccataactgtttttgtgggagagattgtctgtgagactccctttaggttgcatgggaaagacgtgacccagctgaccaggcaagacctctgtcccagaaaaagtgccagtgattccagtcagaggggcagccatgctgacacccacgtccaaaggctgtcacctacaatgaatcctgctctcaacccaaccagggctccgaaagccagccggccgcccaaaatgagaaatcgtccaactcctcgagtgactgtgtcaaaggacaggcaaagttttggacccatcatggtgtaccagaccaagtctcctgtgcctctcacctgtcccagcagctgtgtctgcacctctcagagctcagacaatggtctgaatgtaaactgccaagaaaggaagttcactaatatctctgacctgcagcccaaaccgaccagtccaaagaaactctacctaacagggaactatcttcaaactgtctataagaatgacctcttagaatacagttctttggacttactgcacttaggaaacaacaggattgcagtcattcaggaaggtgcctttacaaacctgaccagtttacgcagactttatctgaatggcaattaccttgaagtgctgtacccttctatgtttgatggactgcagagcttgcaatatctctatttagagtataatgtcattaaggaaattaagcctctgacctttgatgctttgattaacctacagctactgtttctgaacaacaaccttcttcggtccttacctgataatatatttggggggacggccctaaccaggctgaatctgagaaacaaccatttttctcacctgcccgtgaaaggggttctggatcagctcccggctttcatccagatagatctgcaggagaacccctgggactgtacctgtgacatcatggggctgaaagactggacagaacatgccaattcccctgtcatcattaatgaggtgacttgcgaatctcctgctaagcatgcaggggagatactaaaatttctggggagggaggctatctgtccagacagcccaaacttgtcagatggaaccgtcttgtcaatgaatcacaatacagacacacctcggtcgcttagtgtgtctcctagttcctatcctgaactacacactgaagttccactgtctgtcttaattctgggattgcttgttgttttcatcttatctgtctgttttggggctggtttattcgtctttgtcttgaaacgccgaaagggagtgccgagcgttcccaggaataccaacaacttagacgtaagctcctttcaattacagtatgggtcttacaacactgagactcacgataaaacagacggccatgtctacaactatatccccccacctgtgggtcagatgtgccaaaaccccatctacatgcagaaggaaggagacccagtagcctattaccgaaacctgcaagagttcagctatagcaacctggag

SEQ ID NO: 182030 - DNA, 7672 bp, Homo sapiens
  Payload ID: 15844
  Gene Symbol: SLITRK2
  Gene Name: SLIT and NTRK-like family, member 2
  Uniprot ID: Q9H156
  ENST ID: ENST00000370490
  CDS Start-End: 4256-6793
gcggccgccctctaccctcaatccccactggagattcctcaccccgggaccgtccgcgcgggcgtggtcgggctccgcgcctcgcgcagcggggtggcacaggcggccagggagggcccacgcacccggcgcgagctagaagcctccggtcggcctgcagtgcccaagtcccatggcgagggcagcccgagtggccgtcgcggctgtaggtccgcatgccgggcaccgcaccaggcgtctagcaggtaggggcagggaaggtagggctgcgctggcggccggtgcccagttaccggcgatcggggacgctcggagacacctggtctcccggaagcgcccttcggaaatgggattcgacccggcttgcgggcggcgggtgtttagaagaagaggctgcgggcaagcagtgccccctctctggttccccggactcctcttagccccctcgtggcctgatgggcggccgggacggaggtgggctgtaagcccgccggcacccaccgtgtcctgtggaaggcttggagacctgagccaggctctactcggttagatgcgagtgagacaggcgacggagttcgtctttaagcctcccttgcctcagcaaggagagggagcgttttccttattttaatgaccgcctttccctcccttggggtcccagttcaccctgaacctttccacagccttaaaagcccgctctccctagcggagtgctgcggcagttcttcagaagacacggggccaaatgaaacttacttaaagtggttatcgcgtttcaggctgatttgttcctagtaactacgttttggaaagcagctgtggactctcaaggacaggcaggaacgaagacctccttagggtccgagtgtcgcttcccacagttagattacccatgaatttccttgattctgtaggtctcaagaatctcatgagcccccaaccacctccacctttctctctgaatctctctcctgtctctgaaattcttcgcaaaaataatctgtcctcaaggaatattgaaagcgtcatcaatgtcttgaaggaaattactgtatctgagaaccgaaactagtatttgatgtttcactttcaaatacatttttttttaataaaaaggatacctttaagtaaaacactaccactgctatttacgtttaagtagatttttaattcatattaagcagtagtgtgctttttggaaagatgatggactgggactcataatccctgggttttgtttctatttgtagtttcttgagtaagtcagcactttccctggttaagaaatgacctcatctgtaaaatgaacctgacttctaaggtcttgttcggctctcacgtctttacttcagttaaatattgacataatacatgtttgttgaatgaatgactgaatgaataaatcttattgctctaggaactatgtgcttttaacctttggaaatacatagaaacaaatgcctcctttgctaggaaagggagcttaattgtgctcccactgcatcagactgcttccatctaatgatgcaattgcaatacagggtgggaggccatccacagggctgtccctctgcctcagagctcatctcaagtttgcccttctctatggagaaggaaaatttgagtctccagaaggaaagtattttgctaaacgccaagcaagaattagagggtaagggggcttctgatgcctggtccaaggctcttagaagaagaagaaggagaaagggagaaagctcaagaaaataatgcacagatcaccagctacaggtggccctagtgcctaagtttataaactacccccgcccttcccggagagaaaggagcttgtataaagggaacaatcctagaacctaggcttaacaaggaaggagaaggggagaagcaagggtcattctgttctcaagtggtttgttgtatctgtgtgtttatctattccacatttggccaggcagtgggactccgggaaagcaagctgaagtgttttgtgggacaggcacatcatttggtcaactccttttccctggttgattccctccttttcctgacccatctcccccttcctaccagaggcaaccaaggcctttccaggcaacagcagacattatttaccccttgcgaattgattccacaatggaagactcttgggtccaaggagctgtaagataattaaggagaaaacagataatgaaggcaaaaatccaacacctggccattagcaatgctctggaaaggctatttaaacccgcattggatatcagagctgggagggcccatacagtctacctacctgccttttgcagatggacacaggaagatccagaagctagtggcacatctagcaacagagccagatcagaacccaggtaagctcggtctcaggccaggattccttttccatctcctctctttctcaggagccagtcttcctgcaccagcttcctcttttctcctagctcccctgcccctgcagcctggagggctcaaccacccttcctttggctcccactcccagctgaggctcagcctggcagtgcttttctgacacccacttcttttctccttcctccaggcaagaagtgcacgtttaaacctcattatctggctaagtataaacctcagggagaaaaggggtttgtttttgtttttctcagtctataagctaacattgagctgactttcagagtccaggcaaatatgtttggtgggtcaccacccagaaaggaattctcttagcactgaatcagggctctgtatgtaaagtataaatcccctaagagaactcctcaccctcctacacagacacattggtgcatgcacacacaccccactctctgcacagagagcatctgagctaggagctggcaagtggggcaccagtcctgtagcaaagaggcacaccacacacacacacacacacacacacacacactctctctctctctctctctcactcacacacacacacacacacacacacacacgcttctcccttgcttgggaatctgggagaagaaccccccacccccacccctgccctccataggcattgtgtaggtgagagaaagagggaggagtgagagagaacacacagaggggcccaaggaggtgccaggccattagcagggcccctccttgagaaacccctctgcaggagcttctcctgccgccagccaggttggaggtggagtagttcagaatcaactgacgcagccgggaattgagctttgcaaagccacttgcaaggaagggaagcatctgcccaaccctcccccaccgcgcgccctggatcctctgcctgccccctcccccgtgacgtcaccctagtcctgtcccggggagcctgcaaagcctctcagattcaaactgctagacgcactgctgccaccgccaccgaattggaaacgcgcgcccaggctccgtcgtcgccttcgcccgccgaccgggccagccggctctccgacctccctacagaatcgcaccccagtccctccctggcagctcggcttccctcagctccaactcttctcttccgctcctgcctcctgtcggatttttaatttctgcgcacccccagtcaaattaaatcaaccaacaaaaagcagggcatcccccctggaagcagcgtcttattttaccttgttctcccacttcctgaagatgctaaactcctggtggactgcagaggagagggattcagtcttctcctgatgtgtgagtaacccccacctcgcactgtctttcccatctctatctctcctctacacctgccgccagccccctgattcctgattttcccaccccctttttgcgctttttttttttttcctaaagcgattgcgatttctgctgggagctcaagacgggcgagctgcccgagatctcttcgagataccccaggggaggaggagatgggcaggatttagtaggacaactcggttactaatgacttggcggctggctgcgaccccccgggaaatcaggtgcaagcatgtgtgttcccggggcgcgtgtgtgggtggcctcgggatgggggaatagggagcggagaaaagaaaccgctttggaaaatgcaatgatttcattctgccgtgttgctaaccccctcattctccctcgctcccactccgcctccttgctttaccatttttaatcgggcttccttgtttctttcttccctgcacccgcttcttccccctgcccccacctaaggtttgcctgtaggtacctgagttgacaccgaaggtgcctaaagatgctgagcggcgtttggttcctcagtgtgttaaccgtggccgggatcttacagacagagagtcgcaaaactgccaaagacatttgcaagatccgctgtctgtgcgaagaaaaggaaaacgtactgaatatcaactgtgagaacaaaggatttacaacagttagcctgctccagcccccccagtatcgaatctatcagctttttctcaatggaaacctcttgacaagactgtatccaaacgaatttgtcaattactccaacgcggtgactcttcacctaggtaacaacgggttacaggagatccgaacgggggcattcagtggcctgaaaactctcaaaagactgcatctcaacaacaacaagcttgagatattgagggaggacaccttcctaggcctggagagcctggagtatctccaggccgactacaattacatcagtgccatcgaggctggggcattcagcaaacttaacaagctcaaagtgctcatcctgaatgacaaccttctgctttcactgcccagcaatgtgttccgctttgtcctgctgacccacttagacctcagggggaataggctaaaagtaatgccttttgctggcgtccttgaacatattggagggatcatggagattcagctggaggaaaatccatggaattgcacttgtgacttacttcctctcaaggcctggctagacaccataactgtttttgtgggagagattgtctgtgagactccctttaggttgcatgggaaagacgtgacccagctgaccaggcaagacctctgtcccagaaaaagtgccagtgattccagtcagaggggcagccatgctgacacccacgtccaaaggctgtcacctacaatgaatcctgctctcaacccaaccagggctccgaaagccagccggccgcccaaaatgagaaatcgtccaactcctcgagtgactgtgtcaaaggacaggcaaagttttggacccatcatggtgtaccagaccaagtctcctgtgcctctcacctgtcccagcagctgtgtctgcacctctcagagctcagacaatggtctgaatgtaaactgccaagaaaggaagttcactaatatctctgacctgcagcccaaaccgaccagtccaaagaaactctacctaacagggaactatcttcaaactgtctataagaatgacctcttagaatacagttctttggacttactgcacttaggaaacaacaggattgcagtcattcaggaaggtgcctttacaaacctgaccagtttacgcagactttatctgaatggcaattaccttgaagtgctgtacccttctatgtttgatggactgcagagcttgcaatatctctatttagagtataatgtcattaaggaaattaagcctctgacctttgatgctttgattaacctacagctactgtttctgaacaacaaccttcttcggtccttacctgataatatatttggggggacggccctaaccaggctgaatctgagaaacaaccatttttctcacctgcccgtgaaaggggttctggatcagctcccggctttcatccagatagatctgcaggagaacccctgggactgtacctgtgacatcatggggctgaaagactggacagaacatgccaattcccctgtcatcattaatgaggtgacttgcgaatctcctgctaagcatgcaggggagatactaaaatttctggggagggaggctatctgtccagacagcccaaacttgtcagatggaaccgtcttgtcaatgaatcacaatacagacacacctcggtcgcttagtgtgtctcctagttcctatcctgaactacacactgaagttccactgtctgtcttaattctgggattgcttgttgttttcatcttatctgtctgttttggggctggtttattcgtctttgtcttgaaacgccgaaagggagtgccgagcgttcccaggaataccaacaacttagacgtaagctcctttcaattacagtatgggtcttacaacactgagactcacgataaaacagacggccatgtctacaactatatccccccacctgtgggtcagatgtgccaaaaccccatctacatgcagaaggaaggagacccagtagcctattaccgaaacctgcaagagttcagctatagcaacctggaggagaaaaaagaagagccagccacacctgcttacacaataagtgccactgagctgctagaaaagcaggccacaccaagagagcctgagctgctgtatcaaaatattgctgagcgagtcaaggaacttcccagcgcaggcctagtccactataacttttgtaccttacctaaaaggcagtttgccccttcctatgaatctcgacgccaaaaccaagacagaatcaataaaaccgttttatatggaactcccaggaaatgctttgtggggcagtcaaaacccaaccaccctttactgcaagctaagccgcaatcagaaccggactacctcgaagttctggaaaaacaaactgcaatcagtcagctgtgaagggaaatcatttacaaccctaaggcatcagaggatgctgctccgaactgttggaaacaaggacattagcttttgtgtttgtttttgttctccctttcccagtgttaatgggggactttgaaaatgtttgggagataggatgaagtcatgattttgcttttgcaagttttcctttaaattatttctctctcgctctcctcccctccttttttttttttttttttttttctttttcccttctcttcttaggaaccatcagtggacatgaatgtttctacaatgcatttcttcatagattttgtttatggttttgtttcttttttcttctttgtttttcagtgtgggagtgggaagaggagattatagtgactgaagaaagaataggcaaacttttcaaatgaaaatggatatttagtgtattttgtagaagatctccaaagatcttttgtgactacaacttcttttgtaaataatgatatatggtatttccatcgtcagttaccgagtatagccactgggtatcactactttgtgttaaagtgccttcgcactttaagtacattacttaaatgttgcttttagctttgataaattgaaaatattttaatgtgttgtatttttgaaattgaaaacactgtaaaatagattgatgtgtcagctatattaagtcaacgtacagtttgcttgagttatagaaaccagcctgtcatcaaatgattctagttctaggactttgtaggcttaactataaaatatttcctttcctctgggtttaagtgattttatttaagtcaactaaggggatttaacagtggactagaggtaataagccacctcagtcaggattaataattcattaataaaatatatttaacccaa

SEQ ID NO: 182031 - DNA, 4391 bp, Homo sapiens
  Payload ID: 15845
  Gene Symbol: SLITRK3
  Gene Name: SLIT and NTRK-like family, member 3
  Uniprot ID: O94933
  ENST ID: ENST00000241274
  CDS Start-End: 283-3216
aagccgggattttgcctgcgatgcgcggcgagaggactgcggcggctgatttacacagttggcgcggaggaggggccgggggtgcgggggggacgcgctggcggagctccggcgatgggctgatctgggggctcccgagcgccgctcccttggtgcgcgatttgggggcggctgatggatttgcattcaggttccagccctgcgtttcctatattgactccttatacacgacctggcgctccagtttaggaggagacgttgttttgtaatcaaccacgaacgatgaaaccttccatagctgagatgcttcacagaggaaggatgttgtggataattcttctaagcacaattgctctaggatggactaccccgattcccctaatagaggactcagaggaaatagatgagccctgttttgatccatgctactgtgaagttaaagaaagcctctttcatatacattgtgacagtaaaggatttacaaatattagtcagattaccgagttctggtcaagaccttttaaactgtatctgcagaggaattctatgaggaaattatataccaacagttttcttcatttgaataatgctgtgtctattaatcttgggaacaatgcattgcaggacattcagactggagctttcaatggtcttaagattttaaagagactatatctacatgaaaacaaactagatgtcttcagaaatgacaccttccttggcttggaaagtctagaatatctgcaggcagattacaatgtcattaaacgtattgagagtggggcatttcggaacctaagtaaattgagggttctgattttaaatgataatctcatccccatgcttccaaccaatttatttaaggctgtctctttaacccatttggacctacgtggaaataggttaaaggttcttttttaccgaggaatgctagatcacattggcagaagcctgatggagctccagctggaagaaaacccttggaactgtacatgtgaaattgtacaactgaagagttggctggaacgcattccttatactgccctggtgggagacattacctgtgagacccctttccacttccatggaaaggacctacgagaaatcaggaagacagaactctgtcccttgttgtctgactctgaggtagaggctagtttgggaattccacattcgtcatcaagtaaggagaatgcatggccaactaagccttcctcaatgctatcctctgttcattttactgcttcttctgtcgaatacaagtcctcaaataaacagcctaagcccaccaaacagcctcgaacaccaaggccaccctccacctcccaagctttatatcctggtccaaaccagcctcccattgctccttatcagaccagaccaccaatccccattatatgccccactgggtgtacctgtaatttgcacatcaatgaccttggcttgactgtcaactgcaaagagcgaggatttaataacatttctgaacttcttccaaggcccttgaatgccaagaaactgtatctgagtagcaatctgattcagaaaatataccgttctgatttttggaatttttcttccttggatctcttgcatctggggaacaatcgtatttcctatgtccaagatggggcctttatcaacttgcccaacttaaagagcctcttccttaatggcaacgatatagagaagctgacaccaggcatgttccgaggcctacagagtttgcactacttgtactttgagttcaatgtcatccgggaaatccagcctgcagccttcagcctcatgcccaacttgaagctgctattcctcaataataacttactgaggactctgccaacagacgcctttgctggcacatccctggcccggctcaacctgaggaagaactacttcctctatcttcccgtggctggtgtcctggaacacttgaatgccattgtccagatagacctcaatgagaatccttgggactgcacctgtgacctggtcccctttaaacagtggatcgaaaccatcagctcagtcagtgtggttggtgatgtgctttgcaggagccctgagaacctcacgcaccgtgatgtgcgcactattgagctggaagttctttgcccagagatgctgcacgttgcaccagctggagaatccccagcccagcctggagattctcaccttattggggcaccaaccagtgcatcaccttatgagttttctcctcctgggggccctgtgccactttctgtgttaattctcagcctgctggttctgtttttctcagcagtctttgttgctgcaggcctctttgcctacgtgctccgaaggcgtcgaaagaagctgcccttcagaagcaagcggcaggaaggtgtggaccttactggcatccaaatgcaatgccacaggctgtttgaggatggtggaggtggtggtggcggaagtgggggtggtggtcgaccaactctttcctctccagagaaggcccctcccgtgggtcatgtgtatgagtacatcccccacccggttacccaaatgtgcaacaaccccatctacaagcctcgtgaggaggaggaggtggctgtttcatcagcccaagaagcagggagtgcagaacgtgggggtccagggacacaaccaccgggaatgggtgaggctctcctaggaagtgagcagtttgctgagacacccaaggagaaccatagtaactaccggaccttgctggaaaaagagaaggagtgggccctagcagtgtccagctcccagcttaacaccatagtgacggtgaatcaccatcaccctcaccacccagcagttggtggggtttcaggagtagttgggggaactgggggagacttggcagggttccgccaccatgagaaaaatggtggggtggtgctgtttcctcctgggggaggctgtggtagtggcagtatgctactagatcgagagaggccacagcctgccccctgcacagtgggatttgtggactgtctctatggaacagtgcccaaattaaaggaactgcacgtgcaccctcctggcatgcaatacccagacttacagcaggatgccaggctcaaagaaacccttctcttctcggctggaaagggcttcacagaccaccaaacccaaaaaagtgattacctcgagttaagggccaaacttcaaaccaagccggattacctcgaagtcctggagaagacaacatacaggttctaacagagagaagaaaatatattagtgctttttttttttcaaaagaaaaggaaaataaaagaaatatatcccttgctccctttacacttgtcccagtaactccatcctcacgatctttcctaccctgaacaaaactaaaaccgcatgataactagagaatacagatgtatgctctcccctctcagatgcgatttggaggaagggccatactcagatcattaatcaatgaaagtgccttcgcagacttttgccagcaaatgttatcattatttttttatactgaaacttgagactttgactgtgccatgtataagatatactggggatcattgtatggatcctaattaagtaaaattcaatgtgtctttttattttcagtaactattttttttatagttgtagttttgatttaaagggggggaaacaagttgacatttgtcatttgtggctttctttcttatcatcatggcacagattctgtacatgtattaacaatgcagtttgctgcatgcctggaaactgcaagatggggagggagggggcgggtcttgctcgaatgttctcactcactatcttgtctctcatacacatatccatctgcagaccatggtccctaaacctgcagtttcttcctgctggtgcaggtacacacacacacacacacacacacacacacacacacacacactccataccatttccattcaactcaatctgcttagttcgggtttgatccatttttctcctctccatagttctaccacccttcactgctagtgtacagctcacagcatctctcctaccaccctgggaaaagtcacattctaggctggattctactgaagtagaggcctggtggtttaacagccgaagacacacgcctagggatgagcaccctctttgtgacacttcatcctgatgccaagattttttggagaacatctgcactttcttatatatatatataatattaaaaaaagcaactgggtatatatcactaacagctttgtaggaagcacttttaatgttttctctctcacacacaaagattcaaaagaaatgtgcatatatttattctgtaatttcagtgattataaattgtaaaggtaatgtttaatcattgtatagtgattatgcctctggtatagctttcctaataaaaagtttttgaaaaacat

SEQ ID NO: 182032 - DNA, 585 bp, Homo sapiens
  Payload ID: 15845
  Gene Symbol: SLITRK3
  Gene Name: SLIT and NTRK-like family, member 3
  ENST ID: ENST00000497724
  CDS Start-End: 98-585
acaaatcaatccacgggtacagaatgctgacttcccgacactcaatttcacagggtgtctcttgaagagctgccagttttgtaatcaaccacgaacgatgaaaccttccatagctgagatgcttcacagaggaaggatgttgtggataattcttctaagcacaattgctctaggatggactaccccgattcccctaatagaggactcagaggaaatagatgagccctgttttgatccatgctactgtgaagttaaagaaagcctctttcatatacattgtgacagtaaaggatttacaaatattagtcagattaccgagttctggtcaagaccttttaaactgtatctgcagaggaattctatgaggaaattatataccaacagttttcttcatttgaataatgctgtgtctattaatcttgggaacaatgcattgcaggacattcagactggagctttcaatggtcttaagattttaaagagactatatctacatgaaaacaaactagatgtcttcagaaatgacaccttccttggcttggaaagtctagaatatctgcaggcagattacaatgtcattaaacg

SEQ ID NO: 182033 - DNA, 4555 bp, Homo sapiens
  Payload ID: 15845
  Gene Symbol: SLITRK3
  Gene Name: SLIT and NTRK-like family, member 3
  Uniprot ID: O94933
  ENST ID: ENST00000475390
  CDS Start-End: 445-3378
aaatccagagactgagctcaggctctcgggaacaacgaagctctccactgatccagagcaccgagattttaaatcaaaggaacctagtcctgggacactcactctgcctgcctgcctaccaaccatcgagggcatagggagctgtggtcgtgagctccctgtcgctggcatcgccgcgctaggtgcgcgccccgctctcccattggtatgcagcgaccatttccctgcaagtctcaaaggtggaaacatttaaacggattacaagcgtgattcggtagcctttcggaaagttggtggccagaagaggagaagctacaaggctacagtatgatggatacaattcagcttcgcagagagtttgcccctcctgctgggtagcccctcgcagcaaacctcggagatcctgagcgctctgcaccatagttttgtaatcaaccacgaacgatgaaaccttccatagctgagatgcttcacagaggaaggatgttgtggataattcttctaagcacaattgctctaggatggactaccccgattcccctaatagaggactcagaggaaatagatgagccctgttttgatccatgctactgtgaagttaaagaaagcctctttcatatacattgtgacagtaaaggatttacaaatattagtcagattaccgagttctggtcaagaccttttaaactgtatctgcagaggaattctatgaggaaattatataccaacagttttcttcatttgaataatgctgtgtctattaatcttgggaacaatgcattgcaggacattcagactggagctttcaatggtcttaagattttaaagagactatatctacatgaaaacaaactagatgtcttcagaaatgacaccttccttggcttggaaagtctagaatatctgcaggcagattacaatgtcattaaacgtattgagagtggggcatttcggaacctaagtaaattgagggttctgattttaaatgataatctcatccccatgcttccaaccaatttatttaaggctgtctctttaacccatttggacctacgtggaaataggttaaaggttcttttttaccgaggaatgctagatcacattggcagaagcctgatggagctccagctggaagaaaacccttggaactgtacatgtgaaattgtacaactgaagagttggctggaacgcattccttatactgccctggtgggagacattacctgtgagacccctttccacttccatggaaaggacctacgagaaatcaggaagacagaactctgtcccttgttgtctgactctgaggtagaggctagtttgggaattccacattcgtcatcaagtaaggagaatgcatggccaactaagccttcctcaatgctatcctctgttcattttactgcttcttctgtcgaatacaagtcctcaaataaacagcctaagcccaccaaacagcctcgaacaccaaggccaccctccacctcccaagctttatatcctggtccaaaccagcctcccattgctccttatcagaccagaccaccaatccccattatatgccccactgggtgtacctgtaatttgcacatcaatgaccttggcttgactgtcaactgcaaagagcgaggatttaataacatttctgaacttcttccaaggcccttgaatgccaagaaactgtatctgagtagcaatctgattcagaaaatataccgttctgatttttggaatttttcttccttggatctcttgcatctggggaacaatcgtatttcctatgtccaagatggggcctttatcaacttgcccaacttaaagagcctcttccttaatggcaacgatatagagaagctgacaccaggcatgttccgaggcctacagagtttgcactacttgtactttgagttcaatgtcatccgggaaatccagcctgcagccttcagcctcatgcccaacttgaagctgctattcctcaataataacttactgaggactctgccaacagacgcctttgctggcacatccctggcccggctcaacctgaggaagaactacttcctctatcttcccgtggctggtgtcctggaacacttgaatgccattgtccagatagacctcaatgagaatccttgggactgcacctgtgacctggtcccctttaaacagtggatcgaaaccatcagctcagtcagtgtggttggtgatgtgctttgcaggagccctgagaacctcacgcaccgtgatgtgcgcactattgagctggaagttctttgcccagagatgctgcacgttgcaccagctggagaatccccagcccagcctggagattctcaccttattggggcaccaaccagtgcatcaccttatgagttttctcctcctgggggccctgtgccactttctgtgttaattctcagcctgctggttctgtttttctcagcagtctttgttgctgcaggcctctttgcctacgtgctccgaaggcgtcgaaagaagctgcccttcagaagcaagcggcaggaaggtgtggaccttactggcatccaaatgcaatgccacaggctgtttgaggatggtggaggtggtggtggcggaagtgggggtggtggtcgaccaactctttcctctccagagaaggcccctcccgtgggtcatgtgtatgagtacatcccccacccggttacccaaatgtgcaacaaccccatctacaagcctcgtgaggaggaggaggtggctgtttcatcagcccaagaagcagggagtgcagaacgtgggggtccagggacacaaccaccgggaatgggtgaggctctcctaggaagtgagcagtttgctgagacacccaaggagaaccatagtaactaccggaccttgctggaaaaagagaaggagtgggccctagcagtgtccagctcccagcttaacaccatagtgacggtgaatcaccatcaccctcaccacccagcagttggtggggtttcaggagtagttgggggaactgggggagacttggcagggttccgccaccatgagaaaaatggtggggtggtgctgtttcctcctgggggaggctgtggtagtggcagtatgctactagatcgagagaggccacagcctgccccctgcacagtgggatttgtggactgtctctatggaacagtgcccaaattaaaggaactgcacgtgcaccctcctggcatgcaatacccagacttacagcaggatgccaggctcaaagaaacccttctcttctcggctggaaagggcttcacagaccaccaaacccaaaaaagtgattacctcgagttaagggccaaacttcaaaccaagccggattacctcgaagtcctggagaagacaacatacaggttctaacagagagaagaaaatatattagtgctttttttttttcaaaagaaaaggaaaataaaagaaatatatcccttgctccctttacacttgtcccagtaactccatcctcacgatctttcctaccctgaacaaaactaaaaccgcatgataactagagaatacagatgtatgctctcccctctcagatgcgatttggaggaagggccatactcagatcattaatcaatgaaagtgccttcgcagacttttgccagcaaatgttatcattatttttttatactgaaacttgagactttgactgtgccatgtataagatatactggggatcattgtatggatcctaattaagtaaaattcaatgtgtctttttattttcagtaactattttttttatagttgtagttttgatttaaagggggggaaacaagttgacatttgtcatttgtggctttctttcttatcatcatggcacagattctgtacatgtattaacaatgcagtttgctgcatgcctggaaactgcaagatggggagggagggggcgggtcttgctcgaatgttctcactcactatcttgtctctcatacacatatccatctgcagaccatggtccctaaacctgcagtttcttcctgctggtgcaggtacacacacacacacacacacacacacacacacacacacacactccataccatttccattcaactcaatctgcttagttcgggtttgatccatttttctcctctccatagttctaccacccttcactgctagtgtacagctcacagcatctctcctaccaccctgggaaaagtcacattctaggctggattctactgaagtagaggcctggtggtttaacagccgaagacacacgcctagggatgagcaccctctttgtgacacttcatcctgatgccaagattttttggagaacatctgcactttcttatatatatatataatattaaaaaaagcaactgggtatatatcactaacagctttgtaggaagcacttttaatgttttctctctcacacacaaagattcaaaagaaatgtgcatatatttattctgtaatttcagtgattataaattgtaaaggtaatgtttaatcattgtatagtgattatgcctctggtatagctttcctaataaaaagtttttgaaaaacataa

SEQ ID NO: 182034 - DNA, 3357 bp, Homo sapiens
  Payload ID: 15846
  Gene Symbol: SLITRK4
  Gene Name: SLIT and NTRK-like family, member 4
  Uniprot ID: Q8IW52
  ENST ID: ENST00000338017
  CDS Start-End: 377-2890
agtggtcgagtgtcgggaggaaggactgcttgtgtgcggggtgggggggggtggtggagagcgggggcggggattcagcgcgtgtatgtaaaggtgcagcccgtgtgctaggcgctgggtgcgcgcgcggtgtctgctcgggtgcgcgcgcgcgccgctgcccgcctgcccgccggcccgcctgctcgcctgctggggctgctccgtgggtttgacgggcgagcgggcgcggaggagctctgtccggaatcacatagataccatcgtggaaacagcagcgcaggtcacggcgccgcgggccctgcaccagacgctgggctctagagattatttctctttattcagaagcatacagttgtttgctgattgcaagaagatgtttctgtggctgtttctgattttgtcagccctgatttcttcgacaaatgcagattctgacatatcggtggaaatttgcaatgtgtgttcctgcgtgtcagttgagaatgtgctctatgtcaactgtgagaaggtttcagtctacagaccaaatcagctgaaaccaccttggtctaatttttatcacctcaatttccaaaataattttttaaatattctgtatccaaatacattcttgaatttttcacatgcagtctccctgcatctggggaataataaactgcagaacattgagggaggagcctttcttgggctcagtgcattaaagcagttgcacttgaacaacaatgaattaaagattctccgagctgacactttccttggcatagagaacttggagtatctccaggctgactacaatttaatcaagtatattgaacgaggagccttcaataagctccacaaactgaaagttctcattcttaatgacaatctgatttcattccttcctgataatattttccgattcgcatctttgacccatctggatatacgagggaacagaatccagaagctcccttatatcggggttctggaacacattggccgtgtcgttgaattgcaactggaagataacccttggaactgtagctgtgatttattgcccttaaaagcttggctggagaacatgccatataacatttacataggagaagctatctgtgaaactcccagtgacttatatggaaggcttttaaaagaaaccaacaaacaagagctatgtcccatgggcaccggcagtgattttgacgtgcgcatcctgcctccatctcagctggaaaatggctacaccactcccaatggtcacactacccaaacatctttacacagattagtaactaaaccaccaaaaacaacaaatccttccaagatctctggaatcgttgcaggcaaagccctctccaaccgcaatctcagtcagattgtgtcttaccaaacaagggtgcctcctctaacaccttgcccggcaccttgcttctgcaaaacacacccttcagatttgggactaagtgtgaactgccaagagaaaaatatacagtctatgtctgaactgataccgaaacctttaaatgcgaagaagctgcacgtcaatggcaatagcatcaaggatgtggacgtatcagacttcactgactttgaaggactggatttgcttcatttaggcagcaatcaaattacagtgattaagggagacgtatttcacaatctcactaatttacgcaggctatatctcaatggcaatcaaattgagagactctatcctgaaatattttcaggtcttcataacctgcagtatctgtatttggaatacaatttgattaaggaaatctcagcaggcacctttgactccatgccaaatttgcagttactgtacttaaacaataatctcctaaagagcctgcctgtttacatcttttccggagcacccttagctagactgaacctgaggaacaacaaattcatgtacctgcctgtcagcggggtccttgatcagttgcaatctcttacacagattgacttggagggcaacccatgggactgtacttgtgacttggtggcattaaagctgtgggtggagaagttgagcgacgggattgttgtgaaagaactgaaatgtgagacgcctgttcagtttgccaacattgaactgaagtccctcaaaaatgaaatcttatgtcccaaacttttaaataagccgtctgcaccattcacaagccctgcacctgccattacattcaccactcctttgggtcccattcgaagtcctcctggtgggccagtgcctctgtctattttaatcttaagtatcttagtggtcctcattttaacggtgtttgttgctttttgccttcttgtttttgtcctgcgacgcaacaagaaacccacagtgaagcacgaaggcctggggaatcctgactgtggctccatgcagctgcagctaaggaagcatgaccacaaaaccaataaaaaagatggactgagcacagaagctttcattccacaaactatagaacagatgagcaagagccacacttgtggcttgaaagagtcagaaactgggttcatgttttcagatcctccaggacagaaagttgttatgagaaatgtggccgacaaggagaaagatttattacatgtagataccaggaagagactgagcacaattgatgagctggatgaattattccctagcagggattccaatgtgtttattcagaattttcttgaaagcaaaaaggagtataatagcataggtgtcagtggctttgagatccgctatccagaaaaacaaccagacaaaaaaagtaagaagtcactgataggtggcaaccacagtaaaattgttgtggaacaaaggaagagtgagtattttgaactgaaggcgaaactgcagagttcccctgactacctacaggtccttgaggagcaaacagctttgaacaagatctaggtcatgtaatcttacttcatacagaggacatttatttaatgatgaaagtgccttttgttgacttctaacttccaaatactatattatcaataggcatggaggcaggtgtttccaagggtgtctcattaactgtagctgcaaagatgtgtcaagtagaagagaatttgtttaatagattttactacataaaacctatactgtggagtcctgtggggatactgcaaactctattgccaaagggatgctttatacacataatactgaatttaacctcaagaggcaaatctgttttgtaccccaatgcaaaaccttcgtctctttgtgctttgtaaagcaaactcaagaaaactggtacacctgtaccagctgggtcctttatcttgcacgtagattaagttggtggaactggaataatccttttgatttgtggcattgtaacaactccgtgtaaagattatctgaaaagt

SEQ ID NO: 182035 - DNA, 3074 bp, Homo sapiens
  Payload ID: 15846
  Gene Symbol: SLITRK4
  Gene Name: SLIT and NTRK-like family, member 4
  Uniprot ID: Q8IW52
  ENST ID: ENST00000356928
  CDS Start-End: 94-2607
attccaggagccctccgttctgcggggtgacaattagccaaagattatttctctttattcagaagcatacagttgtttgctgattgcaagaagatgtttctgtggctgtttctgattttgtcagccctgatttcttcgacaaatgcagattctgacatatcggtggaaatttgcaatgtgtgttcctgcgtgtcagttgagaatgtgctctatgtcaactgtgagaaggtttcagtctacagaccaaatcagctgaaaccaccttggtctaatttttatcacctcaatttccaaaataattttttaaatattctgtatccaaatacattcttgaatttttcacatgcagtctccctgcatctggggaataataaactgcagaacattgagggaggagcctttcttgggctcagtgcattaaagcagttgcacttgaacaacaatgaattaaagattctccgagctgacactttccttggcatagagaacttggagtatctccaggctgactacaatttaatcaagtatattgaacgaggagccttcaataagctccacaaactgaaagttctcattcttaatgacaatctgatttcattccttcctgataatattttccgattcgcatctttgacccatctggatatacgagggaacagaatccagaagctcccttatatcggggttctggaacacattggccgtgtcgttgaattgcaactggaagataacccttggaactgtagctgtgatttattgcccttaaaagcttggctggagaacatgccatataacatttacataggagaagctatctgtgaaactcccagtgacttatatggaaggcttttaaaagaaaccaacaaacaagagctatgtcccatgggcaccggcagtgattttgacgtgcgcatcctgcctccatctcagctggaaaatggctacaccactcccaatggtcacactacccaaacatctttacacagattagtaactaaaccaccaaaaacaacaaatccttccaagatctctggaatcgttgcaggcaaagccctctccaaccgcaatctcagtcagattgtgtcttaccaaacaagggtgcctcctctaacaccttgcccggcaccttgcttctgcaaaacacacccttcagatttgggactaagtgtgaactgccaagagaaaaatatacagtctatgtctgaactgataccgaaacctttaaatgcgaagaagctgcacgtcaatggcaatagcatcaaggatgtggacgtatcagacttcactgactttgaaggactggatttgcttcatttaggcagcaatcaaattacagtgattaagggagacgtatttcacaatctcactaatttacgcaggctatatctcaatggcaatcaaattgagagactctatcctgaaatattttcaggtcttcataacctgcagtatctgtatttggaatacaatttgattaaggaaatctcagcaggcacctttgactccatgccaaatttgcagttactgtacttaaacaataatctcctaaagagcctgcctgtttacatcttttccggagcacccttagctagactgaacctgaggaacaacaaattcatgtacctgcctgtcagcggggtccttgatcagttgcaatctcttacacagattgacttggagggcaacccatgggactgtacttgtgacttggtggcattaaagctgtgggtggagaagttgagcgacgggattgttgtgaaagaactgaaatgtgagacgcctgttcagtttgccaacattgaactgaagtccctcaaaaatgaaatcttatgtcccaaacttttaaataagccgtctgcaccattcacaagccctgcacctgccattacattcaccactcctttgggtcccattcgaagtcctcctggtgggccagtgcctctgtctattttaatcttaagtatcttagtggtcctcattttaacggtgtttgttgctttttgccttcttgtttttgtcctgcgacgcaacaagaaacccacagtgaagcacgaaggcctggggaatcctgactgtggctccatgcagctgcagctaaggaagcatgaccacaaaaccaataaaaaagatggactgagcacagaagctttcattccacaaactatagaacagatgagcaagagccacacttgtggcttgaaagagtcagaaactgggttcatgttttcagatcctccaggacagaaagttgttatgagaaatgtggccgacaaggagaaagatttattacatgtagataccaggaagagactgagcacaattgatgagctggatgaattattccctagcagggattccaatgtgtttattcagaattttcttgaaagcaaaaaggagtataatagcataggtgtcagtggctttgagatccgctatccagaaaaacaaccagacaaaaaaagtaagaagtcactgataggtggcaaccacagtaaaattgttgtggaacaaaggaagagtgagtattttgaactgaaggcgaaactgcagagttcccctgactacctacaggtccttgaggagcaaacagctttgaacaagatctaggtcatgtaatcttacttcatacagaggacatttatttaatgatgaaagtgccttttgttgacttctaacttccaaatactatattatcaataggcatggaggcaggtgtttccaagggtgtctcattaactgtagctgcaaagatgtgtcaagtagaagagaatttgtttaatagattttactacataaaacctatactgtggagtcctgtggggatactgcaaactctattgccaaagggatgctttatacacataatactgaatttaacctcaagaggcaaatctgttttgtaccccaatgcaaaaccttcgtctctttgtgctttgtaaagcaaactcaagaaaactggtacacctgtaccagctgggtcctttatcttgcacgtagattaagttggtggaactggaataatccttttgatttgtggcattgtaacaactccgtgtaaagattatctgaaaagt

SEQ ID NO: 182036 - DNA, 8545 bp, Homo sapiens
  Payload ID: 15846
  Gene Symbol: SLITRK4
  Gene Name: SLIT and NTRK-like family, member 4
  Uniprot ID: Q8IW52
  ENST ID: ENST00000596188
  CDS Start-End: 227-2740
gtacaggtctcgggtggctccggctgtcgggccgctgggctgggttgggctttatttttgcaccccactcgcagccactttccgcagacgtggatctgaggctcggggcagtggcccgcgggttggtcggagattgctagcgctcggcaagactaggaataccagaggaagagccgattatttctctttattcagaagcatacagttgtttgctgattgcaagaagatgtttctgtggctgtttctgattttgtcagccctgatttcttcgacaaatgcagattctgacatatcggtggaaatttgcaatgtgtgttcctgcgtgtcagttgagaatgtgctctatgtcaactgtgagaaggtttcagtctacagaccaaatcagctgaaaccaccttggtctaatttttatcacctcaatttccaaaataattttttaaatattctgtatccaaatacattcttgaatttttcacatgcagtctccctgcatctggggaataataaactgcagaacattgagggaggagcctttcttgggctcagtgcattaaagcagttgcacttgaacaacaatgaattaaagattctccgagctgacactttccttggcatagagaacttggagtatctccaggctgactacaatttaatcaagtatattgaacgaggagccttcaataagctccacaaactgaaagttctcattcttaatgacaatctgatttcattccttcctgataatattttccgattcgcatctttgacccatctggatatacgagggaacagaatccagaagctcccttatatcggggttctggaacacattggccgtgtcgttgaattgcaactggaagataacccttggaactgtagctgtgatttattgcccttaaaagcttggctggagaacatgccatataacatttacataggagaagctatctgtgaaactcccagtgacttatatggaaggcttttaaaagaaaccaacaaacaagagctatgtcccatgggcaccggcagtgattttgacgtgcgcatcctgcctccatctcagctggaaaatggctacaccactcccaatggtcacactacccaaacatctttacacagattagtaactaaaccaccaaaaacaacaaatccttccaagatctctggaatcgttgcaggcaaagccctctccaaccgcaatctcagtcagattgtgtcttaccaaacaagggtgcctcctctaacaccttgcccggcaccttgcttctgcaaaacacacccttcagatttgggactaagtgtgaactgccaagagaaaaatatacagtctatgtctgaactgataccgaaacctttaaatgcgaagaagctgcacgtcaatggcaatagcatcaaggatgtggacgtatcagacttcactgactttgaaggactggatttgcttcatttaggcagcaatcaaattacagtgattaagggagacgtatttcacaatctcactaatttacgcaggctatatctcaatggcaatcaaattgagagactctatcctgaaatattttcaggtcttcataacctgcagtatctgtatttggaatacaatttgattaaggaaatctcagcaggcacctttgactccatgccaaatttgcagttactgtacttaaacaataatctcctaaagagcctgcctgtttacatcttttccggagcacccttagctagactgaacctgaggaacaacaaattcatgtacctgcctgtcagcggggtccttgatcagttgcaatctcttacacagattgacttggagggcaacccatgggactgtacttgtgacttggtggcattaaagctgtgggtggagaagttgagcgacgggattgttgtgaaagaactgaaatgtgagacgcctgttcagtttgccaacattgaactgaagtccctcaaaaatgaaatcttatgtcccaaacttttaaataagccgtctgcaccattcacaagccctgcacctgccattacattcaccactcctttgggtcccattcgaagtcctcctggtgggccagtgcctctgtctattttaatcttaagtatcttagtggtcctcattttaacggtgtttgttgctttttgccttcttgtttttgtcctgcgacgcaacaagaaacccacagtgaagcacgaaggcctggggaatcctgactgtggctccatgcagctgcagctaaggaagcatgaccacaaaaccaataaaaaagatggactgagcacagaagctttcattccacaaactatagaacagatgagcaagagccacacttgtggcttgaaagagtcagaaactgggttcatgttttcagatcctccaggacagaaagttgttatgagaaatgtggccgacaaggagaaagatttattacatgtagataccaggaagagactgagcacaattgatgagctggatgaattattccctagcagggattccaatgtgtttattcagaattttcttgaaagcaaaaaggagtataatagcataggtgtcagtggctttgagatccgctatccagaaaaacaaccagacaaaaaaagtaagaagtcactgataggtggcaaccacagtaaaattgttgtggaacaaaggaagagtgagtattttgaactgaaggcgaaactgcagagttcccctgactacctacaggtccttgaggagcaaacagctttgaacaagatctaggtcatgtaatcttacttcatacagaggacatttatttaatgatgaaagtgccttttgttgacttctaacttccaaatactatattatcaataggcatggaggcaggtgtttccaagggtgtctcattaactgtagctgcaaagatgtgtcaagtagaagagaatttgtttaatagattttactacataaaacctatactgtggagtcctgtggggatactgcaaactctattgccaaagggatgctttatacacataatactgaatttaacctcaagaggcaaatctgttttgtaccccaatgcaaaaccttcgtctctttgtgctttgtaaagcaaactcaagaaaactggtacacctgtaccagctgggtcctttatcttgcacgtagattaagttggtggaactggaataatccttttgatttgtggcattgtaacaactccgtgtaaagattatctgaaaagtaaaaaaaaaaaaaaaaaaaaaaaaaaaaaaaaaaaagcatgcaaagagagaacactcgatagtatttgtaaattggtaacctttatggcctgcatcttgaaaccgctggatttataatgttaatttgtgcaaatacttgtttaaaatataacatacattacataactataaaataaatttgaacactttaagcattacctgtctatacataaaaatctaaaagaaaaaatcaacgtgagttagatagcatttgtgatgatctgaagaaatatgtgacgtttatcagaattaaacatggctcaaattaaactaacactagagtttgttctcagttacgtgaaacacccacaatccttcaaggttgtccaaaataagcagagtgcttactgtgtgagcgcacccaaagctatttttgtaacataattcatatttatgaagtactttgtatactaaataggaaaatatgtactccttaatatgtatttaatatgcctgacttgttttcctgatcacagtgaatttatcagtaagtataaatgtagacagaaagaaatatactaaactgaaacaagctggtgtgaacagaaatattctggactttgtgatcaggtgtaacttaaaaacaaaaaaaatttaaaacaaacagaaaagaaaaaaatacaaaagaacagtcaattctgtgctattcttgtgaatttagcgtattatcttcagatttgttaccaattgtgcattcaaaaataagttccttagttttctagtattgtgtctggggcagttgttatttgccatcggttgtcttgcttttcaggattctatgagcttaattcaaatagttttcgctacaagtatttaaaaaataatgaataaggttaatagttatatcttgtatgcatcagtatcctgttctttcatcattcagactactatcagataatctagtagaactgtaaacatcatggtaatcttggctatgaaagccacactgtaaaaatgcttgcattggtttcagatgagttcacagtctgcaactacaaatgatatgcccctgtgtttgcttttgctaagatctaagtcaaaatttgttaaaggaataaagtaactgataatgggtgatgtcggaacttttgtaggagctcccgattaacaaagtgatattcagaaacacattgtcttcttggcctgcctgcatatatatatatagatatatagatatatatagatatacatatatatatatgtgtgtgtgtatatatatatgcgtgtgtatatatatgtgtgtgtatatatatacatatatgtatgtgtgtgtgtatacatatatatatagtgtgtgtgtgtgcatgtgtgagagtgtgtgtcctatctcttataattaccttatgaatcagtaagataaccaagaaggtaaacatagccattcctcatgattgcaagtggcatattttttctgttgcagcttccaaaatgatactatgtttatagttgcagtagctgttcctttattaatcactaatttcagggctttatgtgtttgttgcaagacaaaaaaaagaagcttggctttcttgggtgtgtgtgtatgtgtgtgtgtgtctgagtgtgtgtatatatatatatgtgggtatatattcatacatatagataatttggaaatcttttttaaatagcaaaaaccgtctccatgtgtatgtgctggtgctcttaaaactttagtgtgtaattttaatttttatgacatctgtgaaaactttatatgaatataaaataattcaaacaaataattgctttctgatcttgaaagaaaagacaagatgtgtgcccaacagcttttttcatctacaatttcataaggacttttgatatgccattaccatgcatgcacacatccatggattaaagggctcctaatgtatactgacaggataaagatgcaaaggcttcaaagaaagtgttttagtttagtctgtcaataaagtatggcttgaaggatcttaaatagacacttataggaggaatcagaaagttccattcatggtctggggataataggtcatttgaatgatacttttattcagtgtggtgatgttctgaagatgtttcaaggtttctgcagaattctcaatggcaagagtacctgccaccatctcaaaagcttgctgtagcatattggctatctcatactcttctgctaaaaggtataaatgttcaactttttttaaaaagtaatttaacatatgtggttatttggaggttcaaattgtaaatgaaagtaacaaattcttggttaaggctaatatattttccttaactaaagtcattgtgcctacattatatagtgtatacaattttgcacctgtctctcattagttctagttgtacattttatgataatgtagttaggtataagttttgagttgagtacaagaacagttaaaatactgtatctacattttgttggcttcaactataaccttgatgttagtttaacccctggaggtatgatatgtacatcagtacagcatttttagtggaacttggatgcaaacctataaaatccaagaagtgctcatttctaatgtgggctgacacatcatgggcttcttggcactatagtcatgggtatggactacgttagaatgattgcaaacaaatttagatcttatgaaatcagtgaaggggttgagataatatattgtgtccatgtaatataaatcaagttttaaattatttttttatgaaatcaataaagatgattcaattctttaaaagtaagactttgtgtaattttatgagaaagcagctattaaagtagagtgattcaagtctataaggcaatttatattctatatttagtttttcattctgaatagactgaaaaaatatatgaattagaaatttatttaagaccatctttcttttgttgctttttttaaacatttacttttctttaagccataaggatgcataaattatacagggcatgaccttatgagtaacatcaacaggtatttcagaaataacagaacacgtctagaaatgtatggtggtaatattaatctataacattttttgcatgatttgtacattgacattgtatgaaatgagcacactgaggtttttttgttgttactgtcgcatccaaagagttggggagaaactatattaagaatgtatttataatcactattttaaaataaagtaaaaaaaatattgtattgtttttaccctgatttgattatcagtattttaggttaatttgtaagagaaaaatcaagtaatgctgtaaaagctcatgtaaatcacagaaaagaactgttttaatgacttttgtttgcttttaataacatcaaggtattagaatttattaattgccatttttatgaaagtattaataaaattgtttgctacaatgatatttctgaagccacagtttgttaaatatatttgtctttccattatttttcagaaaaatataaagcagtaaccaaactgatcatttcacccagatttgagggtaagatatagctttagcctactgtttatattcaacttaactgctaaatctctgttaaaaaaaacgctttctttagaaacatattttcaatctgtgttccttcccactggcagcccctttggagaagagtctgacagtgccaagatcaacatgctttgattcttgcccattcttttgaatcagttggattctgacataacttcagataagcaaatactaatattcagtcttaactatctgctcaaatacttttagaaacccttcagtacctctgtattccattgccagtttgcctggttacaggttagttacccacttatggagtgaattgtgatttgtatttggttcttttaaagatgaccaaaattatcaatccatgactttacccaaattattactgttgtggaaaatgaactaattgcattacggttaacttgagggcagaaatgaatgtaactgactatattgaccaatacagtgggtttaaggttcatatatttatggtaagaaaagtaaacacagaaacagagagagagagagaatataaattaagattgttgttgctttacacgtatacataggtatgctgaaggtgtgaacagtatagatagcatatgcaagtacttttagactaaatgccttatgcatctgaggagatacaccgtaggattgtgttattttatttatttatgagtactgagcacagagctttgggttccagccacttctgttatgtagacaagtggcatcaaatcaaggtttggcatcatttctagtgctcatcccattagtcactgtggtcagatgggctgaactaaaataaaatatcctgtttgtggcttcacttacctagaataactggtgacatatatcaagttcacctgataattgttaactctcaatttcagatttcctaaggatctattctttgttaatttaaaagctaatgggaactcaaatgaattttaataacttactttgtacaaaactgcccttaatctaatttggaattttattttgttttatttatttatttatttatttatttaatgtctttttagtttctactggttgataggattgtgttttaaaagggaaaatcgaggaagggaaattgtgttgtttatcttataggaaatgatggttttttttaatttttaaaaattattttaacctgttgttcttatgtctacaaggggaaaataaagtagggctctgaggcatttgaatattttagaccaaataattgctattgagaataaagattcaagcttctcattaatccataattgacatttccactgactgtaggacccagaaccaggagagaattactcaaccctccacttcagtttacttttgtagacactgcctaaatagaaatagaaattctggtgatttcaataacatcaaaaatgacaaattacctgtttaacttaaaaaggtcatgaatgaggccttcagagaaataatattaataatataatgaataaccatagagcagtgcctttaaattagctataggaaggaaatagtcttttcaagtttctgaacaatatatttctcttagttggcacctcacaaatactagatcatgtcagacgctgctggttaatagctgcaggaaggcatgttgtgcagtggatattgctcatggaagtgtgtgaaaatcatagtaagctttgttctccctgctaagacttgctatgtatatttccatcattgtttcatgtaaactgaaccattgtggtaaacttttggagttgatatggaatcactttaatgctgttttcacaaataaaagttttttcttataggtca

SEQ ID NO: 182037 - DNA, 21103 bp, Homo sapiens
  Payload ID: 15847
  Gene Symbol: SLITRK5
  Gene Name: SLIT and NTRK-like family, member 5
  Uniprot ID: O94991
  ENST ID: ENST00000325089
  CDS Start-End: 220-3096
cccggaacccgcggtcgccaccgcggcggcggccccaggctggaggcgtccgggcgcctctttcctccagcctctgggactgcgctgctcgcagtctcctcgccctgcctgggcttgagaaacctagtgcataccccaaagagggtttttgtgtatgtgtgtgtttttaaagggtggctatgatgactgggccttggagatgtgagactgggaggtaaaatgcacacttgctgccccccagtaactttggaacaggaccttcacagaaaaatgcatagctggatgctgcagactctagcgtttgctgtaacatctctcgtcctttcgtgtgcagaaaccatcgattattatggggaaatctgtgacaatgcatgtccttgtgaggaaaaggacggcattttaactgtgagctgtgaaaaccgggggatcatcagtctctctgaaattagccctccccgtttcccaatctaccacctcttgttgtccggaaaccttttgaaccgtctctatcccaatgagtttgtcaattacactggggcttcaattttgcatctaggtagcaatgttatccaggacattgagaccggggctttccatgggctacggggtttgaggagattgcatctaaacaataataaactggaacttctgcgagatgataccttccttggcttggagaacctggagtacctacaggtcgattacaactacatcagcgtcattgaacccaatgcttttgggaaactgcatttgttgcaggtgcttatcctcaatgacaatcttttgtccagtttacccaacaatcttttccgttttgtgcccttaacgcacttggacctccgggggaaccggctgaaacttctgccctacgtggggctcttgcagcacatggataaagttgtggagctacagctggaggaaaacccttggaattgttcttgtgagctgatctctctaaaggattggttggacagcatctcctattcagccctggtgggggatgtagtttgtgagacccccttccgcttacacggaagggacttggacgaggtatccaagcaggaactttgcccaaggagacttatttctgactacgagatgaggccgcagacgcctttgagcaccacggggtatttacacaccaccccggcgtcagtgaattctgtggccacttcttcctctgctgtttacaaaccccctttgaagccccctaaggggactcgccaacccaacaagcccagggtgcgccccacctctcggcagccctctaaggacttgggctacagcaactatggccccagcatcgcctatcagaccaaatccccggtgcctttggagtgtcccaccgcgtgctcttgcaacctgcagatctctgatctgggcctcaacgtaaactgccaggagcgaaagatcgagagcatcgctgaactgcagcccaagccctacaatcccaagaaaatgtatctgacagagaactacatcgctgtcgtgcgcaggacagacttcctggaggccacggggctggacctcctgcacctggggaataaccgcatctcgatgatccaggaccgcgctttcggggatctcaccaacctgaggcgcctctacctgaatggcaacaggatcgagaggctgagcccggagttattctatggcctgcagagcctgcagtatctcttcctccagtacaatctcatccgcgagattcagtctggaacttttgacccggtcccaaacctccagctgctattcttgaataacaacctcctgcaggccatgccctcaggcgtcttctctggcttgaccctcctcaggctaaacctgaggagtaaccacttcacctccttgccagtgagtggagttttggaccagctgaagtcactcatccaaatcgacctgcatgacaatccttgggattgtacctgtgacattgtgggcatgaagctgtgggtggagcagctcaaagtgggcgtcctagtggacgaggtgatctgtaaggcgcccaaaaaattcgctgagaccgacatgcgctccattaagtcggagctgctgtgccctgactattcagatgtagtagtttccacgcccacaccctcctctatccaggtccctgcgaggaccagcgccgtgactcctgcggtccggttgaatagcaccggggcccccgcgagcttgggcgcaggcggaggggcgtcgtcggtgcccttgtctgtgttaattctcagcctcctgctggttttcatcatgtccgtcttcgtggccgccgggctcttcgtgctggtcatgaagcgcaggaagaagaaccagagcgaccacaccagcaccaacaactccgacgtgagctcctttaacatgcagtacagcgtgtacggcggcggcggcggcacgggcggccacccacacgcgcacgtgcatcaccgcgggcccgcgctgcccaaggtgaagacgcccgcgggccacgtgtatgaatacatcccccacccactgggccacatgtgcaaaaaccccatctaccgctcccgagagggcaactccgtagaggattacaaagacctgcacgagctcaaggtcacctacagcagcaaccaccacctgcagcagcagcagcagccgccgccgccaccgcagcagccacagcagcagcccccgccgcagctgcagctgcagcccggggaggaggagaggcgggaaagccaccacttgcggagccccgcctacagcgtcagcaccatcgagccccgggaggacctgctgtcgccggtgcaggacgccgaccgcttttacaggggcattttagaaccagacaaacactgctccaccacccccgccggcaatagcctcccggaatatcccaaattcccgtgcagccccgctgcttacactttctcccccaactatgacctgagacgcccccatcagtatttgcacccgggggcaggggacagcaggctacgggaaccggtgctctacagccccccgagtgctgtctttgtagaacccaaccggaacgaatatctggagttaaaagcaaaactaaacgttgagccggactacctcgaagtgctggaaaaacagaccacgtttagccagttctaaaagcaaagaaactctcttggagcttttgcatttaaaacaaacaagcaagcagacacacacagtgaacacatttgattaattgtgttgtttcaacgtttagggtgaagtgccttggcacgggatttctcagcttcggtggaagatacgaaaagggtgtgcaatttcctttaaaatttacacgtgggaaacatttgtgtaaactgggcacatcactttctcttcttgcgtgtggggcaggtgtggagaagggctttaaggaggccaatttgctgcgcgggtgacctgtgaaaggtcacagtcatttttgtagtggttggaagtgctaagaatggtggatgatggcagagcatagattctactcttcctcttttgcttcctccccctcccccgcccctgccccacctctctttctccccttttaagccatgggtgggtctaactggcttttgtggagaaattagcacaccccaactttaataggaaatttgttctctttttccgcccctctccttctctcctcccctcccctcccttctcattccttttctttgtttttaaaggatgtgtttgtatgcattctggacatttgaattaaaaaaaaagtattgtgatcctgtaaaggatcaccatagatgtggacaaatcattaaaattacagagctatatgatccataattgattagtcaaaataacttattgatgaaatatacaaatattttattgtagcacctatttttatatgcacatttagcattcctctttccttcactatttagcctatgattttgcagaggtgtcacactgtattaggatctgcatttctaaaactgacgtggtatcaggaaggcattttcaatcattcaaaatgtggagaatttaatggctaaatctttaaaagccaatgcaacccacccaattgaatctgcattttcttttaagaaaacagagctgattgtatcccaatgtattttaaaaaatagggcaattgattgggccattccgagagaattgtttgcaagttttgggttttattagaaaatatttgaaagtatttttattaatgaaccaaaatgacatgttcatttgactactattgtagccgattttcgattgtttaaccaaacccagttgcatttgtacagatccacgtgtactggcacctcagaagaccaaatcatggactgtacaagtctctatacaatgtctttatccctgtgggcagcaagcaatgatgataatgacaaacaggatatctgtaagatggggctactgttgttacagtctcatatgtatcccagcacatgtaattttttaaatagtttctgaataaacacttgataactatgtcaaatatgagggatggaagtaatgattacttaaggtgcaaaagacttaactatgtgtgattgatagaatctccatcattaacaatttaggaaatagttcctaaactttattcctaatacaaaatgtgtttcccctaattagcaaaattgtaaagtatatagtatatatatagtatatagtatatatagtatatagtatatatatagtatatagtatatatatagtatatatatagtatatatagtatatatgtatatatatagtatatatagtatatatatagtatatagtatatatatagtatatagtatatatatactatatatagtatatatatatataacatacatgacatatataagtaatttattcctttgttggttcagggaagtatgattttctaaatgtgtcgcttaatgtgtttattaatgcagtttcaattatatacactctttccttactgaagtattcatctactacgtggagcatggtaagtaatatatcgcatattcacttttctcttaatacaatgtaattgtcatatcagtattatttattcagtctacagttttccatagttttcatatttttaatttgtgtaaaactaccttcaacagttatgatggattccttatctaaagttgatcagtattctaaatgctcaaaatggtgtatatgagctcgtcatctttgaataaggttttctagtgagtttagacacaatttaaggataagaaatgtttcaattatgtgcttcattgctataggtggatctccccatagtttcacctggaatttgtacaatatcaagggctgttcatgaactttgtgtttaaagaacaatttccatggcattctgccacaaagaggcagcattcacccatgagaaaattgacagtaactacttgaattcaggttgaacaggtggtaccagtttcccggaggattaaaaaaaaaacaaattgtaatgctacattgaccaagtacagtaagctgttcatattctttgcaacattttcctttctaatttttttttcaaaggggaaaggaataagcttaataatgtcatggtattatcatgaagaaaagtgcattgcttgctcttcatctacctcctctatattagatccaagattagaaaagaaaaaaaaaatactagcatttgacttcaaaattgagattggtattattcttcacagcagcaggaagttatttttttaatgtcagtatcacttcctcaaccttattatatatagatatgacagttttataaattataaaatataaatgtaaagtggaatcctccatgtaacttagttttatttcttaattggtgcataaaataaaaagataagaattacataaaattaatgacttagttctgggcaatataagtaactttcaaagaaagtttagtgatgtatttttcaaagatttacaaaattttattgtaaaaccagcattattttacatcattttgtcacatatactccctttaggtggttcatttctatcttactcttcctaagatgtccaatattttattttaatcttcaaaataacatttatagattgatttttagaagttccccttaatttttatattatattttcccactgtgttaagaaaataaaagtaaattcatcctgactttcataaatgtgaaaaattttttatcatctcagaatcatgaaactgcacagaattaaaaaatgaatcatttttctcctaccaacgtcttcctgctaatacattaactcataaattagaatataggttgtatagtgttgaatatttgatttttgttgatttaagttgctcactgagtagataattggaatgggcatatcagtagtatatgactggagtaagaaaattctcttcacagaattttgaggaagaaaatatgtaatgtttcaggcaccaattaaatttggatgcacactaagcttactctttgtgcttgttcgatttaatatgttgcataaatctcatatatttagaggtagatattacaaaatattatttctatgtctatgtgattataatgtaaatacttaaattatataagaaaaaataaacatattccaagaaaatgtagataatttgaatgctaatataaaaaatcatttacagctaaactattgattgaagttgtaagttaaaccaccttagcatagatagccgacttggaacatgtcttctgtttagtgaagattatcacctttacacatgaaaagtggaaatttttgacaaatttcctgggaactcaagtctgttcctcaccactgtttcctcaatactagtaagaaaatcaaactagtttgtaatgagaacatccacacgtactgtgaaaaaagttaccatttaagaatttaatccaagatcgcagtttctggccttaggtattagttatatttgtgttactaccttgttttgttggcaaaatattcaaattaatattcattattttctttttctattctattatttcttgtttccttacatctgctccttccctcctttctcttttttatcttttttcttcattatttttcaataaggcaagggaaagagtgaacatagtttagtcctagtttgaaatgccaaaatctggctatttaatttgaagagttccatcgatggttcccaaagtcacatgactccagattaatgataacatagcaaatcacaaatattctgtcaattcatttggaaatgtgctcttcttgcacttttcagatggctccaatttaagatatttgcaggcatggcaagatacctggaatgactacttttaagaataaattttacactaagaaaaaggaactaggaacatcaaagcaacagatttaaatactagaaccaggcacagttaattaattaattttcaaagagaataaaatgttgcaaaagtataaactgtaccatattaacagttttatttatgcataagtttctacaaaccctttgagattctccactattgcaaataaatatgtgagaataaaattaaagtagttggatagacattagtcatgtgcctaaaaataattgtctaacatctatatcctcataaactttatatccattgatattgcagctgtacattataattattaatttcaattcaatgtaatgcctttctatgactaaccatatatatttccatgaatatatgtagcatgtatatgacatacaaaaatagatggattatcaaggagttattacacacacatttttcccaagtttttttacattttaatattttcaaggatttcaaattatactcttattttaatgttttaggaatgttagattggggacagaaaatttgatgcagtaaaatttttgaatgtgacaataatacagtacttttcttttcttcctccggttttagcagaccatggcttactagcacaggtcaaatacttctggtgttaattgtactagcattataaaaactgtactagtattaaaagaacaacatttaactccaagtttgagagatttagactatttcctaaaataatttctgaagattaaaatagaaatattttatagaaagttgatgtaatgcaaatataaaataatttgattttttagagatctaaacaaaatgttatgatatattgcacaatgctaagtatgtcagatccatttttattagatgttagtagagtcattttatacaagaaagtaatagtcaagtaatagtcatagagatatgttgaatggaaatcttccactgaggtttttttttttttttttttttggcatctttattagtaatcatgaagaaatattgtacatttctattataaaataaacatgtatatactttaaaatttcatgtttctaaaagtagaagttatgaaccattgttttgaaggatatttttcatttttgttgtttttaattttagtttaacatatgcacagatgacattgtggctttattttgaagactcatttatacctggtccacattgacaaacttatttgcgatttgtatatttaaataattttttcaagatattaacatacaagttcaattctttcttgattgtaatacttcaatatttaatcatatttatattcatatatatttatgcgagcagcaaaattctgtggtttttggtgttctggagtgtacatattttagatttttactgacaaattaatttctactactagtgatcatttctagcattctcaactaacacacttttcaaaaatcttattgtatacttcattaaaaacaatacataataatggatattgaaaccaaaatttctgcatattttcaatttagtacctgcctattgaaacaaaatctgaagggtgtcagtaatcctaggttaactgattagcaaatttcttttaggatactataatactctgactagcatgtttcatgcatgaaaagttcatcggtgatatgcagactacagttttaaatattaaatttaaaaattgatatataaaaatgaaaacttgaccaataaatatatctcacctgtaataatatatttacataaattatccacacaaaaaatatgccttttaactttataaacatagaatattttttgctatattaacatccaaagtcaaaagggtgtatcactctgaaaattctaataatagtgaaagacttatagctatcaaatttatttaaatcctctgttttaatatctactttaaattttcacttcaaaatataaagttaatggtatatatttttttttatatagctgaaatctgcccttgctaaagtttcataagatatacaatacacataatagggttccttcacagttttatttttgtttagcatttaggtaccatatattaaaatatgaagctataaatttccactagttaagttataattatgttttttcaaacaatatacctcaattatataatcatcccaattttttaaagctagtgaccatgagcatatatatgggtgcatccaaatgagaatattgagatccagaaattactaattttagagaatattcaaaatcattcaccagactgtcatttaaacccattcaatcagtataatgatatatttgttacccaattatgatgaaagatccctaattcttagatgaaaatgtagtatttcactggaaattcgttttttgaatgttaaaccataattattgagtatccagattataaattttaaatatcctctccaagattttatatatataatttatatatatatacagaaaattaaagagggtctttctataaaagtaagcattttaggaaatcactaatttcatatggctttcactatgtttgacttgtaatttaacaacaaatttcatcttcctttaagaatttttaccccagagaaggtatttgtttgcatagcatgtacttgagtcatccgttgtcctattattggttttggcctagtctcttcatttagaagctctgtgcccaaggtcagacacatggaaaatggtctctatcattgcctttaattctcacaactgaatcattctaccactgtcccctacctctctgttattttttgaaagaaaaaaaaaagaaggtgatatatctctttattttgctaacaaaagaattttaagaatatcctaaggcaaattcatgacatcccccacattattaaaataaaaatatgactcaatttctaacatggcaatcaagaactatgtaagcaggacttagtgtgaataaggggatggggattttaaattgttactatgaatttgtgattcattagtaattttaaatacacaacatctaaaacataaaggtggcaatttcttttttagtatattttaaattacacacttttgttgacagggtaggtaatatagtttacaaaatgccactattgcctgcttacaaacattaagaaacttggttgccgactgatgactcatgtggtaactcctgaacaatctgttttatttgatcagatcagctttatttcctttaaaaaaaattttgaattcaaatgattttaggctagatgaatagcttccatatttccatattgtcttaacctagaaacttcaaataattttacattaccagctagaccataagtgtattttaactttcaatcatgattaaataaaatttgttcctctaatattaaaatgtatctatcataatcatggatttttagatattgttcttggggagctcagagtttatcaaagctttatatgtgatatacgaggtagtaaatactatgtaggtttatattaaggaaataaaacaaatataataaacacgagaatgaataattttacatgaaaagggggagctggtatgctgtatattaatattgtatttgaaatataaatatatgtgttaaagttaaccatttacagtgacttggagtctcccagagatgaaattactcctgtttaggtgattttgtaaaatgcactatctctcacagcccctggacatcataagggaagtggcagcagtaatttaagaggtatgtgaatacagaagggaaattataattgcagcatacacagaagcttttcctaaactgttcaactgctcatatacttgacaagagtgtaaatggccaattcattggaaatatgtgaaacatcaaatatgagaatcacttttaggatgacaggtataatttggaaaatctgatccgatagaattaagaccaaaacttttttaaatgggagaagacagaatggccatttttttttcaatgtctttgaacaaaataatgagtagaagtaatatattcttcaccattgcttactgtgtccatgagaggttgtttgtaaatagatatatacctacaggaagtaaaagataatgtaatgaaattctcaaactctccaaatatgtttgtttccttttaagattgtttttcttgagacaaaaaactgaaatactatctaaaataattttggattttatttcctctatcctttttataacaaaatgttacttagctttatatattgctattatgtatgtttctatataaatatataataagttggattttttttcactgttgatttggtttagtcatcatcttagctttttgcctcactgaaagtataggttgtgcttcaaatgagaaaataagaggtgcgaagtatttgctgttatttttatcaaatgatagccaatggctaaacattaaaatggtgattctgttattccgaattaagtttctttgtccaccacagattgatggtgtgtctttggcaactttctttgtgtctctgctttaatttcaattgtaaaaatgaatccaatgaacttggtttatgaacagctgaaagaaatttagattttaagttttctctactaggtgtatgacaactgtgactctaaaatcagcaacatgataattaactattactgttatttacattatgcacctatgaaagggatgattatatcttttagagaaaacatctttctcttactgcgtatgtgtctaatatttgtaaaataattagttcaaaacatttaatttctccattaacttttattttacaaaatgaaataattgtttgtagataattaatggcaactttaaaagtatgacacccttgaaaaagaaagaacttactagtttagttttcttgactttcttacatatttttaccttttgaaataacattgagctttcagtacatttaataagatgtatcatcagtatttatttctcaaaaaattgagtaacctttctaaattagataagttttatttgcttattttatttgcttttaacacattttgaagttatgtgtgaggtaatttccattgttccagttttaattcaaacaatactgaacatacttacaatatctaaagatctttggcctttctttgcagaattaattggaaaaggtacaataaatatgcaatatgtcactcaccattttaatattctaaatttagcaattgctcttatacctaatgattaataatataagttgttctagtttcctttatctgctgtggtataaatttggctgttaatccaataataaaactatttatatttttaacattttcaaatatcattactactgctatttactagtctcagtgacaatctgagatcctccttagatgcttagaggaacctttatacagggttataaatagagaattctaatgattaaaatttaaaatggtagcaatgacaagtccactataaacataataaataaatcattaccttctctattaatgaacagaaacttcagtactttaaagctaatatcttgaaagattttagaagtgcagcaagctggtactcacacctaatgaaaaggtcttagtgaaaatcattttacaatttacaacatttgcattgttctttacaaatgttgtttccattccatgcaagacaattaaaccagaattattttgaccacaaatttttcttcctaattaattggccaaacacaatgtaaataaaataggaaatgcttcagttaatatttactatataaacaaacaaacagatagtgggataatggttttatctatcaccatattctagaattgtgcctggcattcagtaagcacctaatggattaacaaatatgtacttgtagatgtctgcagaccaaggtgaatttagtgaatatcaaaaacttcttgagtgctccatcgtaacgccatttatcttgacataaactgcaaagatggctcaaatgtcgataaggatatcaggtgagtgtttagtactttggcatgaaagtttttggaaaaccattgggatgctactagtgatatttaaatatatttatgctaaacacagaaaatattttccaaatggctcccttttagtctatgtttgttttaattaagttcagatagttaagaaaaaaatggaaataggactagagaactttggcataaaactcatttcccagtctttaattgtaattatttattttgctttgatagtataattggttacatttttcaaaaataataagaaaagtaattgttgctgctctgcacttacattactgttttaaagttcagggtatgccctaatggagatgctggtgaaattttcaggcattttcaacgaatatgatcccggtttttttaagtctggtgaggtgtttatctatttagaaagcttttctgggcaccatgtattttcccctgggagtagaaaatcagttcatctttttaatgacaatattacctcgagggaaaaaagtaatccagaaggaataatacattcctcagggcagttgcctacacagggacacatttttctctggggctgactgcacgtatatttcagtggaagagtttaaatattttaagatatgattgcattttgtcataaggcaccatgactaaaggatacagtattttttgaatatatagtaacatatttttataagcttttatacatcaattataatttaggaaattttatttgctatgaaaattttagctgtattcatatttgaggtaaaataaaataattttaactttcaatttgcatgttttgttaaacataacatcagaagaaaggaggcataagtaaagagatatttgagtttcacttatgaacaccaaacagcacaattttagaagtcttttagctattttgatagcaaaatatatattcttcattctttctatccaaactttaaccttgatgagtacttagatgatgaagtatttacttactgtcatcactttgaatactttggagaatgtataatttgagattgtgaaggagtttgactttgtagccacatcttttaattccttaacattatatttaagattcatgtacttcaaagttctgttttcacttcttttgcccattaaaaatattggaatactactaaaaaacctttgtactttaaatacctatttttttattttacaaactcttgtaataattttccttccaaaataagaataaattttatattgaatatataatgttaatacattaagatacattgatattgtgtttgcattataaaatgtatgctcgcagaactacacctatagaaaatagttttgtttcatgagatattaatattatcaaagcatttcaatagcaatctgatgataaatataaaatatagattacatttaagaatactatacttatgtggaataatgaaaaataaatattaagcatcttttcaaagtaactaatataatcagaatgaaaattagatttttttgaatttaggaaagatctttttttcctgttattttctctaatttcttcataccaaatcagttttacacttatttatttaaaattaacttgaatttctgttgattatttttaaacaaaatcattatttgttgtataaaataaaaataataggttgactaattcataaataaactaaatgtagctatttcattgagcatttaaataacatttaaactaaaatcaatcaaaaacacgtcatttaaacaatgaattttctaaattagaactgcaaaaccaattataatgttgggtactaaagatgttttataatatgctgattcatagtaaatacttttaaaaagaaaaatacatagctttttttcctaaaatttgaatctctttttaatacatgaaacatgattttatgaatagtgctaacatgagaacatcagtgtgtctgtctttttaagtgggaatgtggatattcttgtgcatgagtacccacatttatagttgaaattacatttttgtttgttaaattgaaaaatagacaacataacatctagacaactgtgtgaaaaagtaagctctacatattgataatatattacatcataatatattatatcctattataaatagttttgtaaagtgacttggaaaaatacagttccatgtgtattttcagaaatttaaattatttttgttaaaattgaataatgtgtacatctttaacgcaaattttatatggctaaatttctatttggaatgtcttaaagtaaaatcacatcaaaatttagtcattatatgtattatgaataatactataggcaatattacttccagtaccagagaaagaagaaaatattagtttaaagaagtagttttttatttataaataattagaaaaaaacacttgtgtgggtttttcacatggtaaccaagagtagtatgaattttcatactcttccatgtgtactctgggccatagctatgaaaaatttgtaaccatcataataggaacagtgatgtttggtttaattttgctctctattgcatgtactacaaataaagattcttttccatttgaaaatctttctataaaacaagaaatttcccatgcagatgaaatgaggttacagtgaagcaaaggaaactaagattgtaggtattaccaaactaagacaatttataaaattatctatatatctatatataggtgtgtgtgtgtatatatatatatatatatatatatatatatatatttttttttttttttttcaagacagagtcttgctctgttatccaggctggagtgcagtggtgcaatttctgctcaccacagcccccacctcctgagttcaagtaattctcctgcctcagcctcccaagtagctgggattacaggtgcccaccaccatgcccggctaatttttgtatttttagtagagacggggtttcaccatgttggccaggctggtcttgaactcctgacttcaggtgatccacctgccgcggcctcccaaagtgctgaaattacaggcatgtgccactgtgtctggccaaaataataaatcttatgttagctttaaggagttctgaacttagtatctgtcatgtagtaaataaataaacatgataatcttctaggaattttgggtaaataattttaaacaaattcttaatctcactacactataatctgcctcaacgttgttgttagacgtgtataatgaatattagaagtactggacaaaattccatttgatctcattttcttgaaatgagttaagttattgttgttgccacatttttcatctagaagtcattctgtaataaaactctttgtagttgttatcatctggaactgttacactggacctatggtgctataaagaaaatctctattaaaaaatgaaagtcatttcttttaccaaatatttattcagtcgtaaaaaatgtatatccttatattttgactgagtatctctattgatttatagctgaaatgctggaatgagattgtgtattaactaggattagacgcttggagtctcacatttttctcattaaatttttatttattctggatatggaatgttggtacaaacgttcctatatagtgattattcacatgatccatattaacatttttacattattgttggactacatttcatgacatattattacagcgtcaattactataattatatgtgattcaggaatgttaaaatatttatctctgtatctagattgtcctattcctttcatgcactgtatgtaacatagcatgtttatctggtaactcttgtattgcaacaagccagaaggggttggaaactaaagtaaatagagtaaatactcactcaaagttattgaaaggctcttggaaactgcgactctaagcaaaaaaaacatataaggaaagcaattttaccataggttaatgatgtaaacaagagttaagttcctagggcatatttctggtcacgaaaacatcaccaaatttctaaataaagagcaaaacacttctaatactaaacattgaaatgtatgtgaaatatatatatatacatatatatatgaatgattattaaaatcaagtaaaattattttttacccaattatttcagttcagggtctccagtggctgcagcctatcccagaagctcagggtgcaaggcaagaagtaatcgtgggaccaggcgccgtggctctcgcctgtaatcccagcactttgggaggcagaggctggtgaatcacttgaggtcaggggttccagactagcctggccaacatgatgaaacctcatctccactaaaaatacaaatattaattggatgtagtggtacatgcctgtaatcccagctactcgggaggctgaagcttgaacccggaggcagcggttgcagtgagctgagatcgtgatactgcactccagcctgggtgagggagtgagactctaaaaaaaaaaaaaaaaaaaaaaaaaaaaaaaaaaagactaaccatgggcaagacatcgtcccattgcagggtgcactcacacacacccacactcactcacactgggacagtgtagacacaccgatgaacccaacatgcacatctttgggatactagagtaaactggagtgcttagagaaaacccatgagaacataggaagaacttgcataccccacacagacagtggtccctgcagggtttttctgtttgttggttgtttttccttcatcaagtttgtaatgaaacgatgttgaatgataaaatattatttgaggaattgttgtacaaggattttggcatttgtctgtatatggaaatcaaagacattttaaagtgattataaatctttgtacatgttgacaatattcaattcagttaaaggctttatcacggtacattgtgacctctctttaaatggttacattactttgagctctgaaaatttgttatacttacattgttctaattgttcataactaggaattcactgactttgctttaatgtatgctaggaaaactgaagtagataaatcatacttcccctttcagtctccttctctcttttggatttaattttaactcgaggtttattaattacagaagttacactcatgttgctgcaaatgtattttttctagttgttaatttgttcatgacattctgcttgatgatagtaatattatgatgaaggtgcctcagatatcaaaaaagatttcaagtctatagaacgtacctctagctacagagtcacaggatatgtgacagcaatgatattaggggatgctgagctggaaacccaattcagcaccagagacagaaatactgtattttgactcattcatcttacatggaagatgaagcctgccaatcaagtagaaaatgtaggcctccaagacaataactcacctgcctttttgtggtttatatttttcatcttggttaaaaagtgtccattgataggggatttaatcaaaacattaaagaagacataatatagccaccaaatctaattatttccaactactagatatcagagctttaaaaaaattgtttttaactgcatttgcttcatttttcttatgggatattaatagaaaaatggagtgcatttctaacagttgcattttttcatatgtgtggctatgtttatgctgatattagttaaaagttctaaaaacaagcaaagaaaatatacacagttttttggcattgattggttgatataataattatgtatatttacttaatatgcataatttaaaaatgtatatttttatgtatatatatttatacgtatataattacgtatatttacttaatatacataattattactatgagcttgggcaaaaaatgtattttggcattccactgttcagttttaagtcatttattggtacataattcttttatttctacttcaataaatataattaagttttgtgaaagccgtgttctaatgaacaagtaattctttcttttaaaatattccttttaattctaatttaaagtttcttaagtaaaaatatagctcttcaataataatattataatgtgtttctcttctaaaataaacagattttatactcattattttaaaatgtgatcaaaaccacataattgtttttagtcttctgattgggatttttaaaaagaaaattcaaagtttggcattaaatatattttctgtaagataatataactacatatgataaaatgattaagtactctgatagtgtcactatttcaataccattattatctttaacatatgttaaaacactccagtacataactaataaagaggaattcacatggccagcaattttaaactggtgcagcaaacttatcttttgtgtttgcaaacataagagaactgaagaagcaagatgcaaacaatgtctccgttgttcagcatgtgttttatgatataatacattcgttcatgttgtgttatacaaattttgcagggagggttgctcgttttatcaatttgtgtattttttatttcatattttgtacgcaatcatgagcatttttcttataaattgtacacaacaagaacctgttgaagattagaaggaaggagcagcacatacttttagcaatccttttatcttaccaatcactggaagaaaatgatgccaagaagccatgtgagatatcatctctgtctgtcatgttttcagaacagagtgtggcttactaatgttgccattgcaggctatgctttgtcaagtgaatacggttttcatcttaaggggatagtaagcaagatgttagcaatactcactcatcttcagatttcattgtcaaatatactaatatttcaaaaatatggttttcatctagaaaaaaatggagattttgagtgtacaaatatagccaatgcaggttaaatttaaacagagatttttttttaatctctcccttttttatactttttttttttttttttgagacagagtcttgccctgtcacccaggcttcagtgcaatggtgcaatctcgactcactgcaacctccgcctcccaggttctagtgattctcctgcctcagcctcccaagtagctgggattacaggcacgcgctaccacacctggctaatttttgtatctttagtagagacaggtttcaccatgttggtcaggctggtatcgaactcctgacctcatgatccacccgcctcggactcccgaagtgctgggattacaggcataagccaccacacctggcccccttttttatactttttacaagtaatctgacactaggtgccacataattaagataaagacaaaagtgcaaaaccatgtaaaatattgacttctaattgtgaattagtttcccttttctacttgttttgccttgttggatatgaaacatttcaagtatgtcattgtaggattatttttgacattttattcttagaatggtgatttagttgcataattctcatttgctataccacttttctaaaaaataaatgtttgaattattgaaatatcccaagatactccttgttatataattgtagatcattactttattttcagacaaattatgctattgtggataaatattcaatgtataaaatacaggacttcttttttcctgttttacaaaactccagtgccctttcttatctactattttaatattcctttgctatagtatattgcataatgtggagtcaactattttttacaatatgtacgtgttgatctgaaagttcctattgagttaaataatgaaaaataatttggtggaccatgaattttaaatttgttaaaaattgttttatttgtgtatgtgtataaaattaaattttgcaaattggtaaatttattcttcatttaaccttgttgctttgagtactcctaaagcttgtaataattctttggggagtaatataaaatatatcattcataagtgaa

SEQ ID NO: 182038 - DNA, 4318 bp, Homo sapiens
  Payload ID: 15848
  Gene Symbol: SLITRK6
  Gene Name: SLIT and NTRK-like family, member 6
  Uniprot ID: Q9H5Y7
  ENST ID: ENST00000400286
  CDS Start-End: 600-3125
atatgacactggcagattaaaacgctctgatggggaagggcttaaaggctgagtcaaaagccaagaagtctctttatttacgcctacctcccagcccttggcaatctgactaataacaaactgagctaacaagaaatactagaaaaggaggaaggagaacattgctgtagcttggatctacaacctaagaaagcaagagtgatcaatctcagctctgttaaacatcttgtttacttactgcattcagcagcttgcaaatggttaactatatgcaaaaaagtcagcatagctgtgaagtatgccgtgaattttaattgagggaaaaagggacaattgcttcaggatgctctagtatgcactctgcttgaaatattttcaatgaaatgctcagtattctatctttgaccagaggttttaactttatgaagctatgggacttgacaaaaagtgatatttgagaagaaagtacgcagtggttggtgttttcttttttttaataaaggaattgaattactttgaacacctcttccagctgtgcattacagataacgtcaggaagagtctctgctttacagaatcggatttcatcacatgacaacatgaagctgtggattcatctcttttattcatctctccttgcctgtatatctttacactcccaaactccagtgctctcatccagaggctcttgtgattctctttgcaattgtgaggaaaaagatggcacaatgctaataaattgtgaagcaaaaggtatcaagatggtatctgaaataagtgtgccaccatcacgacctttccaactaagcttattaaataacggcttgacgatgcttcacacaaatgacttttctgggcttaccaatgctatttcaatacaccttggatttaacaatattgcagatattgagataggtgcatttaatggccttggcctcctgaaacaacttcatatcaatcacaattctttagaaattcttaaagaggatactttccatggactggaaaacctggaattcctgcaagcagataacaattttatcacagtgattgaaccaagtgcctttagcaagctcaacagactcaaagtgttaattttaaatgacaatgctattgagagtcttcctccaaacatcttccgatttgttcctttaacccatctagatcttcgtggaaatcaattacaaacattgccttatgttggttttctcgaacacattggccgaatattggatcttcagttggaggacaacaaatgggcctgcaattgtgacttattgcagttaaaaacttggttggagaacatgcctccacagtctataattggtgatgttgtctgcaacagccctccattttttaaaggaagtatactcagtagactaaagaaggaatctatttgccctactccaccagtgtatgaagaacatgaggatccttcaggatcattacatctggcagcaacatcttcaataaatgatagtcgcatgtcaactaagaccacgtccattctaaaactacccaccaaagcaccaggtttgataccttatattacaaagccatccactcaacttccaggaccttactgccctattccttgtaactgcaaagtcctatccccatcaggacttctaatacattgtcaggagcgcaacattgaaagcttatcagatctgagacctcctccgcaaaatcctagaaagctcattctagcgggaaatattattcacagtttaatgaagtctgatctagtggaatatttcactttggaaatgcttcacttgggaaacaatcgtattgaagttcttgaagaaggatcgtttatgaacctaacgagattacaaaaactctatctaaatggtaaccacctgaccaaattaagtaaaggcatgttccttggtctccataatcttgaatacttatatcttgaatacaatgccattaaggaaatactgccaggaacctttaatccaatgcctaaacttaaagtcctgtatttaaataacaacctcctccaagttttaccaccacatattttttcaggggttcctctaactaaggtaaatcttaaaacaaaccagtttacccatctacctgtaagtaatattttggatgatcttgatttgctaacccagattgaccttgaggataacccctgggactgctcctgtgacctggttggactgcagcaatggatacaaaagttaagcaagaacacagtgacagatgacatcctctgcacttcccccgggcatctcgacaaaaaggaattgaaagccctaaatagtgaaattctctgtccaggtttagtaaataacccatccatgccaacacagactagttaccttatggtcaccactcctgcaacaacaacaaatacggctgatactattttacgatctcttacggacgctgtgccactgtctgttctaatattgggacttctgattatgttcatcactattgttttctgtgctgcagggatagtggttcttgttcttcaccgcaggagaagatacaaaaagaaacaagtagatgagcaaatgagagacaacagtcctgtgcatcttcagtacagcatgtatggccataaaaccactcatcacactactgaaagaccctctgcctcactctatgaacagcacatggtgagccccatggttcatgtctatagaagtccatcctttggtccaaagcatctggaagaggaagaagagaggaatgagaaagaaggaagtgatgcaaaacatctccaaagaagtcttttggaacaggaaaatcattcaccactcacagggtcaaatatgaaatacaaaaccacgaaccaatcaacagaatttttatccttccaagatgccagctcattgtacagaaacattttagaaaaagaaagggaacttcagcaactgggaatcacagaatacctaaggaaaaacattgctcagctccagcctgatatggaggcacattatcctggagcccacgaagagctgaagttaatggaaacattaatgtactcacgtccaaggaaggtattagtggaacagacaaaaaatgagtattttgaacttaaagctaatttacatgctgaacctgactatttagaagtcctggagcagcaaacatagatggagagtttgagggctttcgcagaaatgctgtgattctgttttaagtccataccttgtaaataagtgccttacgtgagtgtgtcatcaatcagaacctaagcacagcagtaaactatggggaaaaaaaaagaagaagaaaaagaaactcagggatcactgggagaagccatggcattatcttcaggcaatttagtctgtcccaaataaaataaatccttgcatgtaaatcattcaaggattatagtaatatttcatatactgaaaagtgtctcataggagtcctcttgcacatctaaaaaggctgaacatttaagtatcccgaattttcttgaattgctttccctatagattaattacaattggatttcatcatttaaaaaccatacttgtatatgtagttataatatgtaaggaatacattgtttataaccagtatgtacttcaaaaatgtgtattgtcaaacatacctaactttcttgcaataaatgcaaaagaaactggaacttgacaattataaatagtaatagtgaagaaaaaatagaaaggttgcaattatataggccatgggtggctcaaaactttgaacatttgagcttaaacaaatgccactctcatgcattctaaattaaaaagttaaaatgattaatagttcaggtggaagaaataagcatactttttgggttttctacacattttgtgtagacaattttaatgtcagtgctgctgtgaactaaagtatgtcatttatgctcaaagtttaattcttcttcttgggatattttaaaaatgctactgagattctgctgtaaatatgactagagaatatattgggtttgctttatttcataggcttaattctttgtaaatctgaatgaccataatagaaatacatttcttgtggcaagtaattcacagttgtaaagtaaataggaaaaattattttatttttattgatgtacattgatagatgccataaatcagtagcaaaaggcacttctaaaggtaagtggtttaagttgcctcaagagagggacaatgtagctttattttacaagaaggcatagttagatttctatgaaatatttattctgtacagttttatatagttttggttcacaaaagtaattattcttgggtgcctttcaagaaaattaaaaatactactcactacaataaaactaaaatgaaaa

SEQ ID NO: 182039 - DNA, 7925 bp, Homo sapiens
  Payload ID: 15849
  Gene Symbol: SLIT1
  Gene Name: slit guidance ligand 1
  Uniprot ID: O75093
  ENST ID: ENST00000266058
  CDS Start-End: 247-4851
gggagacgcaggcggcgaaacggcagaggagccgagccccctccgcccaaggcgccctccctccgtccgcgcacaggcgccgtcgcttggaggagcaaggtgcctcccagcccgcaggggcgccgcgcgcaagcccgcgggctcttcggtggctctgccccgggactgcacctggaggcggccccggacggggatggtcagcggctgctgccgtctggctcgcgagcgggacgctgtgagggcaccatggcgctgactcccgggtgggggtcctcggcggggccggtccggccggagctctggctgctgctgtgggcagccgcgtggcgcctgggtgcctcggcgtgccccgccctctgcacctgcaccggaaccacggtggactgccacggcacggggctgcaggccattcccaagaatatacctcggaacaccgagcgcctggaactcaatggcaacaacatcactcggatccataagaatgactttgcggggctcaagcagctgcgggtgctgcagctgatggagaaccagattggagcagtggaacgtggtgcttttgatgacatgaaggagctggagcggctgcgactgaaccgaaaccagctgcacatgttaccggaactgctgttccagaacaaccaggctttgtcaagactggacttgagtgagaacgccatccaggccatccccaggaaagcttttcggggagctacggaccttaaaaatttacagctggacaagaaccagatcagctgcattgaggaaggggccttccgtgctctgcgggggctggaggtgctgaccctgaacaacaacaatatcaccaccatccccgtgtccagcttcaaccatatgcccaagctacggaccttccgcctgcactccaaccacctgttttgcgactgccacctggcctggctctcgcagtggctgaggcagcggccaaccatcgggctcttcacccagtgctcgggcccagccagcctgcgtggcctcaatgtggcagaggtccagaagagtgagttcagctgctcaggccagggagaagcggggcgcgtgcccacctgcaccctgtcctccggctcctgcccggccatgtgcacctgcagcaatggcatcgtggactgtcgtggaaaaggcctcactgccatcccggccaacctgcccgagaccatgacggagatacgcctggagctgaacggcatcaagtccatccctcctggagccttctcaccctacagaaagctacggaggatagacctgagcaacaatcagatcgctgagattgcacccgacgccttccagggcctccgctccctgaactcgctggtcctctatggaaacaagatcacagacctcccccgtggtgtgtttggaggcctatacaccctacagctcctgctcctgaatgccaacaagatcaactgcatccggcccgatgccttccaggacctgcagaacctctcactgctctccctgtatgacaacaagatccagagcctcgccaagggcactttcacctccctgcgggccatccagactctgcacctggcgcagaaccctttcatttgcgactgtaacctcaagtggctggcagacttcctgcgcaccaatcccatcgagacgagtggtgcccgctgtgccagtccccggcgcctcgccaacaagcgcatcgggcagatcaagagcaagaagttccggtgctcagccaaagagcagtacttcattccaggcacggaggattaccagctgaacagcgagtgcaacagcgacgtggtctgtccccacaagtgccgctgtgaggccaacgtggtggagtgctccagcctgaagctcaccaagatccctgagcgcatcccccagtccacggcagaactgcgattgaataacaatgagatttccatcctggaggccactgggatgtttaaaaaacttacacatctgaagaaaatcaatctgagcaacaacaaggtgtcagaaattgaagatggggccttcgagggcgcagcctctgtgagcgagctgcacctaactgccaaccagctggagtccatccggagcggcatgttccggggtctggatggcttgaggaccctaatgctgcggaacaaccgcatcagctgcatccacaacgacagcttcacgggcctgcgcaacgtccggctcctctcgctctacgacaaccagatcaccaccgtatccccaggagccttcgacaccctccagtccctctccacactgaatctcctggccaaccctttcaactgcaactgccagctggcctggctaggaggctggctacggaagcgcaagatcgtgacggggaacccgcgatgccagaaccctgactttttgcggcagattcccctgcaggacgtggccttccctgacttcaggtgtgaggaaggccaggaggaggggggctgcctgccccgcccacagtgcccacaggagtgcgcctgcctggacaccgtggtccgatgcagcaacaagcacctgcgggccctgcccaagggcattcccaagaatgtcacagaactctatttggacgggaaccagttcacgctggttccgggacagctgtctaccttcaagtacctgcagctcgtggacctgagcaacaacaagatcagttccttaagcaattcctccttcaccaacatgagccagctgaccactctgatcctcagctacaatgccctgcagtgcatcccgcctttggccttccagggactccgctccctgcgcctgctgtctctccacggcaatgacatctccaccctccaagagggcatctttgcagacgtgacctccctgtctcacctggccattggtgccaaccccctatactgtgactgccacctccgctggctgtccagctgggtgaagactggctacaaggaaccgggcattgctcgttgtgctgggccccaggacatggagggcaagctgctcctcaccacgcctgccaagaagtttgaatgccaaggtcctccaacgctggctgtccaggccaagtgtgatctctgcttgtccagtccgtgccagaaccagggcacctgccacaacgacccccttgaggtgtacaggtgcgcctgccccagcggctataagggtcgagactgtgaggtgtccctggacagctgttccagtggcccctgtgaaaatgggggcacctgccatgcacaggagggcgaggatgccccgttcacgtgctcctgtcccaccggctttgaaggaccaacctgtggggtgaacacagatgactgtgtggatcatgcctgtgccaatgggggcgtctgtgtggatggtgtgggcaactacacctgccagtgccccctgcagtatgagggaaaggcctgtgagcagctggtggacttgtgctctccggatctgaacccatgtcaacacgaggcccagtgtgtgggcaccccggatgggcccaggtgtgagtgcatgccaggttatgcaggtgacaactgcagtgagaaccaggatgactgcagggaccaccgctgccagaatggggcccagtgtatggatgaagtcaacagctactcctgcctctgtgctgagggctacagtggacagctctgtgagatccctccccatctgcctgcccccaagagcccctgtgaggggactgagtgccagaatggggccaactgtgtggaccagggcaacaggcctgtgtgccagtgcctcccaggcttcggtggccctgagtgtgagaagttgctcagtgtcaactttgtggatcgggacacttacctgcagttcactgacctgcaaaactggccacgggccaacatcacgttgcaggtctccacggcagaggacaatgggatccttctgtacaacggggacaacgaccacattgcagttgagctgtaccagggccatgtgcgtgtcagctacgacccaggcagctaccccagctctgccatctacagtgctgagacgatcaacgatgggcaattccacaccgttgagctggttgcctttgaccagatggtgaatctctccattgatggcgggagccccatgaccatggacaactttggcaaacattacacgctcaacagcgaggcgccactctatgtgggagggatgcccgtggatgtcaactcagctgccttccgcctgtggcagatcctcaacggcaccggcttccacggttgcatccgaaacctgtacatcaacaacgagctgcaggacttcaccaagacgcagatgaagccaggcgtggtgccaggctgcgaaccctgccgcaagctctactgcctgcatggcatctgccagcccaatgccaccccagggcccatgtgccactgcgaggctggctgggtgggcctgcactgtgaccagcccgctgacggcccctgccatggccacaagtgtgtccatgggcaatgcgtgcccctcgacgctctttcctacagctgccagtgccaggatgggtactcgggggcactgtgcaaccaggccggggccctggcagagccctgcagaggcctgcagtgcctgcatggccactgccaggcctcaggcaccaagggggcacactgtgtgtgtgaccccggcttttcgggcgagctgtgtgagcaagagtccgagtgccggggggaccctgtccgggactttcaccaggtccagaggggctatgccatctgccagaccacgcgccccctgtcatgggtggagtgccggggctcgtgcccaggccagggctgctgccagggccttcggctgaagcggaggaagttcacctttgagtgcagcgatgggacctcttttgccgaggaggtggaaaagcccaccaagtgtggctgtgccctctgcgcatagcgctgggcgtggacaggccggtgagggcgggcaaggggccccagccgctgcagcagcggagacagtcgccagcagctgggctggggtgcaggtcatcacaggacggctcctgggcagctgggccctcctgggtggggtggtgccagagcagccttttaaaagcaaattgcgccatagctgggggcagcgggggtgggcgaggcctgagctgcgggctgccctctccggaagtgccttgcacaaataggcgcttaataaatatttgttgagtgaatgtgtgcgtgaggtcaggccaagaagtgcagaacgatgacacccctccttacctgctatctgaatctggagaagaaaaatgacagccttccaaaccaacccttccctttggcctgtggcccaggctggcttggaactgggtctgtggccccagaagcctcttacccctctgcgggcaaccatgaagtactgtcagcctccccgggaagccagcctggttcattctgctgctacagaatctgctggtggtaggccaggctctggagcgggggtgccgcctcctgctggccagggagggtcggacccttgccccctgggctgactggcagctctgcagccacggcttgggaacgaggctgtgggtggaggtggttcttaggaccaggcctctgaatcctaaagttctagcatgactactgtagctgcgagggcttatgtggaggaaacagtcacaggggctgctcagggtggcagaccccactaaagagggcagagggttctttgctctagataaacaaacatcatctgcctccagacactggccacagtaggagtattggtcctgggcttccccagccaccagtcagccacaagctgtcggtgacctattggtagagggactgggtgtgagggtctgggccagggtgcttgacctgggagcagctggttcagagtccttcacaccgcaggccagtagggagcagtggaagggacagtgctccaggcattgggaagtccctgctggctctatcactcggggcaaacttctccccacctgggccttgggttcttcagctataaaatggccagaggtggggggcgggatgactaaaggaacagtgcagactcccccactgtggtcttgggaggccagaggagttagaagacctatctatctatctatctatctacattgatcacatcaaaagtatttatgtgcctaacccggggctggggattgtggacgttctggcctaatggacagatgtgaactcatcccagagcatcgcaggaatgaccaggatgcccgggaagagttgagctgagtgggggctccagccacagacagcggcccaggccagggagttgctggcaacgaaggagccagtggtggaagaagaagaggccctgaatatacgattgcctgcccacgttgtcttctcttccatacacagtgaaaatgtagaaagatggtttgtgaggccaaactgtgaatgggctaaagggaggcaaagttgcactctccttccccagagggctcaccaagagggcacacccccgggggttctggtgggcaacgggggtgagcatgtccctgccctggctccctccatctgtgaccaggaggcatggctgggtgtatgttcaggtgaggctcagagtggcattgtgtccctgtcccctgcccagggcagtgaggggagcccttgatgctgattagaaggctagaactggggtagaggtgcctggcatgtctcatgccatggggactcaatctagcaactgtgagtcctggggtccctgtgatgggaagagggcagtgccctgcccaatgtggcaggtgtcctcatggcaggatctgcccctcaccagggggctgggatctacttgcttggagctctgagcaaggccacaatgcccgcccccacccccaagtagactgcagcctgggcctcatggggcttctcccaggcccacatggcatccctctctgagtttccaggccaccgtgggaccctgcagagcatctgcaccgggctggatagggcagaaaagctcaagggcagctagcttgcctcttccctggaagaaaggtgctctgggactcaccaaccctgagaaagatagctttcctggccaccaccattccccaccaccctggagaagccaattcccaggcttgaagggcactggctggcaggaggcctcttcattctgcaggaggtggaaaggacacctgtagacaggtgatgctcacccctcacctggcgccatggggctgggaggtgagcggctggcatgtttgttcctagggagcaccatgtgagcttaaggctcccctgaccggccccaccacatggcccagcctcctagcacagcagcgctgacctcagtgcagtctgaggattggaatccaccatgagatgatgtgagagctgtgtgccccaggatcaactttttctccaacttggccatcagccagcgagttgctaaggacctgagtcagcactcacgttgcctattcacactccgcttgaaagtccggaaggtggctactgcaaaatcacccctctgagaagtcctctctccacatcttgtccccctttgtgaagacccctagttcgctctgcattttaggcatgaagagatacagcagggtgcgtccggagggagctgtggccttgcaacaccactggcaacagggccggggctcccggtgaaggtgtcaggaagtggaaaaggctggactttgtctcctctttgcctgctggtagcctaaccgcaaaagtatctctttatacagaatacttacagattctaatatatatttgtatttcattttgttacagtatttttatatgttaaagtcaacatccagcgtcttgttttgcctttcagatgctatgtggtcgtggcacgttttgttgggggtttctgtagtcgtcttgtttggatcaactcctagaggctggtttagaacaggcccatgagggagctgcacctgccctggaagtattgttttagactatgtcgatattgtctgttgtcttccatgtgaacatgacattgagtcactctgc

SEQ ID NO: 182040 - DNA, 2345 bp, Homo sapiens
  Payload ID: 15849
  Gene Symbol: SLIT1
  Gene Name: slit guidance ligand 1
  ENST ID: ENST00000314867
  CDS Start-End: 1-2345
ctctggctgctgctgtgggcagccgcgtggcgcctgggtgcctcggcgtgccccgccctctgcacctgcaccggaaccacggtggactgccacggcacggggctgcaggccattcccaagaatatacctcggaacaccgagcgcctggaactcaatggcaacaacatcactcggatccataagaatgactttgcggggctcaagcagctgcgggtgctgcagctgatggagaaccagattggagcagtggaacgtggtgcttttgatgacatgaaggagctggagcggctgcgactgaaccgaaaccagctgcacatgttaccggaactgctgttccagaacaaccaggctttgtcaagactggacttgagtgagaacgccatccaggccatccccaggaaagcttttcggggagctacggaccttaaaaatttacagctggacaagaaccagatcagctgcattgaggaaggggccttccgtgctctgcgggggctggaggtgctgaccctgaacaacaacaatatcaccaccatccccgtgtccagcttcaaccatatgcccaagctacggaccttccgcctgcactccaaccacctgttttgcgactgccacctggcctggctctcgcagtggctgaggcagcggccaaccatcgggctcttcacccagtgctcgggcccagccagcctgcgtggcctcaatgtggcagaggtccagaagagtgagttcagctgctcaggccagggagaagcggggcgcgtgcccacctgcaccctgtcctccggctcctgcccggccatgtgcacctgcagcaatggcatcgtggactgtcgtggaaaaggcctcactgccatcccggccaacctgcccgagaccatgacggagatacgcctggagctgaacggcatcaagtccatccctcctggagccttctcaccctacagaaagctacggaggatatgccccctctccttctgctcaccttgcagagacctgagcaacaatcagatcgctgagattgcacccgacgccttccagggcctccgctccctgaactcgctggtcctctatggaaacaagatcacagacctcccccgtggtgtgtttggaggcctatacaccctacagctcctgctcctgaatgccaacaagatcaactgcatccggcccgatgccttccaggacctgcagaacctctcactgctctccctgtatgacaacaagatccagagcctcgccaagggcactttcacctccctgcgggccatccagactctgcacctggcgcagaaccctttcatttgcgactgtaacctcaagtggctggcagacttcctgcgcaccaatcccatcgagacgagtggtgcccgctgtgccagtccccggcgcctcgccaacaagcgcatcgggcagatcaagagcaagaagttccggtgctcagccaaagagcagtacttcattccaggcacggaggattaccagctgaacagcgagtgcaacagcgacgtggtctgtccccacaagtgccgctgtgaggccaacgtggtggagtgctccagcctgaagctcaccaagatccctgagcgcatcccccagtccacggcagaactgcgattgaataacaatgagatttccatcctggaggccactgggatgtttaaaaaacttacacatctgaagaaaatcaatctgagcaacaacaaggtgtcagaaattgaagatggggccttcgagggcgcagcctctgtgagcgagctgcacctaactgccaaccagctggagtccatccggagcggcatgttccggggtctggatggcttgaggaccctaatgctgcggaacaaccgcatcagctgcatccacaacgacagcttcacgggcctgcgcaacgtccggctcctctcgctctacgacaaccagatcaccaccgtatccccaggagccttcgacaccctccagtccctctccacactgaatctcctggccaaccctttcaactgcaactgccagctggcctggctaggaggctggctacggaagcgcaagatcgtgacggggaacccgcgatgccagaaccctgactttttgcggcagattcccctgcaggacgtggccttccctgacttcaggtgtgaggaaggccaggaggaggggggctgcctgccccgcccacagtgcccacaggagtgcgcctgcctggacaccgtggtccgatgcagcaacaagcacctgcgggccctgcccaagggcattcccaagaatgtcacagaactctatttggacgggaaccagttcacgctggttccgggacagctgtctaccttcaagtacctgcagctcgt

SEQ ID NO: 182041 - DNA, 1695 bp, Homo sapiens
  Payload ID: 15849
  Gene Symbol: SLIT1
  Gene Name: slit guidance ligand 1
  ENST ID: ENST00000371041
  CDS Start-End: 247-1476
gggagacgcaggcggcgaaacggcagaggagccgagccccctccgcccaaggcgccctccctccgtccgcgcacaggcgccgtcgcttggaggagcaaggtgcctcccagcccgcaggggcgccgcgcgcaagcccgcgggctcttcggtggctctgccccgggactgcacctggaggcggccccggacggggatggtcagcggctgctgccgtctggctcgcgagcgggacgctgtgagggcaccatggcgctgactcccgggtgggggtcctcggcggggccggtccggccggagctctggctgctgctgtgggcagccgcgtggcgcctgggtgcctcggcgtgccccgccctctgcacctgcaccggaaccacggtggactgccacggcacggggctgcaggccattcccaagaatatacctcggaacaccgagcgcctggaactcaatggcaacaacatcactcggatccataagaatgactttgcggggctcaagcagctgcgggtgctgcagctgatggagaaccagattggagcagtggaacgtggtgcttttgatgacatgaaggagctggagcggctgcgactgaaccgaaaccagctgcacatgttaccggaactgctgttccagaacaaccaggctttgtcaagactggacttgagtgagaacgccatccaggccatccccaggaaagcttttcggggagctacggaccttaaaaatttacagctggacaagaaccagatcagctgcattgaggaaggggccttccgtgctctgcgggggctggaggtgctgaccctgaacaacaacaatatcaccaccatccccgtgtccagcttcaaccatatgcccaagctacggaccttccgcctgcactccaaccacctgttttgcgactgccacctggcctggctctcgcagtggctgaggcagcggccaaccatcgggctcttcacccagtgctcgggcccagccagcctgcgtggcctcaatgtggcagaggtccagaagagtgagttcagctgctcaggccagggagaagcggggcgcgtgcccacctgcaccctgtcctccggctcctgcccggccatgtgcacctgcagcaatggcatcgtggactgtcgtggaaaaggcctcactgccatcccggccaacctgcccgagaccatgacggagatacgcctggagctgaacggcatcaagtccatccctcctggagccttctcaccctacagaaagctacggaggatagacctgagcaacaatcagatcgctgagattgcacccgacgccttccagggcctccgctccctgaactcgctccacactggccccgtcacctgtccacacacgacaggcacacacagctcccactgcagggcctttgctgttgctgtgcctcactccaggaatgaccttgaagccatgtttgaagaggaagtacccaggattttttactcagcttgaacgtttacgagggtagcttgtggggtccgattatgatattgggaatggcatacaacccccctccccaaacctcctggatgttttcactgtcctcctgaacccacccatgtctacatgtgtttttttgaacttttgtttttttaaaaaacctatacatggaattcatgctcaatgcagaaaactttgaaaatgctaaagtataaaaaaaaaatgcttgaa

SEQ ID NO: 182042 - DNA, 4564 bp, Homo sapiens
  Payload ID: 15849
  Gene Symbol: SLIT1
  Gene Name: slit guidance ligand 1
  ENST ID: ENST00000371070
  CDS Start-End: 85-4470
ggactgcacctggaggcggccccggacggggatggtcagcggctgctgccgtctggctcgcgagcgggacgctgtgagggcaccatggcgctgactcccgggtgggggtcctcggcggggccggtccggccggagctctggctgctgctgtgggcagccgcgtggcgcctgggtgcctcggcgtgccccgccctctgcacctgcaccggaaccacggtggactgccacggcacggggctgcaggccattcccaagaatatacctcggaacaccgagcgcctggaactcaatggcaacaacatcactcggatccataagaatgactttgcggggctcaagcagctgcgggtgctgcagctgatggagaaccagattggagcagtggaacgtggtgcttttgatgacatgaaggagctggagcggctgcgactgaaccgaaaccagctgcacatgttaccggaactgctgttccagaacaaccaggctttgtcaagactggacttgagtgagaacgccatccaggccatccccaggaaagcttttcggggagctacggaccttaaaaatttacagctggacaagaaccagatcagctgcattgaggaaggggccttccgtgctctgcgggggctggaggtgctgaccctgaacaacaacaatatcaccaccatccccgtgtccagcttcaaccatatgcccaagctacggaccttccgcctgcactccaaccacctgttttgcgactgccacctggcctggctctcgcagtggctgaggcagcggccaaccatcgggctcttcacccagtgctcgggcccagccagcctgcgtggcctcaatgtggcagaggtccagaagagtgagttcagctgctcaggccagggagaagcggggcgcgtgcccacctgcaccctgtcctccggctcctgcccggccatgtgcacctgcagcaatggcatcgtggactgtcgtggaaaaggcctcactgccatcccggccaacctgcccgagaccatgacggagatacgcctggagctgaacggcatcaagtccatccctcctggagccttctcaccctacagaaagctacggaggatagacctgagcaacaatcagatcgctgagattgcacccgacgccttccagggcctccgctccctgaactcgctggtcctctatggaaacaagatcacagacctcccccgtggtgtgtttggaggcctatacaccctacagctcctgctcctgaatgccaacaagatcaactgcatccggcccgatgccttccaggacctgcagaacctctcactgctctccctgtatgacaacaagatccagagcctcgccaagggcactttcacctccctgcgggccatccagactctgcacctggcgcagaaccctttcatttgcgactgtaacctcaagtggctggcagacttcctgcgcaccaatcccatcgagacgagtggtgcccgctgtgccagtccccggcgcctcgccaacaagcgcatcgggcagatcaagagcaagaagttccggtgctcagccaaagagcagtacttcattccaggcacggaggattaccagctgaacagcgagtgcaacagcgacgtggtctgtccccacaagtgccgctgtgaggccaacgtggtggagtgctccagcctgaagctcaccaagatccctgagcgcatcccccagtccacggcagaactgcgattgaataacaatgagatttccatcctggaggccactgggatgtttaaaaaacttacacatctgaagaaaatcaatctgagcaacaacaaggtgtcagaaattgaagatggggccttcgagggcgcagcctctgtgagcgagctgcacctaactgccaaccagctggagtccatccggagcggcatgttccggggtctggatggcttgaggaccctaatgctgcggaacaaccgcatcagctgcatccacaacgacagcttcacgggcctgcgcaacgtccggctcctctcgctctacgacaaccagatcaccaccgtatccccaggagccttcgacaccctccagtccctctccacactgaatctcctggccaaccctttcaactgcaactgccagctggcctggctaggaggctggctacggaagcgcaagatcgtgacggggaacccgcgatgccagaaccctgactttttgcggcagattcccctgcaggacgtggccttccctgacttcaggtgtgaggaaggccaggaggaggggggctgcctgccccgcccacagtgcccacaggagtgcgcctgcctggacaccgtggtccgatgcagcaacaagcacctgcgggccctgcccaagggcattcccaagaatgtcacagaactctatttggacgggaaccagttcacgctggttccgggacagctgtctaccttcaagtacctgcagctcgtggacctgagcaacaacaagatcagttccttaagcaattcctccttcaccaacatgagccagctgaccactctgatcctcagctacaatgccctgcagtgcatcccgcctttggccttccagggactccgctccctgcgcctgctgtctctccacggcaatgacatctccaccctccaagagggcatctttgcagacgtgacctccctgtctcacctggccattggtgccaaccccctatactgtgactgccacctccgctggctgtccagctgggtgaagactggctacaaggaaccgggcattgctcgttgtgctgggccccaggacatggagggcaagctgctcctcaccacgcctgccaagaagtttgaatgccaaggtcctccaacgctggctgtccaggccaagtgtgatctctgcttgtccagtccgtgccagaaccagggcacctgccacaacgacccccttgaggtgtacaggtgcgcctgccccagcggctataagggtcgagactgtgaggtgtccctggacagctgttccagtggcccctgtgaaaatgggggcacctgccatgcacaggagggcgaggatgccccgttcacgtgctcctgtcccaccggctttgaaggaccaacctgtggggtgaacacagatgactgtgtggatcatgcctgtgccaatgggggcgtctgtgtggatggtgtgggcaactacacctgccagtgccccctgcagtatgagggaaaggcctgtgagcagctggtggacttgtgctctccggatctgaacccatgtcaacacgaggcccagtgtgtgggcaccccggatgggcccaggtgtgagtgcatgccaggttatgcaggtgacaactgcagtgagaaccaggatgactgcagggaccaccgctgccagaatggggcccagtgtatggatgaagtcaacagctactcctgcctctgtgctgagggctacagtggacagctctgtgagatccctccccatctgcctgcccccaagagcccctgtgaggggactgagtgccagaatggggccaactgtgtggaccagggcaacaggcctgtgtgccagtgcctcccaggcttcggtggccctgagtgtgagaagttgctcagtgtcaactttgtggatcgggacacttacctgcagttcactgacctgcaaaactggccacgggccaacatcacgttgcaggtctccacggcagaggacaatgggatccttctgtacaacggggacaacgaccacattgcagttgagctgtaccagggccatgtgcgtgtcagctacgacccaggcagctaccccagctctgccatctacagtgctgagacgatcaacgatgggcaattccacaccgttgagctggttgcctttgaccagatggtgaatctctccattgatggcgggagccccatgaccatggacaactttggcaaacattacacgctcaacagcgaggcgccactctatgtgggagggatgcccgtggatgtcaactcagctgccttccgcctgtggcagatcctcaacggcaccggcttccacggttgcatccgaaacctgtacatcaacaacgagctgcaggacttcaccaagacgcagatgaagccaggcgtggtgccaggctgcgaaccctgccgcaagctctactgcctgcatggcatctgccagcccaatgccaccccagggcccatgtgccactgcgaggctggctgggtgggcctgcactgtgaccagcccgctgacggcccctgccatggccacaagtgtgtccatgggcaatgcgtgcccctcgacgctctttcctacagctgccagtgccaggatgggtactcgggggcactgtgcaaccagagtccgagtgccggggggaccctgtccgggactttcaccaggtccagaggggctatgccatctgccagaccacgcgccccctgtcatgggtggagtgccggggctcgtgcccaggccagggctgctgccagggccttcggctgaagcggaggaagttcacctttgagtgcagcgatgggacctcttttgccgaggaggtggaaaagcccaccaagtgtggctgtgccctctgcgcata

SEQ ID NO: 182043 - DNA, 5132 bp, Homo sapiens
  Payload ID: 15850
  Gene Symbol: SLIT2
  Gene Name: slit guidance ligand 2
  ENST ID: ENST00000273739
  CDS Start-End: 227-4855
gcccaaggagctcctgctctgccagaggagggtggagagggcggtgggaggcgtgtgcctgagtgggctctactgccttgttccatattatttggtgcacattttccctggcactctgggttgctagccccgccgggcactgggcctcagacactgcgcggttccctcggagcagcaagctaaagaaagcccccagtgccggcgaggaaggaggcggcggggaaagatgcgcggcgttggctggcagatgctgtccctgtcgctggggttagtgctggcgatcctgaacaaggtggcaccgcaggcgtgcccggcgcagtgctcttgctcgggcagcacagtggactgtcacgggctggcgctgcgcagcgtgcccaggaatatcccccgcaacaccgagagactggatttaaatggaaataacatcacaagaattacgaagacagattttgctggtcttagacatctaagagttcttcagcttatggagaataagattagcaccattgaaagaggagcattccaggatcttaaagaactagagagactgcgtttaaacagaaatcaccttcagctgtttcctgagttgctgtttcttgggactgcgaagctatacaggcttgatctcagtgaaaaccaaattcaggcaatcccaaggaaagctttccgtggggcagttgacataaaaaatttgcaactggattacaaccagatcagctgtattgaagatggggcattcagggctctccgggacctggaagtgctcactctcaacaataacaacattactagactttctgtggcaagtttcaaccatatgcctaaacttaggacttttcgactgcattcaaacaacctgtattgtgactgccacctggcctggctctccgactggcttcgccaaaggcctcgggttggtctgtacactcagtgtatgggcccctcccacctgagaggccataatgtagccgaggttcaaaaacgagaatttgtctgcagtgatgaggaagaaggtcaccagtcatttatggctccttcttgtagtgttttgcactgccctgccgcctgtacctgtagcaacaatatcgtagactgtcgtgggaaaggtctcactgagatccccacaaatcttccagagaccatcacagaaatacgtttggaacagaacacaatcaaagtcatccctcctggagctttctcaccatataaaaagcttagacgaattgacctgagcaataatcagatctctgaacttgcaccagatgctttccaaggactacgctctctgaattcacttgtcctctatggaaataaaatcacagaactccccaaaagtttatttgaaggactgttttccttacagctcctattattgaatgccaacaagataaactgccttcgggtagatgcttttcaggatctccacaacttgaaccttctctccctatatgacaacaagcttcagaccatcgccaaggggaccttttcacctcttcgggccattcaaactatgcatttggcccagaacccctttatttgtgactgccatctcaagtggctagcggattatctccataccaacccgattgagaccagtggtgcccgttgcaccagcccccgccgcctggcaaacaaaagaattggacagatcaaaagcaagaaattccgttgttcagctaaagaacagtatttcattccaggtacagaagattatcgatcaaaattaagtggagactgctttgcggatctggcttgccctgaaaagtgtcgctgtgaaggaaccacagtagattgctctaatcaaaagctcaacaaaatcccggagcacattccccagtacactgcagagttgcgtctcaataataatgaatttaccgtgttggaagccacaggaatctttaagaaacttcctcaattacgtaaaataaactttagcaacaataagatcacagatattgaggagggagcatttgaaggagcatctggtgtaaatgaaatacttcttacgagtaatcgtttggaaaatgtgcagcataagatgttcaagggattggaaagcctcaaaactttgatgttgagaagcaatcgaataacctgtgtggggaatgacagtttcataggactcagttctgtgcgtttgctttctttgtatgataatcaaattactacagttgcaccaggggcatttgatactctccattctttatctactctaaacctcttggccaatccttttaactgtaactgctacctggcttggttgggagagtggctgagaaagaagagaattgtcacgggaaatcctagatgtcaaaaaccatacttcctgaaagaaatacccatccaggatgtggccattcaggacttcacttgtgatgacggaaatgatgacaatagttgctccccactttctcgctgtcctactgaatgtacttgcttggatacagtcgtccgatgtagcaacaagggtttgaaggtcttgccgaaaggtattccaagagatgtcacagagttgtatctggatggaaaccaatttacactggttcccaaggaactctccaactacaaacatttaacacttatagacttaagtaacaacagaataagcacgctttctaatcagagcttcagcaacatgacccagctcctcaccttaattcttagttacaaccgtctgagatgtattcctcctcgcacctttgatggattaaagtctcttcgattactttctctacatggaaatgacatttctgttgtgcctgaaggtgctttcaatgatctttctgcattatcacatctagcaattggagccaaccctctttactgtgattgtaacatgcagtggttatccgactgggtgaagtcggaatataaggagcctggaattgctcgttgtgctggtcctggagaaatggcagataaacttttactcacaactccctccaaaaaatttacctgtcaaggtcctgtggatgtcaatattctagctaagtgtaacccctgcctatcaaatccgtgtaaaaatgatggcacatgtaatagtgatccagttgacttttaccgatgcacctgtccatatggtttcaaggggcaggactgtgatgtcccaattcatgcctgcatcagtaacccatgtaaacatggaggaacttgccacttaaaggaaggagaagaagatggattctggtgtatttgtgctgatggatttgaaggagaaaattgtgaagtcaacgttgatgattgtgaagataatgactgtgaaaataattctacatgtgtcgatggcattaataactacacatgcctttgcccacctgagtatacagctgctaatctgaatgaggtggaaaaaggtgagttgtgtgaggagaagctggacttctgtgcccaggacctgaacccctgccagcacgattcaaagtgcatcctaactccaaagggattcaaatgtgactgcacaccagggtacgtaggtgaacactgcgacatcgattttgacgactgccaagacaacaagtgtaaaaacggagcccactgcacagatgcagtgaacggctatacgtgcatatgccccgaaggttacagtggcttgttctgtgagttttctccacccatggtcctccctcgtaccagcccctgtgataattttgattgtcagaatggagctcagtgtatcgtcagaataaatgagccaatatgtcagtgtttgcctggctatcagggagaaaagtgtgaaaaattggttagtgtgaattttataaacaaagagtcttatcttcagattccttcagccaaggttcggcctcagacgaacataacacttcagattgccacagatgaagacagcggaatcctcctgtataagggtgacaaagaccatatcgcggtagaactctatcgggggcgtgttcgtgccagctatgacaccggctctcatccagcttctgccatttacagtgtggagacaatcaatgatggaaacttccacattgtggaactacttgccttggatcagagtctctctttgtccgtggatggtgggaaccccaaaatcatcactaacttgtcaaagcagtccactctgaattttgactctccactctatgtaggaggcatgccagggaagagtaacgtggcatctctgcgccaggcccctgggcagaacggaaccagcttccacggctgcatccggaacctttacatcaacagtgagctgcaggacttccagaaggtgccgatgcaaacaggcattttgcctggctgtgagccatgccacaagaaggtgtgtgcccatggcacatgccagcccagcagccaggcaggcttcacctgcgagtgccaggaaggatggatggggcccctctgtgaccaacggaccaatgacccttgccttggaaataaatgcgtacatggcacctgcttgcccatcaatgcgttctcctacagctgtaagtgcttggagggccatggaggtgtcctctgtgatgaagaggaggatctgtttaacccatgccaggcgatcaagtgcaagcatgggaagtgcaggctttcaggtctggggcagccctactgtgaatgcagcagtggatacacgggggacagctgtgatcgagaaatctcttgtcgaggggaaaggataagagattattaccaaaagcagcagggctatgctgcttgccaaacaaccaagaaggtgtcccgattagagtgcagaggtgggtgtgcaggagggcagtgctgtggaccgctgaggagcaagcggcggaaatactctttcgaatgcactgacggctcctcctttgtggacgaggttgagaaagtggtgaagtgcggctgtacgaggtgtgtgtcctaaacacactcccggcagctctgtctttggaaaaggttgtatacttcttgaccgtgtgggactaatgaatgcttcatagtggaaatatttgaaatatattgtaaaatacagaacagacttatttttattatgagaataaagactttttttctgcatttggaaaaaaaaaaaaagaaatgcttgaactaaagcttcccctatgctggagaagtatgaagaaagatatacctggagacattagaacagcgatgggaaccattgcaactcgggtccatctttg

SEQ ID NO: 182044 - DNA, 767 bp, Homo sapiens
  Payload ID: 15850
  Gene Symbol: SLIT2
  Gene Name: slit guidance ligand 2
  ENST ID: ENST00000511508
  CDS Start-End: 130-767
acagagttgtatctggatggaaaccaatttacactggttcccaaggaactctccaactacaaacatttaacacttatagacttaagtaacaacagaataagcacgctttctaatcagagcttcagcaacatgacccagctcctcaccttaattcttagttacaaccgtctgagatgtattcctcctcgcacctttgatggattaaagtctcttcgattactttctctacatggaaatgacatttctgttgtgcctgaaggtgctttcaatgatctttctgcattatcacatctagcaattggagccaaccctctttactgtgattgtaacatgcagtggttatccgactgggtgaagtcggaatataaggagcctggaattgctcgttgtgctggtcctggagaaatggcagataaacttttactcacaactccctccaaaaaatttacctgtcaagggctgccagggccctgtggcttcctcataccaggtcctgtggatgtcaatattctagctaagtgtaacccctgcctatcaaatccgtgtaaaaatgatggcacatgtaatagtgatccagttgacttttaccgatgcacctgtccatatggtttcaaggggcaggactgtgatgtcccaattcatgcctgcatcagtaacccatgtaaacatggaggaacttgccacttaaaggaaggagaagaagatggattctggtgtatttgtgctgatggatttgaaggagaaaattgtgaagtcaacgttgatga

SEQ ID NO: 182045 - DNA, 4752 bp, Homo sapiens
  Payload ID: 15850
  Gene Symbol: SLIT2
  Gene Name: slit guidance ligand 2
  Uniprot ID: O94813
  ENST ID: ENST00000503837
  CDS Start-End: 1-4578
atgcgcggcgttggctggcagatgctgtccctgtcgctggggttagtgctggcgatcctgaacaaggtggcaccgcaggcgtgcccggcgcagtgctcttgctcgggcagcacagtggactgtcacgggctggcgctgcgcagcgtgcccaggaatatcccccgcaacaccgagagactggatttaaatggaaataacatcacaagaattacgaagacagattttgctggtcttagacatctaagagttcttcagcttatggagaataagattagcaccattgaaagaggagcattccaggatcttaaagaactagagagactgcgtttaaacagaaatcaccttcagctgtttcctgagttgctgtttcttgggactgcgaagctatacaggcttgatctcagtgaaaaccaaattcaggcaatcccaaggaaagctttccgtggggcagttgacataaaaaatttgcaactggattacaaccagatcagctgtattgaagatggggcattcagggctctccgggacctggaagtgctcactctcaacaataacaacattactagactttctgtggcaagtttcaaccatatgcctaaacttaggacttttcgactgcattcaaacaacctgtattgtgactgccacctggcctggctctccgactggcttcgccaaaggcctcgggttggtctgtacactcagtgtatgggcccctcccacctgagaggccataatgtagccgaggttcaaaaacgagaatttgtctgcagtgatgaggaagaaggtcaccagtcatttatggctccttcttgtagtgttttgcactgccctgccgcctgtacctgtagcaacaatatcgtagactgtcgtgggaaaggtctcactgagatccccacaaatcttccagagaccatcacagaaatacgtttggaacagaacacaatcaaagtcatccctcctggagctttctcaccatataaaaagcttagacgaattgacctgagcaataatcagatctctgaacttgcaccagatgctttccaaggactacgctctctgaattcacttgtcctctatggaaataaaatcacagaactccccaaaagtttatttgaaggactgttttccttacagctcctattattgaatgccaacaagataaactgccttcgggtagatgcttttcaggatctccacaacttgaaccttctctccctatatgacaacaagcttcagaccatcgccaaggggaccttttcacctcttcgggccattcaaactatgcatttggcccagaacccctttatttgtgactgccatctcaagtggctagcggattatctccataccaacccgattgagaccagtggtgcccgttgcaccagcccccgccgcctggcaaacaaaagaattggacagatcaaaagcaagaaattccgttgttcaggtacagaagattatcgatcaaaattaagtggagactgctttgcggatctggcttgccctgaaaagtgtcgctgtgaaggaaccacagtagattgctctaatcaaaagctcaacaaaatcccggagcacattccccagtacactgcagagttgcgtctcaataataatgaatttaccgtgttggaagccacaggaatctttaagaaacttcctcaattacgtaaaataaactttagcaacaataagatcacagatattgaggagggagcatttgaaggagcatctggtgtaaatgaaatacttcttacgagtaatcgtttggaaaatgtgcagcataagatgttcaagggattggaaagcctcaaaactttgatgttgagaagcaatcgaataacctgtgtggggaatgacagtttcataggactcagttctgtgcgtttgctttctttgtatgataatcaaattactacagttgcaccaggggcatttgatactctccattctttatctactctaaacctcttggccaatccttttaactgtaactgctacctggcttggttgggagagtggctgagaaagaagagaattgtcacgggaaatcctagatgtcaaaaaccatacttcctgaaagaaatacccatccaggatgtggccattcaggacttcacttgtgatgacggaaatgatgacaatagttgctccccactttctcgctgtcctactgaatgtacttgcttggatacagtcgtccgatgtagcaacaagggtttgaaggtcttgccgaaaggtattccaagagatgtcacagagttgtatctggatggaaaccaatttacactggttcccaaggaactctccaactacaaacatttaacacttatagacttaagtaacaacagaataagcacgctttctaatcagagcttcagcaacatgacccagctcctcaccttaattcttagttacaaccgtctgagatgtattcctcctcgcacctttgatggattaaagtctcttcgattactttctctacatggaaatgacatttctgttgtgcctgaaggtgctttcaatgatctttctgcattatcacatctagcaattggagccaaccctctttactgtgattgtaacatgcagtggttatccgactgggtgaagtcggaatataaggagcctggaattgctcgttgtgctggtcctggagaaatggcagataaacttttactcacaactccctccaaaaaatttacctgtcaaggtcctgtggatgtcaatattctagctaagtgtaacccctgcctatcaaatccgtgtaaaaatgatggcacatgtaatagtgatccagttgacttttaccgatgcacctgtccatatggtttcaaggggcaggactgtgatgtcccaattcatgcctgcatcagtaacccatgtaaacatggaggaacttgccacttaaaggaaggagaagaagatggattctggtgtatttgtgctgatggatttgaaggagaaaattgtgaagtcaacgttgatgattgtgaagataatgactgtgaaaataattctacatgtgtcgatggcattaataactacacatgcctttgcccacctgagtatacaggtgagttgtgtgaggagaagctggacttctgtgcccaggacctgaacccctgccagcacgattcaaagtgcatcctaactccaaagggattcaaatgtgactgcacaccagggtacgtaggtgaacactgcgacatcgattttgacgactgccaagacaacaagtgtaaaaacggagcccactgcacagatgcagtgaacggctatacgtgcatatgccccgaaggttacagtggcttgttctgtgagttttctccacccatggtcctccctcgtaccagcccctgtgataattttgattgtcagaatggagctcagtgtatcgtcagaataaatgagccaatatgtcagtgtttgcctggctatcagggagaaaagtgtgaaaaattggttagtgtgaattttataaacaaagagtcttatcttcagattccttcagccaaggttcggcctcagacgaacataacacttcagattgccacagatgaagacagcggaatcctcctgtataagggtgacaaagaccatatcgcggtagaactctatcgggggcgtgttcgtgccagctatgacaccggctctcatccagcttctgccatttacagtgtggagacaatcaatgatggaaacttccacattgtggaactacttgccttggatcagagtctctctttgtccgtggatggtgggaaccccaaaatcatcactaacttgtcaaagcagtccactctgaattttgactctccactctatgtaggaggcatgccagggaagagtaacgtggcatctctgcgccaggcccctgggcagaacggaaccagcttccacggctgcatccggaacctttacatcaacagtgagctgcaggacttccagaaggtgccgatgcaaacaggcattttgcctggctgtgagccatgccacaagaaggtgtgtgcccatggcacatgccagcccagcagccaggcaggcttcacctgcgagtgccaggaaggatggatggggcccctctgtgaccaacggaccaatgacccttgccttggaaataaatgcgtacatggcacctgcttgcccatcaatgcgttctcctacagctgtaagtgcttggagggccatggaggtgtcctctgtgatgaagaggaggatctgtttaacccatgccaggcgatcaagtgcaagcatgggaagtgcaggctttcaggtctggggcagccctactgtgaatgcagcagtggatacacgggggacagctgtgatcgagaaatctcttgtcgaggggaaaggataagagattattaccaaaagcagcagggctatgctgcttgccaaacaaccaagaaggtgtcccgattagagtgcagaggtgggtgtgcaggagggcagtgctgtggaccgctgaggagcaagcggcggaaatactctttcgaatgcactgacggctcctcctttgtggacgaggttgagaaagtggtgaagtgcggctgtacgaggtgtgtgtcctaaacacactcccggcagctctgtctttggaaaaggttgtatacttcttgaccgtgtgggactaatgaatgcttcatagtggaaatatttgaaatatattgtaaaatacagaacagacttatttttattatgagaataaagactttttttctgcatttggaaaaaaaaaaaaagaaa

SEQ ID NO: 182046 - DNA, 6390 bp, Homo sapiens
  Payload ID: 15850
  Gene Symbol: SLIT2
  Gene Name: slit guidance ligand 2
  Uniprot ID: O94813
  ENST ID: ENST00000504154
  CDS Start-End: 253-4842
cggattcatcctcaggacctaaagttgcccaaggagctcctgctctgccagaggagggtggagagggcggtgggaggcgtgtgcctgagtgggctctactgccttgttccatattatttggtgcacattttccctggcactctgggttgctagccccgccgggcactgggcctcagacactgcgcggttccctcggagcagcaagctaaagaaagcccccagtgccggcgaggaaggaggcggcggggaaagatgcgcggcgttggctggcagatgctgtccctgtcgctggggttagtgctggcgatcctgaacaaggtggcaccgcaggcgtgcccggcgcagtgctcttgctcgggcagcacagtggactgtcacgggctggcgctgcgcagcgtgcccaggaatatcccccgcaacaccgagagactggatttaaatggaaataacatcacaagaattacgaagacagattttgctggtcttagacatctaagagttcttcagcttatggagaataagattagcaccattgaaagaggagcattccaggatcttaaagaactagagagactgcgtttaaacagaaatcaccttcagctgtttcctgagttgctgtttcttgggactgcgaagctatacaggcttgatctcagtgaaaaccaaattcaggcaatcccaaggaaagctttccgtggggcagttgacataaaaaatttgcaactggattacaaccagatcagctgtattgaagatggggcattcagggctctccgggacctggaagtgctcactctcaacaataacaacattactagactttctgtggcaagtttcaaccatatgcctaaacttaggacttttcgactgcattcaaacaacctgtattgtgactgccacctggcctggctctccgactggcttcgccaaaggcctcgggttggtctgtacactcagtgtatgggcccctcccacctgagaggccataatgtagccgaggttcaaaaacgagaatttgtctgcagtggtcaccagtcatttatggctccttcttgtagtgttttgcactgccctgccgcctgtacctgtagcaacaatatcgtagactgtcgtgggaaaggtctcactgagatccccacaaatcttccagagaccatcacagaaatacgtttggaacagaacacaatcaaagtcatccctcctggagctttctcaccatataaaaagcttagacgaattgacctgagcaataatcagatctctgaacttgcaccagatgctttccaaggactacgctctctgaattcacttgtcctctatggaaataaaatcacagaactccccaaaagtttatttgaaggactgttttccttacagctcctattattgaatgccaacaagataaactgccttcgggtagatgcttttcaggatctccacaacttgaaccttctctccctatatgacaacaagcttcagaccatcgccaaggggaccttttcacctcttcgggccattcaaactatgcatttggcccagaacccctttatttgtgactgccatctcaagtggctagcggattatctccataccaacccgattgagaccagtggtgcccgttgcaccagcccccgccgcctggcaaacaaaagaattggacagatcaaaagcaagaaattccgttgttcagctaaagaacagtatttcattccaggtacagaagattatcgatcaaaattaagtggagactgctttgcggatctggcttgccctgaaaagtgtcgctgtgaaggaaccacagtagattgctctaatcaaaagctcaacaaaatcccggagcacattccccagtacactgcagagttgcgtctcaataataatgaatttaccgtgttggaagccacaggaatctttaagaaacttcctcaattacgtaaaataaactttagcaacaataagatcacagatattgaggagggagcatttgaaggagcatctggtgtaaatgaaatacttcttacgagtaatcgtttggaaaatgtgcagcataagatgttcaagggattggaaagcctcaaaactttgatgttgagaagcaatcgaataacctgtgtggggaatgacagtttcataggactcagttctgtgcgtttgctttctttgtatgataatcaaattactacagttgcaccaggggcatttgatactctccattctttatctactctaaacctcttggccaatccttttaactgtaactgctacctggcttggttgggagagtggctgagaaagaagagaattgtcacgggaaatcctagatgtcaaaaaccatacttcctgaaagaaatacccatccaggatgtggccattcaggacttcacttgtgatgacggaaatgatgacaatagttgctccccactttctcgctgtcctactgaatgtacttgcttggatacagtcgtccgatgtagcaacaagggtttgaaggtcttgccgaaaggtattccaagagatgtcacagagttgtatctggatggaaaccaatttacactggttcccaaggaactctccaactacaaacatttaacacttatagacttaagtaacaacagaataagcacgctttctaatcagagcttcagcaacatgacccagctcctcaccttaattcttagttacaaccgtctgagatgtattcctcctcgcacctttgatggattaaagtctcttcgattactttctctacatggaaatgacatttctgttgtgcctgaaggtgctttcaatgatctttctgcattatcacatctagcaattggagccaaccctctttactgtgattgtaacatgcagtggttatccgactgggtgaagtcggaatataaggagcctggaattgctcgttgtgctggtcctggagaaatggcagataaacttttactcacaactccctccaaaaaatttacctgtcaaggtcctgtggatgtcaatattctagctaagtgtaacccctgcctatcaaatccgtgtaaaaatgatggcacatgtaatagtgatccagttgacttttaccgatgcacctgtccatatggtttcaaggggcaggactgtgatgtcccaattcatgcctgcatcagtaacccatgtaaacatggaggaacttgccacttaaaggaaggagaagaagatggattctggtgtatttgtgctgatggatttgaaggagaaaattgtgaagtcaacgttgatgattgtgaagataatgactgtgaaaataattctacatgtgtcgatggcattaataactacacatgcctttgcccacctgagtatacaggtgagttgtgtgaggagaagctggacttctgtgcccaggacctgaacccctgccagcacgattcaaagtgcatcctaactccaaagggattcaaatgtgactgcacaccagggtacgtaggtgaacactgcgacatcgattttgacgactgccaagacaacaagtgtaaaaacggagcccactgcacagatgcagtgaacggctatacgtgcatatgccccgaaggttacagtggcttgttctgtgagttttctccacccatggtcctccctcgtaccagcccctgtgataattttgattgtcagaatggagctcagtgtatcgtcagaataaatgagccaatatgtcagtgtttgcctggctatcagggagaaaagtgtgaaaaattggttagtgtgaattttataaacaaagagtcttatcttcagattccttcagccaaggttcggcctcagacgaacataacacttcagattgccacagatgaagacagcggaatcctcctgtataagggtgacaaagaccatatcgcggtagaactctatcgggggcgtgttcgtgccagctatgacaccggctctcatccagcttctgccatttacagtgtggagacaatcaatgatggaaacttccacattgtggaactacttgccttggatcagagtctctctttgtccgtggatggtgggaaccccaaaatcatcactaacttgtcaaagcagtccactctgaattttgactctccactctatgtaggaggcatgccagggaagagtaacgtggcatctctgcgccaggcccctgggcagaacggaaccagcttccacggctgcatccggaacctttacatcaacagtgagctgcaggacttccagaaggtgccgatgcaaacaggcattttgcctggctgtgagccatgccacaagaaggtgtgtgcccatggcacatgccagcccagcagccaggcaggcttcacctgcgagtgccaggaaggatggatggggcccctctgtgaccaacggaccaatgacccttgccttggaaataaatgcgtacatggcacctgcttgcccatcaatgcgttctcctacagctgtaagtgcttggagggccatggaggtgtcctctgtgatgaagaggaggatctgtttaacccatgccaggcgatcaagtgcaagcatgggaagtgcaggctttcaggtctggggcagccctactgtgaatgcagcagtggatacacgggggacagctgtgatcgagaaatctcttgtcgaggggaaaggataagagattattaccaaaagcagcagggctatgctgcttgccaaacaaccaagaaggtgtcccgattagagtgcagaggtgggtgtgcaggagggcagtgctgtggaccgctgaggagcaagcggcggaaatactctttcgaatgcactgacggctcctcctttgtggacgaggttgagaaagtggtgaagtgcggctgtacgaggtgtgtgtcctaaacacactcccggcagctctgtctttggaaaaggttgtatacttcttgaccgtgtgggactaatgaatgcttcatagtggaaatatttgaaatatattgtaaaatacagaacagacttatttttattatgagaataaagactttttttctgcatttggaaaaaaaaaaaaagaaatgcttgaactaaagcttcccctatgctggagaagtatgaagaaagatatacctggagacattagaacagcgatgggaaccattgcaactcgggtccatctttgtaacatgctgaagacaagcagaagcacatgcacgagggacagaggagctactgtgcactgctgtgaaattgcccagagcataaaacctgtgtaccctccttcacatcaaccaagttcactaggacataccaagcacatgcgtgtgaatgaggatgcaaggcaagagaatggaactccagaattcacagatagaacaaatggatgagaaatatttcatgcaaaatataaagtgtcctgaggatctgggttccatttacgagaggaaatgaaagtgctaaaataaattttatcttccttttaaatgtcagcatgtcagcagaagcagcacacaaaagtctttaccattttccagtattaatttttttgtaatataaatgataaaggagatgataaagaaccaatagattattgataaataaattagtaataatatgattttttgtttctatgagttctaaacagccctatacagtattcagtttccatgagaaatatttattgtatcaaagtacattgtacttaacattttaggccatccttttactgttccttgatgctttaatatatattaatttataattatcctgatatttttgtacatttttcaaacttaaaaatcaggatttttttttttttttttttggcaatagtactaacatagggttttatcttgggatacatatgtattggtctgtttgttgaccttgacatctgatcactgatgtcaatgacctactggcctcattcaggacacctgcagagagtatgcaaagtccgagagaggaaaacagaaatctgtatgtgagatggtcattgtacagaaagaagtggcccctctgcaacatgtcctcacagaaacgaaatggtgtgtagcaatcaacactagaaagtagaccttttgcaaattaatatgtccttgaccttttttgcccttttgtgggggtgaggtggggataaaaagactgtcatatcaagaactgtgacttttctttccctcaaacaataaaactcctttattatcttaatgctcccatgttaacatgtttgctgctaaattacaatgtagaattgataatggtttatagtgaactgtgctcttccctcattaaaatcccagggtgccctgtaaagatgcagatgtttcttcctgaaaacttctttttttacaaagaaaattagatgtacatgtataattcagtgtgctttgtctttctccagattaatatcggttacactgctgatgtttgtaaattaaacagatatttacttca

SEQ ID NO: 182047 - DNA, 394 bp, Homo sapiens
  Payload ID: 15850
  Gene Symbol: SLIT2
  Gene Name: slit guidance ligand 2
  ENST ID: ENST00000512993
  CDS Start-End: 1-248
ccagctatgacaccggctctcatccagcttctgccatttacagtgtggagacaatcaatgatggaaacttccacattgtggaactacttgccttggatcagagtctctctttgtccgtggatggtgggaaccccaaaatcatcactaacttgtcaaagcagtccactctgaattttgactctccactctatgtaggaggcatgccagggaagagtaacgtggcatctctgcgccagggtgccctgtaaagatgcagatgtttcttcctgaaaacttctttttttacaaagaaaattagatgtacatgtataattcagtgtgctttgtctttctccagattaatatcggttacactgctgatgtttgtaaattaaacagatatttacttcattaa

SEQ ID NO: 182048 - DNA, 739 bp, Homo sapiens
  Payload ID: 15850
  Gene Symbol: SLIT2
  Gene Name: slit guidance ligand 2
  ENST ID: ENST00000509941
  CDS Start-End: 1-589
atccgactgggtgaagtcggaatataaggagcctggaattgctcgttgtgctggtcctggagaaatggcagataaacttttactcacaactccctccaaaaaatttacctgtcaaggtcctgtggatgtcaatattctagctaagtgtaacccctgcctatcaaatccgtgtaaaaatgatggcacatgtaatagtgatccagttgacttttaccgatgcacctgtccatatggtttcaaggggcaggactgtgatgtcccaattcatgcctgcatcagtaacccatgtaaacatggaggaacttgccacttaaaggaaggagaagaagatggattctggtgtatttgtgctgatggatttgaaggagaaaattgtgaagtcaacgttgatgattgtgaagataatgactgtgaaaataattctacatgtgtcgatggcattaataactacacatgcctttgcccacctgagtatacaggtacaaataataggaaatattttgccttccatcagtatatctgtttgaaagcatcattggaactatgttatatatgtttagtaaatctttttttatttgataaatggtaggtgtcttgaaaatcagatgtaatgtaaataacataaggacttaaagatagtttcagctaaccaaataaaagacccaggaatctctgttcaaacatacgcatctattataaagccatgctatccagtaataaaagaagctattttgctaaa

SEQ ID NO: 182049 - DNA, 532 bp, Homo sapiens
  Payload ID: 15850
  Gene Symbol: SLIT2
  Gene Name: slit guidance ligand 2
  ENST ID: ENST00000508824
  CDS Start-End: 95-532
tttgcgagtctctaatgaagaagtaaatgcagacccggtgttgacggcccacgcgctcctgatgaggcgcttccagagttcagcgaagtggagcatggaggccgttctctttgtgaacgccgaggccgccgccccgcgccagtccggccgccctagggatttaaatggaaataacatcacaagaattacgaagacagattttgctggtcttagacatctaagagttcttcagcttatggagaataagattagcaccattgaaagaggagcattccaggatcttaaagaactagagagactgcgtttaaacagaaatcaccttcagctgtttcctgagttgctgtttcttgggactgcgaagctatacaggcttgatctcagtgaaaaccaaattcaggcaatcccaaggaaagctttccgtggggcagttgacataaaaaatttgcaactggattacaaccagatcagctgtattgaagatggggcattcagggctctccgggacctggaagtgctcactctcaacaataac

SEQ ID NO: 182050 - DNA, 5233 bp, Homo sapiens
  Payload ID: 15850
  Gene Symbol: SLIT2
  Gene Name: slit guidance ligand 2
  Uniprot ID: O94813
  ENST ID: ENST00000503823
  CDS Start-End: 557-5122
tgccccgcgcgctctgctacgggcccgctgggcttccgcgccttctagcttccggagcccactttgatcggggccataatacctattgagatcccctcttctgtcttgtaccttcgccactggcatcggatttgcagaagcgtgcgtgggatcagaggaccgccctccccacaacaaccggcccctgcatcttagcagccgttggaagccccagctcttttaccgccaagttcatccttgggagacagaagacgcgtgatctcctctccgctgctcttggggtctccttgcagccctggccaggcggattcatcctcaggacctaaagttgcccaaggagctcctgctctgccagaggagggtggagagggcggtgggaggcgtgtgcctgagtgggctctactgccttgttccatattatttggtgcacattttccctggcactctgggttgctagccccgccgggcactgggcctcagacactgcgcggttccctcggagcagcaagctaaagaaagcccccagtgccggcgaggaaggaggcggcggggaaagatgcgcggcgttggctggcagatgctgtccctgtcgctggggttagtgctggcgatcctgaacaaggtggcaccgcaggcgtgcccggcgcagtgctcttgctcgggcagcacagtggactgtcacgggctggcgctgcgcagcgtgcccaggaatatcccccgcaacaccgagagactggatttaaatggaaataacatcacaagaattacgaagacagattttgctggtcttagacatctaagagttcttcagcttatggagaataagattagcaccattgaaagaggagcattccaggatcttaaagaactagagagactgcgtttaaacagaaatcaccttcagctgtttcctgagttgctgtttcttgggactgcgaagctatacaggcttgatctcagtgaaaaccaaattcaggcaatcccaaggaaagctttccgtggggcagttgacataaaaaatttgcaactggattacaaccagatcagctgtattgaagatggggcattcagggctctccgggacctggaagtgctcactctcaacaataacaacattactagactttctgtggcaagtttcaaccatatgcctaaacttaggacttttcgactgcattcaaacaacctgtattgtgactgccacctggcctggctctccgactggcttcgccaaaggcctcgggttggtctgtacactcagtgtatgggcccctcccacctgagaggccataatgtagccgaggttcaaaaacgagaatttgtctgcagtggtcaccagtcatttatggctccttcttgtagtgttttgcactgccctgccgcctgtacctgtagcaacaatatcgtagactgtcgtgggaaaggtctcactgagatccccacaaatcttccagagaccatcacagaaatacgtttggaacagaacacaatcaaagtcatccctcctggagctttctcaccatataaaaagcttagacgaattgacctgagcaataatcagatctctgaacttgcaccagatgctttccaaggactacgctctctgaattcacttgtcctctatggaaataaaatcacagaactccccaaaagtttatttgaaggactgttttccttacagctcctattattgaatgccaacaagataaactgccttcgggtagatgcttttcaggatctccacaacttgaaccttctctccctatatgacaacaagcttcagaccatcgccaaggggaccttttcacctcttcgggccattcaaactatgcatttggcccagaacccctttatttgtgactgccatctcaagtggctagcggattatctccataccaacccgattgagaccagtggtgcccgttgcaccagcccccgccgcctggcaaacaaaagaattggacagatcaaaagcaagaaattccgttgttcaggtacagaagattatcgatcaaaattaagtggagactgctttgcggatctggcttgccctgaaaagtgtcgctgtgaaggaaccacagtagattgctctaatcaaaagctcaacaaaatcccggagcacattccccagtacactgcagagttgcgtctcaataataatgaatttaccgtgttggaagccacaggaatctttaagaaacttcctcaattacgtaaaataaactttagcaacaataagatcacagatattgaggagggagcatttgaaggagcatctggtgtaaatgaaatacttcttacgagtaatcgtttggaaaatgtgcagcataagatgttcaagggattggaaagcctcaaaactttgatgttgagaagcaatcgaataacctgtgtggggaatgacagtttcataggactcagttctgtgcgtttgctttctttgtatgataatcaaattactacagttgcaccaggggcatttgatactctccattctttatctactctaaacctcttggccaatccttttaactgtaactgctacctggcttggttgggagagtggctgagaaagaagagaattgtcacgggaaatcctagatgtcaaaaaccatacttcctgaaagaaatacccatccaggatgtggccattcaggacttcacttgtgatgacggaaatgatgacaatagttgctccccactttctcgctgtcctactgaatgtacttgcttggatacagtcgtccgatgtagcaacaagggtttgaaggtcttgccgaaaggtattccaagagatgtcacagagttgtatctggatggaaaccaatttacactggttcccaaggaactctccaactacaaacatttaacacttatagacttaagtaacaacagaataagcacgctttctaatcagagcttcagcaacatgacccagctcctcaccttaattcttagttacaaccgtctgagatgtattcctcctcgcacctttgatggattaaagtctcttcgattactttctctacatggaaatgacatttctgttgtgcctgaaggtgctttcaatgatctttctgcattatcacatctagcaattggagccaaccctctttactgtgattgtaacatgcagtggttatccgactgggtgaagtcggaatataaggagcctggaattgctcgttgtgctggtcctggagaaatggcagataaacttttactcacaactccctccaaaaaatttacctgtcaaggtcctgtggatgtcaatattctagctaagtgtaacccctgcctatcaaatccgtgtaaaaatgatggcacatgtaatagtgatccagttgacttttaccgatgcacctgtccatatggtttcaaggggcaggactgtgatgtcccaattcatgcctgcatcagtaacccatgtaaacatggaggaacttgccacttaaaggaaggagaagaagatggattctggtgtatttgtgctgatggatttgaaggagaaaattgtgaagtcaacgttgatgattgtgaagataatgactgtgaaaataattctacatgtgtcgatggcattaataactacacatgcctttgcccacctgagtatacaggtgagttgtgtgaggagaagctggacttctgtgcccaggacctgaacccctgccagcacgattcaaagtgcatcctaactccaaagggattcaaatgtgactgcacaccagggtacgtaggtgaacactgcgacatcgattttgacgactgccaagacaacaagtgtaaaaacggagcccactgcacagatgcagtgaacggctatacgtgcatatgccccgaaggttacagtggcttgttctgtgagttttctccacccatggtcctccctcgtaccagcccctgtgataattttgattgtcagaatggagctcagtgtatcgtcagaataaatgagccaatatgtcagtgtttgcctggctatcagggagaaaagtgtgaaaaattggttagtgtgaattttataaacaaagagtcttatcttcagattccttcagccaaggttcggcctcagacgaacataacacttcagattgccacagatgaagacagcggaatcctcctgtataagggtgacaaagaccatatcgcggtagaactctatcgggggcgtgttcgtgccagctatgacaccggctctcatccagcttctgccatttacagtgtggagacaatcaatgatggaaacttccacattgtggaactacttgccttggatcagagtctctctttgtccgtggatggtgggaaccccaaaatcatcactaacttgtcaaagcagtccactctgaattttgactctccactctatgtaggaggcatgccagggaagagtaacgtggcatctctgcgccaggcccctgggcagaacggaaccagcttccacggctgcatccggaacctttacatcaacagtgagctgcaggacttccagaaggtgccgatgcaaacaggcattttgcctggctgtgagccatgccacaagaaggtgtgtgcccatggcacatgccagcccagcagccaggcaggcttcacctgcgagtgccaggaaggatggatggggcccctctgtgaccaacggaccaatgacccttgccttggaaataaatgcgtacatggcacctgcttgcccatcaatgcgttctcctacagctgtaagtgcttggagggccatggaggtgtcctctgtgatgaagaggaggatctgtttaacccatgccaggcgatcaagtgcaagcatgggaagtgcaggctttcaggtctggggcagccctactgtgaatgcagcagtggatacacgggggacagctgtgatcgagaaatctcttgtcgaggggaaaggataagagattattaccaaaagcagcagggctatgctgcttgccaaacaaccaagaaggtgtcccgattagagtgcagaggtgggtgtgcaggagggcagtgctgtggaccgctgaggagcaagcggcggaaatactctttcgaatgcactgacggctcctcctttgtggacgaggttgagaaagtggtgaagtgcggctgtacgaggtgtgtgtcctaaacacactcccggcagctctgtctttggaaaaggttgtatacttcttgaccgtgtgggactaatgaatgcttcatagtggaaatatttgaaatatattgtaaaatacagaac

SEQ ID NO: 182051 - DNA, 6380 bp, Homo sapiens
  Payload ID: 15850
  Gene Symbol: SLIT2
  Gene Name: slit guidance ligand 2
  ENST ID: ENST00000622093
  CDS Start-End: 511-4830
cggattcatcctcaggacctaaagttgcccaaggagctcctgctctgccagaggagggtggagagggcggtgggaggcgtgtgcctgagtgggctctactgccttgttccatattatttggtgcacattttccctggcactctgggttgctagccccgccgggcactgggcctcagacactgcgcggttccctcggagcagcaagctaaagaaagcccccagtgccggcgaggaaggaggcggcggggaaagatgcgcggcgttggctggcagatgctgtccctgtcgctggggttagtgctggcgatcctgaacaaggtggcaccgcaggcgtgcccggcgcagtgctcttgctcgggcagcacagtggactgtcacgggctggcgctgcgcagcgtgcccaggaatatcccccgcaacaccgagagactggatttaaatggaaataacatcacaagaattacgaagacagattttgctggtcttagacatctaagagttcttcagcttatggagaataagattagcaccattgaaagaggagcattccaggatcttaaagaactagagagactgcgtttaaacagaaatcaccttcagctgtttcctgagttgctgtttcttgggactgcgaagctatacaggcttgatctcagtgaaaaccaaattcaggcaatcccaaggaaagctttccgtggggcagttgacataaaaaatttgcaactggattacaaccagatcagctgtattgaagatggggcattcagggctctccgggacctggaagtgctcactctcaacaataacaacattactagactttctgtggcaagtttcaaccatatgcctaaacttaggacttttcgactgcattcaaacaacctgtattgtgactgccacctggcctggctctccgactggcttcgccaaaggcctcgggttggtctgtacactcagtgtatgggcccctcccacctgagaggccataatgtagccgaggttcaaaaacgagaatttgtctgcagtgccaggcatggtggtcaccagtcatttatggctccttcttgtagtgttttgcactgccctgccgcctgtacctgtagcaacaatatcgtagactgtcgtgggaaaggtctcactgagatccccacaaatcttccagagaccatcacagaaatacgtttggaacagaacacaatcaaagtcatccctcctggagctttctcaccatataaaaagcttagacgaattgacctgagcaataatcagatctctgaacttgcaccagatgctttccaaggactacgctctctgaattcacttgtcctctatggaaataaaatcacagaactccccaaaagtttatttgaaggactgttttccttacagctcctattattgaatgccaacaagataaactgccttcgggtagatgcttttcaggatctccacaacttgaaccttctctccctatatgacaacaagcttcagaccatcgccaaggggaccttttcacctcttcgggccattcaaactatgcatttggcccagaacccctttatttgtgactgccatctcaagtggctagcggattatctccataccaacccgattgagaccagtggtgcccgttgcaccagcccccgccgcctggcaaacaaaagaattggacagatcaaaagcaagaaattccgttgttcaggtacagaagattatcgatcaaaattaagtggagactgctttgcggatctggcttgccctgaaaagtgtcgctgtgaaggaaccacagtagattgctctaatcaaaagctcaacaaaatcccggagcacattccccagtacactgcagagttgcgtctcaataataatgaatttaccgtgttggaagccacaggaatctttaagaaacttcctcaattacgtaaaataaactttagcaacaataagatcacagatattgaggagggagcatttgaaggagcatctggtgtaaatgaaatacttcttacgagtaatcgtttggaaaatgtgcagcataagatgttcaagggattggaaagcctcaaaactttgatgttgagaagcaatcgaataacctgtgtggggaatgacagtttcataggactcagttctgtgcgtttgctttctttgtatgataatcaaattactacagttgcaccaggggcatttgatactctccattctttatctactctaaacctcttggccaatccttttaactgtaactgctacctggcttggttgggagagtggctgagaaagaagagaattgtcacgggaaatcctagatgtcaaaaaccatacttcctgaaagaaatacccatccaggatgtggccattcaggacttcacttgtgatgacggaaatgatgacaatagttgctccccactttctcgctgtcctactgaatgtacttgcttggatacagtcgtccgatgtagcaacaagggtttgaaggtcttgccgaaaggtattccaagagatgtcacagagttgtatctggatggaaaccaatttacactggttcccaaggaactctccaactacaaacatttaacacttatagacttaagtaacaacagaataagcacgctttctaatcagagcttcagcaacatgacccagctcctcaccttaattcttagttacaaccgtctgagatgtattcctcctcgcacctttgatggattaaagtctcttcgattactttctctacatggaaatgacatttctgttgtgcctgaaggtgctttcaatgatctttctgcattatcacatctagcaattggagccaaccctctttactgtgattgtaacatgcagtggttatccgactgggtgaagtcggaatataaggagcctggaattgctcgttgtgctggtcctggagaaatggcagataaacttttactcacaactccctccaaaaaatttacctgtcaaggtcctgtggatgtcaatattctagctaagtgtaacccctgcctatcaaatccgtgtaaaaatgatggcacatgtaatagtgatccagttgacttttaccgatgcacctgtccatatggtttcaaggggcaggactgtgatgtcccaattcatgcctgcatcagtaacccatgtaaacatggaggaacttgccacttaaaggaaggagaagaagatggattctggtgtatttgtgctgatggatttgaaggagaaaattgtgaagtcaacgttgatgattgtgaagataatgactgtgaaaataattctacatgtgtcgatggcattaataactacacatgcctttgcccacctgagtatacaggtgagttgtgtgaggagaagctggacttctgtgcccaggacctgaacccctgccagcacgattcaaagtgcatcctaactccaaagggattcaaatgtgactgcacaccagggtacgtaggtgaacactgcgacatcgattttgacgactgccaagacaacaagtgtaaaaacggagcccactgcacagatgcagtgaacggctatacgtgcatatgccccgaaggttacagtggcttgttctgtgagttttctccacccatggtcctccctcgtaccagcccctgtgataattttgattgtcagaatggagctcagtgtatcgtcagaataaatgagccaatatgtcagtgtttgcctggctatcagggagaaaagtgtgaaaaattggttagtgtgaattttataaacaaagagtcttatcttcagattccttcagccaaggttcggcctcagacgaacataacacttcagattgccacagatgaagacagcggaatcctcctgtataagggtgacaaagaccatatcgcggtagaactctatcgggggcgtgttcgtgccagctatgacaccggctctcatccagcttctgccatttacagtgtggagacaatcaatgatggaaacttccacattgtggaactacttgccttggatcagagtctctctttgtccgtggatggtgggaaccccaaaatcatcactaacttgtcaaagcagtccactctgaattttgactctccactctatgtaggaggcatgccagggaagagtaacgtggcatctctgcgccaggcccctgggcagaacggaaccagcttccacggctgcatccggaacctttacatcaacagtgagctgcaggacttccagaaggtgccgatgcaaacaggcattttgcctggctgtgagccatgccacaagaaggtgtgtgcccatggcacatgccagcccagcagccaggcaggcttcacctgcgagtgccaggaaggatggatggggcccctctgtgaccaacggaccaatgacccttgccttggaaataaatgcgtacatggcacctgcttgcccatcaatgcgttctcctacagctgtaagtgcttggagggccatggaggtgtcctctgtgatgaagaggaggatctgtttaacccatgccaggcgatcaagtgcaagcatgggaagtgcaggctttcaggtctggggcagccctactgtgaatgcagcagtggatacacgggggacagctgtgatcgagaaatctcttgtcgaggggaaaggataagagattattaccaaaagcagcagggctatgctgcttgccaaacaaccaagaaggtgtcccgattagagtgcagaggtgggtgtgcaggagggcagtgctgtggaccgctgaggagcaagcggcggaaatactctttcgaatgcactgacggctcctcctttgtggacgaggttgagaaagtggtgaagtgcggctgtacgaggtgtgtgtcctaaacacactcccggcagctctgtctttggaaaaggttgtatacttcttgaccgtgtgggactaatgaatgcttcatagtggaaatatttgaaatatattgtaaaatacagaacagacttatttttattatgagaataaagactttttttctgcatttggaaaaaaaaaaaaagaaatgcttgaactaaagcttcccctatgctggagaagtatgaagaaagatatacctggagacattagaacagcgatgggaaccattgcaactcgggtccatctttgtaacatgctgaagacaagcagaagcacatgcacgagggacagaggagctactgtgcactgctgtgaaattgcccagagcataaaacctgtgtaccctccttcacatcaaccaagttcactaggacataccaagcacatgcgtgtgaatgaggatgcaaggcaagagaatggaactccagaattcacagatagaacaaatggatgagaaatatttcatgcaaaatataaagtgtcctgaggatctgggttccatttacgagaggaaatgaaagtgctaaaataaattttatcttccttttaaatgtcagcatgtcagcagaagcagcacacaaaagtctttaccattttccagtattaatttttttgtaatataaatgataaaggagatgataaagaaccaatagattattgataaataaattagtaataatatgattttttgtttctatgagttctaaacagccctatacagtattcagtttccatgagaaatatttattgtatcaaagtacattgtacttaacattttaggccatccttttactgttccttgatgctttaatatatattaatttataattatcctgatatttttgtacatttttcaaacttaaaaatcaggatttttttttttttttttttggcaatagtactaacatagggttttatcttgggatacatatgtattggtctgtttgttgaccttgacatctgatcactgatgtcaatgacctactggcctcattcaggacacctgcagagagtatgcaaagtccgagagaggaaaacagaaatctgtatgtgagatggtcattgtacagaaagaagtggcccctctgcaacatgtcctcacagaaacgaaatggtgtgtagcaatcaacactagaaagtagaccttttgcaaattaatatgtccttgaccttttttgcccttttgtgggggtgaggtggggataaaaagactgtcatatcaagaactgtgacttttctttccctcaaacaataaaactcctttattatcttaatgctcccatgttaacatgtttgctgctaaattacaatgtagaattgataatggtttatagtgaactgtgctcttccctcattaaaatcccagggtgccctgtaaagatgcagatgtttcttcctgaaaacttctttttttacaaagaaaattagatgtacatgtataattcagtgtgctttgtctttctccagattaatatcggttacactgctgatgtttgtaaattaaacagatatttacttcatt

SEQ ID NO: 182052 - DNA, 4895 bp, Homo sapiens
  Payload ID: 15851
  Gene Symbol: SLIT3
  Gene Name: slit guidance ligand 3
  Uniprot ID: O75094
  ENST ID: ENST00000332966
  CDS Start-End: 74-4666
cgcgcgcctcctcgggctccacgcgtcttgccccgcagaggcagcctcctccaggagcggggccctgcacaccatggcccccgggtgggcaggggtcggcgccgccgtgcgcgcccgcctggcgctggccttggcgctggcgagcgtcctgagtgggcctccagccgtcgcctgccccaccaagtgtacctgctccgctgccagcgtggactgccacgggctgggcctccgcgcggttcctcggggcatcccccgcaacgctgagcgccttgacctggacagaaataatatcaccaggatcaccaagatggacttcgctgggctcaagaacctccgagtcttgcatctggaagacaaccaggtcagcgtcatcgagagaggcgccttccaggacctgaagcagctagagcgactgcgcctgaacaagaataagctgcaagtccttccagaattgcttttccagagcacgccgaagctcaccagactagatttgagtgaaaaccagatccaggggatcccgaggaaggcgttccgcggcatcaccgatgtgaagaacctgcaactggacaacaaccacatcagctgcattgaagatggagccttccgagcgctgcgcgatttggagatccttaccctcaacaacaacaacatcagtcgcatcctggtcaccagcttcaaccacatgccgaagatccgaactctgcgcctccactccaaccacctgtactgcgactgccacctggcctggctctcggattggctgcgacagcgacggacagttggccagttcacactctgcatggctcctgtgcatttgaggggcttcaacgtggcggatgtgcagaagaaggagtacgtgtgcccagccccccactcggagcccccatcctgcaatgccaactccatctcctgcccttcgccctgcacgtgcagcaataacatcgtggactgtcgaggaaagggcttgatggagattcctgccaacttgccggagggcatcgtcgaaatacgcctagaacagaactccatcaaagccatccctgcaggagccttcacccagtacaagaaactgaagcgaatagacatcagcaagaatcagatatcggatattgctccagatgccttccagggcctgaaatcactcacatcgctggtcctgtatgggaacaagatcaccgagattgtcaagggactgtttgatgggctggtgtccctacagctgctcctcctcaatgccaacaagatcaactgcctgcgggtgaacacgtttcaggacctgcagaacctcaacttgctctccctgtatgacaacaagctgcagaccatcagcaaggggctcttcgcccctctgcagtccatccagacactccacttagcccaaaacccatttgtgtgcgactgccacttgaagtggctggccgactacctccaggacaaccccatcgagacaagcggggcccgctgcagcagcccgcgccgactcgccaacaagcgcatcagccagatcaagagcaagaagttccgctgctcaggctccgaggattaccgcagcaggttcagcagcgagtgcttcatggacctcgtgtgccccgagaagtgtcgctgtgagggcacgattgtggactgctccaaccagaagctggtccgcatcccaagccacctccctgaatatgtcaccgacctgcgactgaatgacaatgaggtatctgttctggaggccactggcatcttcaagaagttgcccaacctgcggaaaataaatctgagtaacaataagatcaaggaggtgcgagagggagctttcgatggagcagccagcgtgcaggagctgatgctgacagggaaccagctggagaccgtgcacgggcgcgtgttccgtggcctcagtggcctcaaaaccttgatgctgaggagtaacttgatcggctgtgtgagtaatgacacctttgccggcctgagttcggtgagactgctgtccctctatgacaatcggatcaccaccatcacccctggggccttcaccacgcttgtctccctgtccaccataaacctcctgtccaaccccttcaactgcaactgccacctggcctggctcggcaagtggttgaggaagaggcggatcgtcagtgggaaccctaggtgccagaagccatttttcctcaaggagattcccatccaggatgtggccatccaggacttcacctgtgatggcaacgaggagagtagctgccagctgagcccgcgctgcccggagcagtgcacctgtatggagacagtggtgcgatgcagcaacaaggggctccgcgccctccccagaggcatgcccaaggatgtgaccgagctgtacctggaaggaaaccacctaacagccgtgcccagagagctgtccgccctccgacacctgacgcttattgacctgagcaacaacagcatcagcatgctgaccaattacaccttcagtaacatgtctcacctctccactctgatcctgagctacaaccggctgaggtgcatccccgtccacgccttcaacgggctgcggtccctgcgagtgctaaccctccatggcaatgacatttccagcgttcctgaaggctccttcaacgacctcacatctctttcccatctggcgctgggaaccaacccactccactgtgactgcagtcttcggtggctgtcggagtgggtgaaggcggggtacaaggagcctggcatcgcccgctgcagtagccctgagcccatggctgacaggctcctgctcaccaccccaacccaccgcttccagtgcaaagtactctggttttgctgcccagggccagtggacatcaacattgtggccaaatgcaatgcctgcctctccagcccgtgcaagaataacgggacatgcacccaggaccctgtggagctgtaccgctgtgcctgcccctacagctacaagggcaaggactgcactgtgcccatcaacacctgcatccagaacccctgtcagcatggaggcacctgccacctgagtgacagccacaaggatgggttcagctgctcctgccctctgggctttgaggggcagcggtgtgagatcaacccagatgactgtgaggacaacgactgcgaaaacaatgccacctgcgtggacgggatcaacaactacgtgtgtatctgtccgcctaactacacaggtgagctatgcgacgaggtgattgaccactgtgtgcctgagctgaacctctgtcagcatgaggccaagtgcatccccctggacaaaggattcagctgcgagtgtgtccctggctacagcgggaagctctgtgagacagacaatgatgactgtgtggcccacaagtgccgccacggggcccagtgcgtggacacaatcaatggctacacatgcacctgcccccagggcttcagtggacccttctgtgaacaccccccacccatggtcctactgcagaccagcccatgcgaccagtacgagtgccagaacggggcccagtgcatcgtggtgcagcaggagcccacctgccgctgcccaccaggcttcgccggccccagatgcgagaagctcatcactgtcaacttcgtgggcaaagactcctacgtggaactggcctccgccaaggtccgaccccaggccaacatctccctgcaggtggccactgacaaggacaacggcatccttctctacaaaggagacaatgaccccctggcactggagctgtaccagggccacgtgcggctggtctatgacagcctgagttcccctccaaccacagtgtacagtgtggagacagtgaatgatgggcagtttcacagtgtggagctggtgacgctaaaccagaccctgaacctagtagtggacaaaggaactccaaagagcctggggaagctccagaagcagccagcagtgggcatcaacagccccctctaccttggaggcatccccacctccaccggcctctctgccttgcgccagggcacggaccggcctctaggcggcttccacggatgcatccatgaggtgcgcatcaacaacgagctgcaggacttcaaggccctcccaccacagtccctgggggtgtcaccaggctgcaagtcctgcaccgtgtgcaagcacggcctgtgccgctccgtggagaaggacagcgtggtgtgcgagtgccgcccaggctggaccggcccactctgcgatcaggaggcccgggacccctgcctcggccacagatgccaccatggaaaatgtgtggcaactgggacctcatacatgtgcaagtgtgccgagggctatggaggggacttgtgtgacaacaagaatgactctgccaatgcctgctcagccttcaagtgtcaccatgggcagtgccacatctcagaccaaggggagccctactgcctgtgccagcccggctttagcggcgagcactgccaacaagagaatccgtgcctgggacaagtagtccgagaggtgatccgccgccagaaaggttatgcatcatgtgccacagcctccaaggtgcccatcatggaatgtcgtgggggctgtgggccccagtgctgccagcccacccgcagcaagcggcggaaatacgtcttccagtgcacggacggctcctcgtttgtagaagaggtggagagacacttagagtgcggctgcctcgcgtgttcctaagcccctgcccgcctgcctgccacctctcggactccagcttgatggagttgggacagccatgtgggaccccctggtgattcagcatgaaggaaatgaagctggagaggaaggtaaagaagaagagaatattaagtatattgtaaaataaacaaaaaatagaacttatttttattatggaaagtgactattttcatcttttattatataaatatattacaccatctgcgta

SEQ ID NO: 182053 - DNA, 8903 bp, Homo sapiens
  Payload ID: 15851
  Gene Symbol: SLIT3
  Gene Name: slit guidance ligand 3
  ENST ID: ENST00000404867
  CDS Start-End: 1-4182
agagatttgagtgaaaaccagatccaggggatcccgaggaaggcgttccgcggcatcaccgatgtgaagaacctgcaactggacaacaaccacatcagctgcattgaagatggagccttccgagcgctgcgcgatttggagatccttaccctcaacaacaacaacatcagtcgcatcctggtcaccagcttcaaccacatgccgaagatccgaactctgcgcctccactccaaccacctgtactgcgactgccacctggcctggctctcggattggctgcgacagcgacggacagttggccagttcacactctgcatggctcctgtgcatttgaggggcttcaacgtggcggatgtgcagaagaaggagtacgtgtgcccagccccccactcggagcccccatcctgcaatgccaactccatctcctgcccttcgccctgcacgtgcagcaataacatcgtggactgtcgaggaaagggcttgatggagattcctgccaacttgccggagggcatcgtcgaaatacgcctagaacagaactccatcaaagccatccctgcaggagccttcacccagtacaagaaactgaagcgaatagacatcagcaagaatcagatatcggatattgctccagatgccttccagggcctgaaatcactcacatcgctggtcctgtatgggaacaagatcaccgagattgtcaagggactgtttgatgggctggtgtccctacagctgctcctcctcaatgccaacaagatcaactgcctgcgggtgaacacgtttcaggacctgcagaacctcaacttgctctccctgtatgacaacaagctgcagaccatcagcaaggggctcttcgcccctctgcagtccatccagacactccacttagcccaaaacccatttgtgtgcgactgccacttgaagtggctggccgactacctccaggacaaccccatcgagacaagcggggcccgctgcagcagcccgcgccgactcgccaacaagcgcatcagccagatcaagagcaagaagttccgctgctcaggctccgaggattaccgcagcaggttcagcagcgagtgcttcatggacctcgtgtgccccgagaagtgtcgctgtgagggcacgattgtggactgctccaaccagaagctggtccgcatcccaagccacctccctgaatatgtcaccgacctgcgactgaatgacaatgaggtatctgttctggaggccactggcatcttcaagaagttgcccaacctgcggaaaataaatctgagtaacaataagatcaaggaggtgcgagagggagctttcgatggagcagccagcgtgcaggagctgatgctgacagggaaccagctggagaccgtgcacgggcgcgtgttccgtggcctcagtggcctcaaaaccttgatgctgaggagtaacttgatcggctgtgtgagtaatgacacctttgccggcctgagttcggtgagactgctgtccctctatgacaatcggatcaccaccatcacccctggggccttcaccacgcttgtctccctgtccaccataaacctcctgtccaaccccttcaactgcaactgccacctggcctggctcggcaagtggttgaggaagaggcggatcgtcagtgggaaccctaggtgccagaagccatttttcctcaaggagattcccatccaggatgtggccatccaggacttcacctgtgatggcaacgaggagagtagctgccagctgagcccgcgctgcccggagcagtgcacctgtatggagacagtggtgcgatgcagcaacaaggggctccgcgccctccccagaggcatgcccaaggatgtgaccgagctgtacctggaaggaaaccacctaacagccgtgcccagagagctgtccgccctccgacacctgacgcttattgacctgagcaacaacagcatcagcatgctgaccaattacaccttcagtaacatgtctcacctctccactctgatcctgagctacaaccggctgaggtgcatccccgtccacgccttcaacgggctgcggtccctgcgagtgctaaccctccatggcaatgacatttccagcgttcctgaaggctccttcaacgacctcacatctctttcccatctggcgctgggaaccaacccactccactgtgactgcagtcttcggtggctgtcggagtgggtgaaggcggggtacaaggagcctggcatcgcccgctgcagtagccctgagcccatggctgacaggctcctgctcaccaccccaacccaccgcttccagtgcaaagtactctggttttgctgcccagggccagtggacatcaacattgtggccaaatgcaatgcctgcctctccagcccgtgcaagaataacgggacatgcacccaggaccctgtggagctgtaccgctgtgcctgcccctacagctacaagggcaaggactgcactgtgcccatcaacacctgcatccagaacccctgtcagcatggaggcacctgccacctgagtgacagccacaaggatgggttcagctgctcctgccctctgggctttgaggggcagcggtgtgagatcaacccagatgactgtgaggacaacgactgcgaaaacaatgccacctgcgtggacgggatcaacaactacgtgtgtatctgtccgcctaactacacaggtgagctatgcgacgaggtgattgaccactgtgtgcctgagctgaacctctgtcagcatgaggccaagtgcatccccctggacaaaggattcagctgcgagtgtgtccctggctacagcgggaagctctgtgagacagacaatgatgactgtgtggcccacaagtgccgccacggggcccagtgcgtggacacaatcaatggctacacatgcacctgcccccagggcttcagtggacccttctgtgaacaccccccacccatggtcctactgcagaccagcccatgcgaccagtacgagtgccagaacggggcccagtgcatcgtggtgcagcaggagcccacctgccgctgcccaccaggcttcgccggccccagatgcgagaagctcatcactgtcaacttcgtgggcaaagactcctacgtggaactggcctccgccaaggtccgaccccaggccaacatctccctgcaggtggccactgacaaggacaacggcatccttctctacaaaggagacaatgaccccctggcactggagctgtaccagggccacgtgcggctggtctatgacagcctgagttcccctccaaccacagtgtacagtgtggagacagtgaatgatgggcagtttcacagtgtggagctggtgacgctaaaccagaccctgaacctagtagtggacaaaggaactccaaagagcctggggaagctccagaagcagccagcagtgggcatcaacagccccctctaccttggaggcatccccacctccaccggcctctctgccttgcgccagggcacggaccggcctctaggcggcttccacggatgcatccatgaggtgcgcatcaacaacgagctgcaggacttcaaggccctcccaccacagtccctgggggtgtcaccaggctgcaagtcctgcaccgtgtgcaagcacggcctgtgccgctccgtggagaaggacagcgtggtgtgcgagtgccgcccaggctggaccggcccactctgcgatcaggaggcccgggacccctgcctcggccacagatgccaccatggaaaatgtgtggcaactgggacctcatacatgtgcaagtgtgccgagggctatggaggggacttgtgtgacaacaagaatgactctgccaatgcctgctcagccttcaagtgtcaccatgggcagtgccacatctcagaccaaggggagccctactgcctgtgccagcccggctttagcggcgagcactgccaacaagagaatccgtgcctgggacaagtagtccgagaggtgatccgccgccagaaaggttatgcatcatgtgccacagcctccaaggtgcccatcatggaatgtcgtgggggctgtgggccccagtgctgccagcccacccgcagcaagcggcggaaatacgtcttccagtgcacggacggctcctcgtttgtagaagaggtggagagacacttagagtgcggctgcctcgcgtgttcctaagcccctgcccgcctgcctgccacctctcggactccagcttgatggagttgggacagccatgtgggaccccctggtgattcagcatgaaggaaatgaagctggagaggaaggtaaagaagaagagaatattaagtatattgtaaaataaacaaaaaatagaacttatttttattatggaaagtgactattttcatcttttattatataaatatattacaccatctgcgtatatgtaccatatagtgagttatttttaccaagttttgtgttgtgtatttgttgtgtttttaaaaatagctgtttaaaaatttaagaaaaaaatagactaataaaaatgctttaaaacaaaaggataagaataaagaatgatagcctgtctgaggaaggaggaagatgttttcatgtttatgaaacggtattatgtcggcagtagaccaagagctgctcattgagatcagaaaaaggaataagaggaagagagagaaggaaaagacctttgtttcttgttttttaactcccttttatttttcctcccctaaaattacccagcttttcggagtcctggatgtcagtgcccaaaatgcccagttcttccaggaaaagctgctgagccctggccttctcagtctcactgccactcaaaaatattgctgtccctgtctgtcccagaccccccttcagggtatctgaacccactgggggacccctcttctccttcctgggtggccctggcttccgtatctgaacccactgggggacccctcttctccttcctggctggccctggcttccaatcgaggactgactattgaagtctgctacaggtgtcatttggaactgtcttaccaaattttaaaacagctgctatttttcctgctcctccccaggagaggggtcttcctagaggaggcgagggaagagaatatcatggtgtctcctcaggacccatgcactggccctctctcctccttccaggtaatttttcattggaatgtatcccagtagagaaggtagtcagcccttcttggaagcggaaggctgggagccaagtcaagtctgcccacagcgctagatgtccaactctggaaggttcttggaggctcttgttgtaagacaggcctctgccacctgatcctccaggtcaccagcatgacgatagagactccttgcccatctgtgacactttccaatgcatatccaaactttaccttattttatctatgcaacccctgcctccctgggaaggataagggagtagagctgggttcactaagaaggaagtttaggccctcacaggctctggaacttgccttaagccacacaccagataagtggaggagccagaccagaagtccagacccaaagcttgagattcttcctctagaatgggtgagcacaggtgattcaggcggcttaaatccatcagagcagccctgccggaaaaggaaataatatgatgttttttcctgctcttgttctgccttgctcactccttctccctccgcagtatctggaaagattctggagaccagggcttatgcatctagggaaagtgaccaagggcagcctatccagcctctgcctccattcctgaaggggacttccctgcccctgtttctttccatgtctctccctccctcactcccatttgcccccttccaccccatcaggttagccacatatcttccagggctcagctgttcacaccaactccctggctcttatcatccatccctccttcccccaggagcttccactgtaggagtttcagggagaagagtttggaattcattggacctttcagccctcaggttccctagaggagcctagttgatctgtgagtaccaatggtgggccaaagacgcagggaataatgaagggagaaagaaaagaaaggaagatggaggaaaacgaggcaactggaagaaggaaggaaggaaagaaggaagggatggaggggatgaagagaagggagagagggatatagctgaggaatttatctaaaaatgtgcatgtaaatctccattatgttccaggtactgtgccttatgatggctttgttttttgttgtcattagagacaaggtcttgctttgtcacccaggctggagtagagtggttcgatcatagctcaccgcagcctcaacctcctaggctcaagccatcttcctgcctcagtctcccaaaatgctgggattacaggtgtgagccactatgctcagcctgtttcaaacattattataatagcagatttatttagtactttattatacatcagataccactctaattgtgaaatagatatatattcatttaattattgaaacaaccatgtagttaaaacactattaactcattttacagttgagtagactgagacacagagaagttaaagaacttgcccaagagtaaatgtctaataaaccgtagagccaggatctgggcccaggctgtctgactccagaacttgctcactcaaccactaaaccatcctgcttctcatgggaaagaaacacatcctgcctttgaggatcctacagcctgtgacaaaaacagtcataaaaatggacaattgccttattacacaaggagctcttaagtggcaatacaagcaatggaagtggctgtccagaggagggaacttctagtcctaggtctttaaggatgaataggagtttgccagagtgagaaagggaattgaactttcctgggagtggccttttaaaaagcaatgagatatggccaggcctggcttgtttggggaagagtcaaaatctagggtggcaagagtatgggaagcacactgaggagcagagagaaatggggtaggtaggaaggtagggttttgaccacaaagagctgtgcatgctaaactgggccacaggtgccagcagggttgtttgaggaagggaagagcaagacaagctctggtttaggaagagagctgtggcagcataaaggcctgaaagaggagacagagctgtcacccaaaatggacttgagagctccctgtggtttactctgtggctagaaaacactgccggccagatggatcacaaatgtctatggtagcttagaagctctgctcttgaagaggatcctgggatctgcccaacacccttcccaacctccatttccccatccccacctccattgccccatcccccctctccccctaggcaggtggatctgagccttatcccaccaccaatgcccctgctagcctctccccacccagcccagagcctactcagcctgccatctcaagagccccaccgagggtcactggcttcctgggaggagtcaccaggctgccagctttccctctgcctccccaaggaacctgagacctccctctgctcatcaccctgggcccaatcctgaatccagcccccatcaaccaagacagcaaaagggccaggtctgtcccttataattttgagccttctccctcaagtttggaagccctgactttaagaaatgccaaatgcaaggaccattaagaaaattctccccgaaatgaggctcctctaacaaatgatgattaaaacgctctctccttgagcagtcacattctagaaacaggacattccatgaggcaggaagagttcagttaatttgctcctgaaaaagtgtggttcagtgtttgtgtggcaatgtacgtgggcagaagaggccgctcaagctgtgtcccccctgagcaggattcaggaaagggaaaagaagttctcttcaactcagccaaggggccgtacgatggccgatgagattatgtatttaaaagttctttgtaaagtgtaaactaaaaaccttaaatgtaagatgctgttgttattattactgttgttgttgctgttatggacatgccaaaaggcccttgttagaagacagttttgccttttcaatctcatagcaaggaactcaagtctgatgcttcaaaaagatgagaagaagggcaagaagagggataactcccaagctcagagggaaaaaaaaggtgggggaaaagagccccagggtgaccttcaggaaaggccaggaccaggatgatctaacctttcccttcaccagaaacaaagctattgccagactgaaccctaaagtcaagcagtcacccactgcctttgctgggagcagaagcccatagcaacaagtgacctgcccctcagactcaagatcccagataccagagctggaggagtcatagggcattactggtaggcaggaaaactgagggtcgaacaaatggaagaatgcggtgatcatagaccaaagacacacagataattaaccccatgtgtccacccaggccaaagttcttcctgctaccccacagtggatgtccaggcagatggtccccacatgatggggaagcagagggcatagtgtggttttgtgggacttgttcatgttttgtagtgtgggctcaacagtgccaaaggaaacactagggaaaagttggtgaaacatgccagctagcaggaccagtaaaggcataatcaggcatttggcaaagcttgcttttctaattcaatgataggttctaataggaaatttttgaagattttttaaaacaatgttatagtggcacttccccagtatggaataaataacatgcattcttttttcaatatactgtcatattcagatgtcattaaaataaatggatgagtcacagaggagctatcagatgctctcatgactaccataactcagccctgc

SEQ ID NO: 182054 - DNA, 9706 bp, Homo sapiens
  Payload ID: 15851
  Gene Symbol: SLIT3
  Gene Name: slit guidance ligand 3
  Uniprot ID: O75094
  ENST ID: ENST00000519560
  CDS Start-End: 421-4992
gagagcgagcgccggccagctcacccggccgccccgtgccccagccgcagccgccgcgctccccagcccagccccaagccggacctccccgggcgccacgccccattgcgctcgccccaggtccccaacccggcccgcgggccagcggggccagggggcgctccgcacctgggcactcccagcgatgcgcagcggggcagcgccggccccgccgatggagctgctgttgctgccgccgccgccgcccggagcgccccgctccgcccgcgccccgtgcgcctgagcaccgagctcgcccctcctccgcgctaactccgccgcccgctccccaggccgcccgcgctccccgcgcgcctcctcgggctccacgcgtcttgccccgcagaggcagcctcctccaggagcggggccctgcacaccatggcccccgggtgggcaggggtcggcgccgccgtgcgcgcccgcctggcgctggccttggcgctggcgagcgtcctgagtgggcctccagccgtcgcctgccccaccaagtgtacctgctccgctgccagcgtggactgccacgggctgggcctccgcgcggttcctcggggcatcccccgcaacgctgagcgccttgacctggacagaaataatatcaccaggatcaccaagatggacttcgctgggctcaagaacctccgagtcttgcatctggaagacaaccaggtcagcgtcatcgagagaggcgccttccaggacctgaagcagctagagcgactgcgcctgaacaagaataagctgcaagtccttccagaattgcttttccagagcacgccgaagctcaccagactagatttgagtgaaaaccagatccaggggatcccgaggaaggcgttccgcggcatcaccgatgtgaagaacctgcaactggacaacaaccacatcagctgcattgaagatggagccttccgagcgctgcgcgatttggagatccttaccctcaacaacaacaacatcagtcgcatcctggtcaccagcttcaaccacatgccgaagatccgaactctgcgcctccactccaaccacctgtactgcgactgccacctggcctggctctcggattggctgcgacagcgacggacagttggccagttcacactctgcatggctcctgtgcatttgaggggcttcaacgtggcggatgtgcagaagaaggagtacgtgtgcccagccccccactcggagcccccatcctgcaatgccaactccatctcctgcccttcgccctgcacgtgcagcaataacatcgtggactgtcgaggaaagggcttgatggagattcctgccaacttgccggagggcatcgtcgaaatacgcctagaacagaactccatcaaagccatccctgcaggagccttcacccagtacaagaaactgaagcgaatagacatcagcaagaatcagatatcggatattgctccagatgccttccagggcctgaaatcactcacatcgctggtcctgtatgggaacaagatcaccgagattgtcaagggactgtttgatgggctggtgtccctacagctgctcctcctcaatgccaacaagatcaactgcctgcgggtgaacacgtttcaggacctgcagaacctcaacttgctctccctgtatgacaacaagctgcagaccatcagcaaggggctcttcgcccctctgcagtccatccagacactccacttagcccaaaacccatttgtgtgcgactgccacttgaagtggctggccgactacctccaggacaaccccatcgagacaagcggggcccgctgcagcagcccgcgccgactcgccaacaagcgcatcagccagatcaagagcaagaagttccgctgctcaggctccgaggattaccgcagcaggttcagcagcgagtgcttcatggacctcgtgtgccccgagaagtgtcgctgtgagggcacgattgtggactgctccaaccagaagctggtccgcatcccaagccacctccctgaatatgtcaccgacctgcgactgaatgacaatgaggtatctgttctggaggccactggcatcttcaagaagttgcccaacctgcggaaaataaatctgagtaacaataagatcaaggaggtgcgagagggagctttcgatggagcagccagcgtgcaggagctgatgctgacagggaaccagctggagaccgtgcacgggcgcgtgttccgtggcctcagtggcctcaaaaccttgatgctgaggagtaacttgatcggctgtgtgagtaatgacacctttgccggcctgagttcggtgagactgctgtccctctatgacaatcggatcaccaccatcacccctggggccttcaccacgcttgtctccctgtccaccataaacctcctgtccaaccccttcaactgcaactgccacctggcctggctcggcaagtggttgaggaagaggcggatcgtcagtgggaaccctaggtgccagaagccatttttcctcaaggagattcccatccaggatgtggccatccaggacttcacctgtgatggcaacgaggagagtagctgccagctgagcccgcgctgcccggagcagtgcacctgtatggagacagtggtgcgatgcagcaacaaggggctccgcgccctccccagaggcatgcccaaggatgtgaccgagctgtacctggaaggaaaccacctaacagccgtgcccagagagctgtccgccctccgacacctgacgcttattgacctgagcaacaacagcatcagcatgctgaccaattacaccttcagtaacatgtctcacctctccactctgatcctgagctacaaccggctgaggtgcatccccgtccacgccttcaacgggctgcggtccctgcgagtgctaaccctccatggcaatgacatttccagcgttcctgaaggctccttcaacgacctcacatctctttcccatctggcgctgggaaccaacccactccactgtgactgcagtcttcggtggctgtcggagtgggtgaaggcggggtacaaggagcctggcatcgcccgctgcagtagccctgagcccatggctgacaggctcctgctcaccaccccaacccaccgcttccagtgcaaagggccagtggacatcaacattgtggccaaatgcaatgcctgcctctccagcccgtgcaagaataacgggacatgcacccaggaccctgtggagctgtaccgctgtgcctgcccctacagctacaagggcaaggactgcactgtgcccatcaacacctgcatccagaacccctgtcagcatggaggcacctgccacctgagtgacagccacaaggatgggttcagctgctcctgccctctgggctttgaggggcagcggtgtgagatcaacccagatgactgtgaggacaacgactgcgaaaacaatgccacctgcgtggacgggatcaacaactacgtgtgtatctgtccgcctaactacacaggtgagctatgcgacgaggtgattgaccactgtgtgcctgagctgaacctctgtcagcatgaggccaagtgcatccccctggacaaaggattcagctgcgagtgtgtccctggctacagcgggaagctctgtgagacagacaatgatgactgtgtggcccacaagtgccgccacggggcccagtgcgtggacacaatcaatggctacacatgcacctgcccccagggcttcagtggacccttctgtgaacaccccccacccatggtcctactgcagaccagcccatgcgaccagtacgagtgccagaacggggcccagtgcatcgtggtgcagcaggagcccacctgccgctgcccaccaggcttcgccggccccagatgcgagaagctcatcactgtcaacttcgtgggcaaagactcctacgtggaactggcctccgccaaggtccgaccccaggccaacatctccctgcaggtggccactgacaaggacaacggcatccttctctacaaaggagacaatgaccccctggcactggagctgtaccagggccacgtgcggctggtctatgacagcctgagttcccctccaaccacagtgtacagtgtggagacagtgaatgatgggcagtttcacagtgtggagctggtgacgctaaaccagaccctgaacctagtagtggacaaaggaactccaaagagcctggggaagctccagaagcagccagcagtgggcatcaacagccccctctaccttggaggcatccccacctccaccggcctctctgccttgcgccagggcacggaccggcctctaggcggcttccacggatgcatccatgaggtgcgcatcaacaacgagctgcaggacttcaaggccctcccaccacagtccctgggggtgtcaccaggctgcaagtcctgcaccgtgtgcaagcacggcctgtgccgctccgtggagaaggacagcgtggtgtgcgagtgccgcccaggctggaccggcccactctgcgatcaggaggcccgggacccctgcctcggccacagatgccaccatggaaaatgtgtggcaactgggacctcatacatgtgcaagtgtgccgagggctatggaggggacttgtgtgacaacaagaatgactctgccaatgcctgctcagccttcaagtgtcaccatgggcagtgccacatctcagaccaaggggagccctactgcctgtgccagcccggctttagcggcgagcactgccaacaagagaatccgtgcctgggacaagtagtccgagaggtgatccgccgccagaaaggttatgcatcatgtgccacagcctccaaggtgcccatcatggaatgtcgtgggggctgtgggccccagtgctgccagcccacccgcagcaagcggcggaaatacgtcttccagtgcacggacggctcctcgtttgtagaagaggtggagagacacttagagtgcggctgcctcgcgtgttcctaagcccctgcccgcctgcctgccacctctcggactccagcttgatggagttgggacagccatgtgggaccccctggtgattcagcatgaaggaaatgaagctggagaggaaggtaaagaagaagagaatattaagtatattgtaaaataaacaaaaaatagaacttatttttattatggaaagtgactattttcatcttttattatataaatatattacaccatctgcgtatatgtaccatatagtgagttatttttaccaagttttgtgttgtgtatttgttgtgtttttaaaaatagctgtttaaaaatttaagaaaaaaatagactaataaaaatgctttaaaacaaaaggataagaataaagaatgatagcctgtctgaggaaggaggaagatgttttcatgtttatgaaacggtattatgtcggcagtagaccaagagctgctcattgagatcagaaaaaggaataagaggaagagagagaaggaaaagacctttgtttcttgttttttaactcccttttatttttcctcccctaaaattacccagcttttcggagtcctggatgtcagtgcccaaaatgcccagttcttccaggaaaagctgctgagccctggccttctcagtctcactgccactcaaaaatattgctgtccctgtctgtcccagaccccccttcagggtatctgaacccactgggggacccctcttctccttcctgggtggccctggcttccgtatctgaacccactgggggacccctcttctccttcctggctggccctggcttccaatcgaggactgactattgaagtctgctacaggtgtcatttggaactgtcttaccaaattttaaaacagctgctatttttcctgctcctccccaggagaggggtcttcctagaggaggcgagggaagagaatatcatggtgtctcctcaggacccatgcactggccctctctcctccttccaggtaatttttcattggaatgtatcccagtagagaaggtagtcagcccttcttggaagcggaaggctgggagccaagtcaagtctgcccacagcgctagatgtccaactctggaaggttcttggaggctcttgttgtaagacaggcctctgccacctgatcctccaggtcaccagcatgacgatagagactccttgcccatctgtgacactttccaatgcatatccaaactttaccttattttatctatgcaacccctgcctccctgggaaggataagggagtagagctgggttcactaagaaggaagtttaggccctcacaggctctggaacttgccttaagccacacaccagataagtggaggagccagaccagaagtccagacccaaagcttgagattcttcctctagaatgggtgagcacaggtgattcaggcggcttaaatccatcagagcagccctgccggaaaaggaaataatatgatgttttttcctgctcttgttctgccttgctcactccttctccctccgcagtatctggaaagattctggagaccagggcttatgcatctagggaaagtgaccaagggcagcctatccagcctctgcctccattcctgaaggggacttccctgcccctgtttctttccatgtctctccctccctcactcccatttgcccccttccaccccatcaggttagccacatatcttccagggctcagctgttcacaccaactccctggctcttatcatccatccctccttcccccaggagcttccactgtaggagtttcagggagaagagtttggaattcattggacctttcagccctcaggttccctagaggagcctagttgatctgtgagtaccaatggtgggccaaagacgcagggaataatgaagggagaaagaaaagaaaggaagatggaggaaaacgaggcaactggaagaaggaaggaaggaaagaaggaagggatggaggggatgaagagaagggagagagggatatagctgaggaatttatctaaaaatgtgcatgtaaatctccattatgttccaggtactgtgccttatgatggctttgttttttgttgtcattagagacaaggtcttgctttgtcacccaggctggagtagagtggttcgatcatagctcaccgcagcctcaacctcctaggctcaagccatcttcctgcctcagtctcccaaaatgctgggattacaggtgtgagccactatgctcagcctgtttcaaacattattataatagcagatttatttagtactttattatacatcagataccactctaattgtgaaatagatatatattcatttaattattgaaacaaccatgtagttaaaacactattaactcattttacagttgagtagactgagacacagagaagttaaagaacttgcccaagagtaaatgtctaataaaccgtagagccaggatctgggcccaggctgtctgactccagaacttgctcactcaaccactaaaccatcctgcttctcatgggaaagaaacacatcctgcctttgaggatcctacagcctgtgacaaaaacagtcataaaaatggacaattgccttattacacaaggagctcttaagtggcaatacaagcaatggaagtggctgtccagaggagggaacttctagtcctaggtctttaaggatgaataggagtttgccagagtgagaaagggaattgaactttcctgggagtggccttttaaaaagcaatgagatatggccaggcctggcttgtttggggaagagtcaaaatctagggtggcaagagtatgggaagcacactgaggagcagagagaaatggggtaggtaggaaggtagggttttgaccacaaagagctgtgcatgctaaactgggccacaggtgccagcagggttgtttgaggaagggaagagcaagacaagctctggtttaggaagagagctgtggcagcataaaggcctgaaagaggagacagagctgtcacccaaaatggacttgagagctccctgtggtttactctgtggctagaaaacactgccggccagatggatcacaaatgtctatggtagcttagaagctctgctcttgaagaggatcctgggatctgcccaacacccttcccaacctccatttccccatccccacctccattgccccatcccccctctccccctaggcaggtggatctgagccttatcccaccaccaatgcccctgctagcctctccccacccagcccagagcctactcagcctgccatctcaagagccccaccgagggtcactggcttcctgggaggagtcaccaggctgccagctttccctctgcctccccaaggaacctgagacctccctctgctcatcaccctgggcccaatcctgaatccagcccccatcaaccaagacagcaaaagggccaggtctgtcccttataattttgagccttctccctcaagtttggaagccctgactttaagaaatgccaaatgcaaggaccattaagaaaattctccccgaaatgaggctcctctaacaaatgatgattaaaacgctctctccttgagcagtcacattctagaaacaggacattccatgaggcaggaagagttcagttaatttgctcctgaaaaagtgtggttcagtgtttgtgtggcaatgtacgtgggcagaagaggccgctcaagctgtgtcccccctgagcaggattcaggaaagggaaaagaagttctcttcaactcagccaaggggccgtacgatggccgatgagattatgtatttaaaagttctttgtaaagtgtaaactaaaaaccttaaatgtaagatgctgttgttattattactgttgttgttgctgttatggacatgccaaaaggcccttgttagaagacagttttgccttttcaatctcatagcaaggaactcaagtctgatgcttcaaaaagatgagaagaagggcaagaagagggataactcccaagctcagagggaaaaaaaaggtgggggaaaagagccccagggtgaccttcaggaaaggccaggaccaggatgatctaacctttcccttcaccagaaacaaagctattgccagactgaaccctaaagtcaagcagtcacccactgcctttgctgggagcagaagcccatagcaacaagtgacctgcccctcagactcaagatcccagataccagagctggaggagtcatagggcattactggtaggcaggaaaactgagggtcgaacaaatggaagaatgcggtgatcatagaccaaagacacacagataattaaccccatgtgtccacccaggccaaagttcttcctgctaccccacagtggatgtccaggcagatggtccccacatgatggggaagcagagggcatagtgtggttttgtgggacttgttcatgttttgtagtgtgggctcaacagtgccaaaggaaacactagggaaaagttggtgaaacatgccagctagcaggaccagtaaaggcataatcaggcatttggcaaagcttgcttttctaattcaatgataggttctaataggaaatttttgaagattttttaaaacaatgttatagtggcacttccccagtatggaataaataacatgcattcttttttcaatatactgtcatattcagatgtcattaaaataaatggatgagtcacagaggagctatcagatgctctcatgactaccataactca

SEQ ID NO: 182055 - DNA, 23331 bp, Homo sapiens
  Payload ID: 15852
  Gene Symbol: SRGAP1
  Gene Name: SLIT-ROBO Rho GTPase activating protein 1
  Uniprot ID: Q7Z6B7
  ENST ID: ENST00000355086
  CDS Start-End: 525-3782
cgggacccttgagcgccggagccgacagctggaggcaggaagggagggttgtggcgcccgagctgggcgcgttcccagcgcctgccctccgccgctggccctgtcccgggcgcccggtgcgggtctcgaacaatggtgcggagcgccggcgcgagccccgcgcccgcccagcggccgtagaggaagtggccgggctcccggcgaggtgggcagggagacgtcccccgccactcgctggctggagtttgcctgcgcgtccggcctctcccccggggatcccctgggattaccgacggagctcaatttcgagagtatggtgccagcgcccgggctaatctagtcctctctactcgctctttttcccctcctcctcctacttctcctctccctcctcccttccctcgggtcggcgctgcctctggattgcctgcgtgtgggagtacaactctgcctctccaaggagaacgggttgtgaccactgaacaaaacttgcccattgaaagcaaacccggaacagctggataatgtccaccccgagccgattcaagaaggacaaagagatcatagccgagtatgaaagtcaagtcaaagaaattcgagctcaactggtagaacaacaaaaatgcctggagcagcaaacggagatgcgagttcagcttctccaggatctgcaagatttcttccgaaaaaaagctgaaattgagacggaatattcccggaatctagagaagttagcagaaaggttcatggcaaaaacaagaagcactaaggatcatcaacaatacaagaaagaccagaacctgttgtctccagtgaactgctggtatttgctcctgaaccaagtaaggagagaaagcaaagaccatgcaaccttgagtgacatctatctgaacaatgtgattatgcggttcatgcagataagtgaggattctaccaggatgtttaaaaagagcaaagagattgcattccaacttcatgaggatttaatgaaggttcttaatgagctttatacggtgatgaaaacataccatatgtatcatgcagagagcatcagtgcagagagcaagctgaaagaggccgaaaaacaagaggaaaagcaaattgggagatctggtgatccagtcttccatattcgactagaggagagacatcaacggcgaagctctgtaaagaaaattgaaaaaatgaaagaaaaaagacaagcaaaatattcagaaaataagctaaaatcaattaaggcacggaacgaatatctcctaacacttgaagccaccaatgcctcagttttcaagtactatattcatgatctttctgatttaattgattgctgtgatcttggctaccatgcaagtctgaacagagccctaagaacatatctgtctgcggagtacaaccttgaaacctccagacatgagggcttagacattattgagaatgcagttgataatttagagcccaggagcgataagcagagattcatggagatgtaccctgctgcgttctgtccaccaatgaagtttgagtttcagtctcacatgggtgatgaggtgtgccaggtcagtgcccagcagccagtccaggcagagctcatgctcaggtaccaacagttgcagtcccgccttgccacgctcaaaatcgagaatgaagaggttaagaaaacgactgaagccaccttgcagacgatacaagatatggtcaccatcgaggactatgatgtttctgaatgcttccagcacagtcgttccacagaatcagtgaagtccactgtctctgaaacctacctgagtaaacccagcatcgccaagagaagagccaaccagcaggaaactgaacagttctacttcatgaaactcagagaatatttggaaggcagtaatctcatcacaaaacttcaagccaaacatgacttgctgcagaggaccctgggagaaggtcatagagctgaatatatgactacaaggcctccaaatgttccccctaagccccagaaacacaggaagtccaggccccgctcacagtataatactaagttgtttaatggggatttggaaacattcgtcaaggactcaggacaggttattcccctcattgtggaaagctgtattcggttcatcaatctctatggtcttcagcatcaggggattttcagagtgtctggttcccaggtggaagtcaatgatattaaaaattcatttgagagaggtgaaaatcctttggctgatgaccagagtaaccatgatattaactcagttgctggcgttctgaagctctatttccgtgggctggaaaaccccctctttcctaaggaaagatttaacgatctgatttcttgtatcagaatagataatctctatgagagggcgcttcacatccgcaaactcctcctgactttgcccaggtcggtccttatagtgatgaggtacctctttgccttcctcaatcatctatcacagtacagcgatgagaatatgatggacccttataacctggccatttgctttggcccaacattgatgcctgtcccagaaatacaggatcaagtgtcttgccaggcacatgtgaatgaaattatcaaaaccatcatcatccaccatgagactattttcccagatgctaaagagctggatggccctgtttatgagaaatgtatggctggagatgactattgcgacagcccatacagtgagcacggtacattggaggaagtggaccaagatgctggtacagagccccacacaagtgaagatgaatgtgagccaatagaagcaatagccaagtttgactatgttgggcggtctgccagagaactatccttcaagaagggtgcctccctgctgctgtatcaccgtgcatctgaggactggtgggaaggcaggcacaacgggattgacgggctggtgcctcaccagtatatagtggtgcaggatatggatgatacgttttcagacactctgagccaaaaagccgacagtgaggccagcagtgggccagtcacggaagacaagtcctcatccaaggacatgaactccccgacagaccgtcatcctgacggctatttagccaggcaacgaaaaagaggagagccaccccctccagtaaggcgtcctggcaggaccagtgatggccattgcccgctccaccctccacatgccctttctaactcctcagttgacctagggtccccaagccttgccagtcacccccggggcctgctgcagaaccgtggcctcaacaatgacagtcctgagcggaggcgcaggcctggccatggcagcctgaccaacatcagccggcacgactccctcaagaagatcgacagccctcccattagaaggtccacgtcatcagggcaatacacgggcttcaatgaccacaagccactggacccagagacaattgctcaggatattgaagaaacgatgaacacagctttgaatgaactccgagaactggagagacagagcacagcaaagcatgcccctgatgtggtgctggataccctggagcaagtgaaaaactctcccacccctgccacttccacggaatctctcagccctttgcacaacgttgccctcaggagctccgagcctcagattcgacgtagcacgagctcctccagtgacacaatgagtactttcaagcctatggtggcacccagaatgggcgtgcagctgaagcctccagcccttaggccaaaacctgctgttcttccaaaaacaaatcctaccataggacctgccccacctccccagggtccaacagacaagtcatgcacaatgtaaaaaccagccaagcaaggccataaagggaggtgacttaaaaaagaaaatggattagtgacaaaagtcactgatccataactttccttagttttgtgcttataactggagatcttttggcttttctatgttgtcgaatgtaatgtctgagactagctaaattaacacgggcatttgtattttgtaatttttttaaataactggacatatgtcattttaaggacaatagaaacacttagacttacttgaaaatccaatgctgcaccacttgtaatgaaggcaacaccgctctccacattgtacagagcttcaggtttaatgtagcccagctgagtcagaaaggttgtgacctgaaggcagaagaacccgaatgccacacctcattggagtatagccagtgttggtctgtggcacttgggctgaaaggtgataatggcattgcgtggtagctgacaatgagcaccttcggttccatgtggagcggggtttagctcatgcaaaagacttgcaattgtctccatgggacgatcccagtgggactgtcagcccacagctcgagtgggttggatgcttgcctctttcctaacagttatttccccgggtccagcttaaagactcgatggaaggaggtagaacctctgctgttactgcttgaacttaacctgggaaaggagaggaagacaccatctccaaagctattaatgtcactccttttgcgagcatgattaggccccggagatttccaagtccccccatctacacttacaaacgattagaagggtttaattttaaagactttctggttacactactccacgaactcctccaaagatccgttattcaataactgcctagaaaatgtttccatctcctctaaatccctgtgttctcctctgtggaaatgaaggcagcaagaagcacctgaggccttggttcatgcagtgttctcttttgactaaatcacctaggttcctttaaacatgctacaaagcccaggcatggtggtgcacacctgtactcccagctactcgggtggtttacacaggaggatggctttgggcctagtagttcgagtccagcctgggcagcatagtgtgagaccctgtctcttaaaaaaaaaaaaaatgctacaaagtcctgatgatcctaaatttgaaatcccaactgtcctctccatttgtctttgagccaaccctgaactggccctggtacctgagtaagagccatgcagggccatcagcagaacatggccttgtggttctcacccagttgtgtacctcacaaccacaacttctttttctttgtcccttttcccctttttggttttggttttgtatgtgggctctatgtaactcccatagtcagctgaactctcaattggagaccctctttctctggcatcctagcacacaggcaattttttaagcctatatttatgctacattttcccccatcttaagaaaatttgctttgatttccattctcctactagcagcagctgatatcacctgtagacctatgagcattttatctattctatcattgaagttactgataaagatttttgttgttgttgttgttgttgggagaaatggatttcccacaactaatccctctggcccaccattaatttccttcttggtttcatttcaaactggcagccaattgcacgcccatctaagagctacacagtgtagattttacttcatcagcccattggtgaatgcatcgtgcagaaaagaactgggatctgtactaaaatcaagatcattactttgatctctacctcagtttgccagtgtagtcattctattgcaggaagagattaaattgatgagatattgttactttcagagtcacactgctgattgcttgcctggggcctaatttcacaaatgaatagtgacttttttcccatgtatttctaggtatggtaaacttttaaacctccaaattttcagagccatactttttgcccattttgaaaaagaagcccaggacagcaccttgtctagcccctccccatttctcctgagcttttggggtccttcagcacccttggacaccgtggagatccagccaagactgagctttgaatagcactagcccttttaaacaatcctcacaaattccttaggaatttaaactttccaaaataatcccccacttttttttttttttttttttttttttgagttggagtcttgctctgtcgcccaggccagagtacagtggtgcaatctcggctccctgcaacctccatctcccgggttcaagcaattctcctgagtagctgggattacaggcgccaccaccacgcccagctaatttttgtatttttagtagagatggggtgtcaccatgttggccaggctggtctcaaactcctgacctcaggtgacccaccagcctcagcctcccaaagtgctgggattacagatgtgagccaccatgcccggccattccaccacttctttaaaatagtaagaattcttaaaaaccatattccttgtttgatggaagagtaagatgttaacagagggcatcaaagggccagaggtgtctttgaatttattttttttcaatgtcttttctgagcttcagccttagcttttcagatcttcctcctacctgttcatttattcagccttctatctggtcatcctccccagcggctcctctctctgatgtgtccacctacggtggaacgaggattgcctttctgtgctccccatcaggactttgctgtcttggccggcaggagtcgtgctgctgcagagcctcacaggctgtgccttgtttcaggaaacagctcctaatactctcccatcactcactttacctgtctccatcttatttccctatactcctattgtcagcttgagactttttttttttttcaattccaaatgaagggtatgacctcagagtgagtgaggactcagtaaagactcacctctccttacttggtttattaaatgtcttcagattccagagataagacaaggtggccacttcacaaagaatccagaatcatgctcagtaaagctcattaaaagccactgcagctgagaaggttcacagcccttctttatagccacagaggcagcacacaggggaggtgggaagacacagggaaacgagagaagaaggataatgaggccttgaggtgttctgcccccaatttcaaggagcttatcaggcttcatgtgcaatttggggaggggagctttttgatggtgggtaaataatggctctacaaagattacctgactccactgacacaagaatatgtattctcagctgatataactgtgtgttcacatcccatccatagaactcactgaaggagattcatcaagtcagccttttggactgggttggggtttggggagtggatttggggatagagagaaaggtgtacttagtacacattttctaatgggcgttacgtgaactgtttgaacctgctgagtggcgctttgtagagctccatgttcacgttcagtgtcaacaccattcaacagctttgcacatcttcgtacaacataatctggctttggtgccccttgagccacctgtagaataatttatagcagggtcccacaatctactgcaatgatcgtgaacagttatcagtggatatagtgctccaagagtcaaattgtatccgttaagggttttctaacttttgctatcccccccgcgaccaaaaaaagggggggtttataatttaaagaaaaggaaaagaggcgtgggttggtagttgtgtccttaacatttaggaatgacatagcctctggagtctacaaactgaagaaactttcatctgatcagccttggaaatccaaagttaaagagcctatgtgtctcttgaggcgggggttagaggattcaaatttgggatgatgctcattgattcctgaccatagcagtgagaggccattttttgtgcaggaaatgtgcttaggactcagtcttgttttcgattatccaccacagaaaccctgagacacagagcagcttagaagtctctacccaggcgtaaatagagctccctactccagaccacctgccacccacctcccaagttgagaacacaagctccagctgggctggagagtcaggcttggtgcagggtgactttggcgaagttttgtcagatccataaagcaaactggaatttgagctttcacttaccctagtatacgttcttaaaaaaaaaaaaaagtctatgtggtataatcgagatggatacctgtgtctttaaattacgtagggaattttgtatgtttaaataattgtactgggttccataatgcttatcttagaaactttagtaaaagaaaatatatgaaccgtgcatttgtgaatgccccccttagagcattcatccaagttcagtgtgtagtgtgatggttattatagatatttaaagtatagtaagtggctgtgtaacaggagagactgctgtttacctacgtactgaagggtaactgctgcccgcgtaattaaatcagtattgtcctttcctgtcggtttgatcaattgcggtaccggtagcttcctgcttgtgactgttacctaattgtgtcaatgtacatctgtagtatgtacatgtgaaagtgcctttctattttagaggagttttagccttgctcttgtaccgttgccccgctctgtgccccacccccacctcctcctcccaattcctgctgcccactcgagtgtttcgaagcttcctccctgtcccccaccttccccatccccgccttcctgtgcctcggtgctcagtaatgtcccatctcacctccctgtcggtcctcagactgtctcgttttccttgtagacgtgattgtgcctttctcacccctgtgtcctcccatcccaccgcatcagtcccccgctcatgtgctgctgacagcatcgcattcgcccgtgctctgtactgcctctcaccatttcattccctcctctctgaggtgaaaataaagggggatgcttttacagtctggaaagaaaaaaaatgttttgttaatctgttgtgacaatgcacttttatgtatagtactgtacatttttggcatgtaccattacaggcttcagtatacagtcaggtttgttcttcacggtgtatctttataataaataagatagttctggctgcctttgtctgcttccagtttgatgtgcatctctgtggtgtctttgttcctttcctttcattcatcactactttctccttgacagctagcttgcattaaataatgtgaaacttttacctttaaaatatttttttatctcactttcatttcttgttcatttggaaatagggtgtcctgcacagggccctgcccatgaagctgtggtttttcagtcatggtttggaggctcaatgtgtagtcagagaaaagagtcttggcagacacttaactgagaagctgagagtgtacaagcctcctaaacatacaccagattgaaatctttcttttgagaaagactctagttaaccacggcaagcccatctttggtttcatttgaataaattgaaaaataatccttaggttatttttctgtgcttagaactccccgtgtattggtatttttctttacttttttttttttttttttgagacgaatctctctgtgtcacccaggctgtagtgcagtggtgcaatctcagctcactgcaacctccccctcctggattcaagcgattctcctgcctcagcctcctaagtagctgtaattacaggcacccgccaccacacccagctacttttcgtatttttagtggaaacggggtttcaccatgttggccaggctggtctcaaactcctgacctaaagtgatctatctacctgcctcagcctcccaagtgctgggattacaggtgtgagccattgcatctggccaggtatttttctttaaatataaaaaaaagataacttgaggtctagcaatatgtagtagatagctttgtaaaacaatgtaagttgtgcaagattgaatattgataagatataaagtttaaaaaatgacaggcaaatcaaggaaaaacactttttattaaagtgcagaatactaacaaaagtgtgcaaatcattagtgtaacagttctcacgagctgacacactgatgtatccaccacccagtttaagcaatagcacattatcagcatcccagaagctactgtgctcatgcctctgtgaatgtatcagtatcctgactaatcacaccatggtgtagttttgcctgtcatcttagctttctataaatgggttcatacagtatgtagattttgtgtctggctccttttgttgaaatgtatgtttgtaagagtcgtcattgttagtaaaatagtggtttttccatttttactgctatatagaattccattacatgaatatgctcaatattatatttattttagtatttcctgattaaactttgggtagtatatgcagatatctttaaacatggagaaatgaatggggggtgagggacccacctgtcaaaggaattgttttcccaaactatgacggaataatgttgaactaacctgttgaccggaaggcctactcaaaggcaaggatacttttctttctttccaaaaaagcactgtctgatatggagactggaaatattcatagatgacactgaaactagttgaagctttacttgatgcttatcaagtcatgttctcttacccgatgctggatgctttttcttcaatgcctactttaggaccacagagttggatttagaggctagcccaccaggaacaaatgcccaaatcagtctgtagagttgttccaggaaagactccaccatcctgctaccctcaaatcttaagctcctcagcctgccacgaccatctcctgttgagaaaattgcgcctgcctccccatctctcactcccgaaccagagtcccaacggggtgtaactggtcgtcagttcccacagttcatatgcctgcaccctgtaagaatcttagaaaggcagagcaagggtgtttgctggcttctgccttgagtagttgggactcctaaaaaggaaaattccccaagtttgacctagaatgtcaaaaaggtcctaaaagcacagaatgatggtaaattctatccacaggccatatagccctggaaaatattgggaaactgaggcatgggttggtaatttattgaagtttagtaaacgaatttgaattaattaggaccagataatcaatttttggcttacttatactatagtataagcaaataagtatttaaactttagtataaatatttttgctcacttaataatcacggtgaggttcatcacctcttcagtagccttttatctgtttctacatagtaaatagaaaacttgccttctataataaaaacaaaatagtttttctatcaaggtcagtctcagcaagagaaatgggactgggctggatatcaacacatgtgcttgtgtgcatgtgcacgtgtgtgggtgggagggtgcggaggggttgggaagagagattgctcctcccgcagtgctgaaacaacatgccttgttcagtattaacatcttgaaggcagttatggcagcatgatccaggagatcgtcagctctaggatatttgcgatccaattctggcgacttatggatggatccttcacacccaacagctgtctatcaggggtgcttccgagggtcactgggtttcttttagctgcttggctgtgcagctgaagttaggacttttgatgaattaccctctcaatgatggtgtattgttctaatcttctgtctctgacatacccaaggaaccccttgtgtaaaaatcatgtccctctaaatgcaagtggatgattgtgccaataagccaggagagaaggaaacatcttcagtggtccagtggcacattcaaaattgtacaatgacatgacattaactcaaaaatgaagtttgaggttctgggcctttgatggactgcatctattaaaaacaaaaagtggtgtctcatgcctgtaatcccagcactttgagaggccaaggcaggaggatcaaaaaatgcgaatttttatatttttttgtgagatcccatctctaccaaaaaaaaaaaaaatacaaaaattagccagacatagtagtacatgcctatagtactaggtacttgggaggctgaggcaggaagattgcttgagcccagatgtttgaggctgcaataagctatgattgcaccactgcactccaacctgggtggaagagtgagaagctatctcaaaaaaaaaaaaaaaaaaaaaaaaaacatggtcaagatttgtaatagaaattgccatttgaattttggtctgtaagcccaaagattgttactgtgttagtaactaaatattacgagatgcattaggaaaagaaggaaaagaaattttaagtaagccaaaaatctattatatagtcataagtcaaactcagttactagacttcaacaaataccaacccatgcctccatttcccaaacagaaataataatatgaacatcttagtatattgtcttctaatccttacattatgttatttttaagcagagtcaaactcatattctgtatataattgtatatacattgggtttttctcccttatagcaattcacactaggagtctcagtcaacatgattttttaatggctgtataatattctagcgtatgaacacatcattatttaaccattttcctgtcactgagtgagcctgtttgaaggttttgtttttttttcaattgaatgttatgttgtggtgagcagctctgtatataataattaattgtctgtgtttggatcataaagttagcattgactccaaaaagtgaaatcactgggtcagaggatgcaattatctgtaaggctcatgacaaatattgccgacctgttttccagcaaagttgtacaaatttacatccctgccagtaatgcataacagtacacgagtataaaacatggtcatgtttctttaccagtgtactaggtgagtgataggctcaatgcaaattcttagcagtttgttaatgtgcacacccacatttccagagtacaaatctctatttcactcacctctgtgtcctaaacttcagatgactctttattgtttcagctaaacatcagcaaacagagattttcctcaggcaccttaagctcaacagacccaaaaattaaacccactttgtttcattccaaaaaatattctgcagcccctctacatcctccaatctgttccgctgcctatctctgctctaagctaattctgtgcaccattccccttgccacaacgattgccgtagcttccacggtggtgtggctgtgcccactgtctcctccttgaaatgattatctacactgctgccaataaatcatctttctcaaaaacaaaatgagaaacctaacaaacaatcattgaaaatgtaccatgtactgacatcgttttcctcaacacgttgcatgtcaatagccaacatgtattgagtaccagactccatgctacaaatgttaaccctcataagaaagccaagagagccacagttattatcatcatctttatccgtaagaaaattaagccgcaggagttaaacacttgccctggtcacacagctagatagtgacagagcaggatttgattccacgccatctggtgctggaggctatgctcataaccactgctgcattctgacctctgtaacatgctcatgtcattaccctgctcaaaagccacacgtgggtccccactgctgcaggacggcatactactgtgtcttattcatctttgtatcttcaagcctaatgcatcactaactaaatagcaaatcggcggaactgaaatgaattcaatgtctgccgctttgacctcagcctgccatttcagccttcctgctcaccacctcctcttcggaacctttagtttcagccatagcaagctacctttctttgaaaatgtgatgctgtgtgctccctccgcatatacttcatgtcattcctcagcctaaaatgtcccctacttcatcctgacaactgcctgttgaaattatattcatcattccaaacccaacaaaatggttacatccttcatgaagggttccccaaacctcccagctggcattaattgttctgttacattttgttttcattaaatcaggctcccttccggggatctagctgtgaatgagacacacagggctcctggtctcatggagtgtacttcctggtatgatttaaaaaaaaaaaaaaaaaaaaaaaaaccactacataagccaacagctaaaccggcaaaataatttcaggtgttgataactgctacaaaaagcaaaagtgaaataaacagggtgatagaatttagagtgtctaggagaagcattttagatgggacagcttgaatgccaccttggatgtggtagcatttgagctaagacctgaataatgagaaggaaccagccatgtgaaaaggaagagaaagacccaagcagaaggaactgcacatgggaaaacaggaccatgctcacgtggttaaagagtcaaacacattcactgtgactgtaccaccataagcaagaagccctggagatgaaaataaaggccagaatgtggacagagatcagattttggaggccaaagtaaggtacttaaaattagccgggcttggtggtgcacaactgtaatcccacctactcgggaggctgaagcaggggaattgcttgaacccatgagacggaggttgcagtgacccgagattgtgccactgcactacagcctgggcggcacagtgagactccatctcaaaaaaaaaaaaaaaagtaaggtacttagatgtcattctaagttcaaggaaagccattggaagtttccaaaaaggaacatgacagcatctatatttttagaagatgaccctcaaaaccacaatgagatatcacctcatacccattaggatggccactctcaaatgatcaaactccagaaaataacaagtattggccagggtgtagagaaactgacacccttgtgcactgttggtgggaatgtaaaatggtagagccactaaggaaaacagtgtggaagttcctcaaaaaattaaaaataaaaccctcatatgatccaccaagcccacttctgggtacatatccaaaagaattgaaaacagaagagatatttgcacactcatgttcacgcagcttaattcacaatagccacaagagagaagcaacccatgaatggatgaatgggtaaagaaaatgtgccatacacataaaatagaatattatgcagccttaaaaaagaaggaattcctgtcatatgccacaatatggatgaaacttaaggatactaagctaagtgaaatgagccaatcaataaaggacaaacattgcatgattttacttctatgagatatctaaagtagtcaaactcttataaacagaaagcagaatggtgattgccagggatcgggatgaggaagaaaatggaaattgttgttcagtgtttacagggtttcagttttgcaagataaaaagttctaaagatctgttgtccaacaatatgcatgcagataacatcatattaaacatggttaagatagtaaattttatactatgtaattttttaaccacaattttaaacatcactgtagatgttgtagttgtgtttggggtccacgggtggggaggagcttgggaaggaatggcatgagggaagtgagagaccacaattaaggagcaacacaggagatgagggtggcttggactagatagccaggtagaaggagaggaagggatgaaccgggggttcgtttcagagtcaaaatcaagatttgctaataaattaaatatgggaataaagaaagaaaagaatcaagagtggctcctagtatttgtttgagcaaatgggtggaatatattgatatatacttaaaaagaatgactggggaaaggaagaagttggccaggatgtacaaccaagtattcacgtttgaatttatttaatttaagataggtattagacttccaagtggagaagtctaggaggcagatggacttgaagctcaggggaggatttctggccagaaggtgtaaatttgatatttaaagctatgggactcccggaaagagaaagagaaaggaaggtacagagcacataaccaagccctgggaagcccagcttgggagagcttgggtggagtgaggagctggcagaggagacagaaggagcagccagggcggaggaggaaaaccaggaggagcatgtaatgtgatcagtacccagggaagaaatgattgccatttctagtgtgcatttgttaacataaatatgataataaaaatagttaacatttgttaaatatatatatttttttctttttctttttcttttttttgagacagagtctcactctgtcacccaggctggagtgcagtggcatgatcttggctcaccgcaacctctgcctcccaggctcaagtgatcctcccacctcagcctcccaagtacgagggattacaggtgcatgcaaccatgcccagctagtttttgtatttttttgtagagacggggtttcaccatgttgcttgttaaggccgggcacggtggctcacgcctgtaatgccagcactttgggaggccgagacaggcggatcacctgaggtcaggagtttgagaccagcctggccaacatggcgaaaccccatctctactaaaaatacaaaaaaattagccgggtgtggtggcgcccgcctatagtcccagctgttcgggaggctgaggcaggagaattgcttgaaccagggaggtggaggttgcagtgagccaaggtcacgccacggcactccagcttgggtgatagagtgggactccgtctcaaaataaataaataaataaatatattaaaaaataaacaagttcaggcttgttaaatattttttatgtttgtttgtttgctttgttttttttgagacgtagtcccgctccgtctcccaggctggagtgcagtggcgcgacctcggctcaccacgacctcggctcaccgcaacctctgcctcccggtttcaagcgattctcctgcctcagcctccagagcagctgggactacaagtgcgcacaaccacacccagctaatttttttgtatttttagtacagccggggtttcgccatgttggccaggctggtcttgaactcctgacctcaggtgatccacccgcctcggtctcccaaactgttggcattacaggcatgagccaccacgcctggctgagttaaatattttctatgtgccaagcactgtgctaactgctttcatattatcggatttagtcctgtaagaccggaatcattattatccccatttttcagattaaaacaaacaaacaaaagctgaggtttaaagaaattatctcttgtaaaatcacacagctaacaattgagccagtatctggacctagatctattgcctacagagccgcacgtttaactactgttatcttgcctccttattgctccacacacttgaaatataaatttttaaagacattttattcttttttgtcttcatcagaatttattgaatcctgattattttttccttaatgttgattttgtagactcatttgcaggaagaacaatgtcaggtggagagaaggaattgaatgaatatttttaataaatttgtagatgttaatatgatttacttatttgcaattttcatagctatatgatattctatcccatttccagtgtttttgctcttttagtagcaaatactctgaatctctgcatatgttactcattttctatcatcctattccttgtgatggatacccaagggtactcatctacaggatgaaagggtatgagcacgtttctaggtgccctgaccccaagattaggggttttgttagaggcaaagctaaaaggaaatgataaaataaatgaatatttatagaagttaaatctattaatctagccttattacaccgagtacaacagggaataataagccatctatctgaacgtgcacggttagggcctcaaggaaagtgggctcagcaatgagtgttggtacacatggaaaatcacatttgccatgttttctatggctttgggctgctgctgcatcactgcagtttaataggaggaggctggtgaaaatgttaccaactgccaggggtcaatggcgaaagaacacatttctctaggaaagattaccttctctgaagaagtgatagggggaataaggcataaaattatctgacctgagagaccttaacagctaggcctgcactgctcatgctttgggaccagaaagcggatggtttgatatggtagctgcacttctaaaaaaaaaagggggcattcttggcaggagaaagggtgttacatggaaagatcagcgatagtacacacgccttcccatagagtgaggtggctttcccacccctcaacactccttcagacccccactgtaacaaagggatgtgtctacctctaaattcatcatttactgaacaaataactcatgagggttaccatatgtctgacactgtaggaagagctgaagcagggcctaaaacactatagtgcaagtatctgtttacacatctgtatgagagtaattgatgctagctgctgtaacaaacaaccccccaaactcagtaacacaatcaagctgtatttctccttcacatcatagcctggtgtgggtcaggtaggtgactcagggttctaggctccttccatttttttgtcgctgccacactggaaatgggatagaatatcgtatagctatgagaattgcaaataagtaaattatattaacatgtacaaatttattaaaaatactctttcaattccttctctctgcctgacattgttcttcctggaaatgagtctacaaaatcaacattaaggaaaaaatgatcaggattcaataaattctggatagaaaaaagaataaaatgtctttaaaaatttatatttcaagtgtgtgggggcaataaagaggccagataatagtagttaaatgtggggctctgtaggcaatagatctaggtcagatactggctcaattgttagctgtgtgatttcacaagagataactgatgctagctgctgtaacaaacaaccccccaaactcagtaacacaatcaagctgaatttctccttcacatcacaacttggtgtggatcgggcaggtgactcagggttctgggctccttccattttttttgttgctgccaccttagtacgtggccaccatgaagaggaagagaaagcacttgcaatgatgtgaggttttctgtcttggtatggaggagacatgaatcactactgtacatgtccaagtcacatggcaagggaggccaggaaatgtcatcttcctataatgcaagaaaaagaacccagggccgggcacagtggctcacgcctataatccccacaatttgggaggctgaggcaagaggattgcttgagcccagagcaattaaacactgcctggtgcatagttagtgctcaagaattgtgctataatcaatgttactaaattatctaggattagatgtttctaaattaaaactatttcctgctttgtatttgtcctttattccaaaaacttaaaaatttctcatttctggtttgtcagggatgaaatactaaagcaacttcatggattgtgatttcaagtatatgaaaagtttaagacccaattgcttttgaaggagattcatctagaaaaaccagggattcaaacccaacacatcgggtgctaaagtctaccctcttagttgacatagaattaaattaaaatcagtattgattggattatgctttgataaaaatgtaacttcatttaagtctagtaaataattaggattatgaggtcaggagtttgagaccagcctggccaatatggtgaaaccccgtctctactaatgatacgaaaattagccgggcatggtggcgtgcacctgtagtcccagctactcgggaggctgaggcagaagtatcacttgaacccgggaggtggacgttgcagtgagccaagatcgcaccactgcactccagcctgggtgacagggtgagactccatcttaagaagaaaaaaaaagcaattacttttgcaccaacctaataaaaatgaaaaatcccaatgaaaatgcatgaatatcatgtgccttgacaacttacggagcatttggaacatgtcaaacagtaatcagaggtcaggttgaggaaaaaatgataagaaccctctctgccccaccattcacatcattcagtggatctatgtactaaatctagccagtgggttgtgagcaaaaatgatctgtgtcacttgtgggttaaaatataaaagagtgctaggcacactggctcgcacctgtaatcccagcactttgggaggctaagtgggaggatcgcttgagcctaggagttcaagaccagcctgggcaacatagcaagaccccatccctacaaaacagttttttaaaaaactagctgtagggcaggcacggtggttcacacctgtaatcccagaactttagaaggccgaggtgggtggatcacttgaggtcaggagttcaggaccaacctgaccaacatggtgaaaccccatctctactaaaaatacaaaattagccaggcgtggtggcgcatgcctgtaatcccagctactcaggaggctgaggcaggagacttgctttaacccaggaagcggaggttgcagtgagccaagattgcaccattgcactccaacctgggcaacaaaagtgaaactccatctcaacaaacaaacaaacaaacaaacagtagctggttgtggtggtgtgtgactgtgatcccagctacttgggaggctgaagtgaaaggatcgcttgagcctgggaggtagacgctgcagtgagctgagatcatacctctgcacttcagcctgggtgacagagtgagatcctgtctcaaaaaataataacaataacgtatgagagaggattcaagctttccaagcagtctcttcccctgccatggcactcatagaagcctcccgttaagatggcagagctgtaatgctagaaaagcacagactgttaagtcactgcatggaggatggtcatcctggagaattgtttggactcgagtggactctacaacagcaggaaataaactactgttatatcaagctactgacattgagaattaggttgcatagttatgccacagcataatgtagcctttcctgatgcatacaattacttttcctttcttttttcttttccctggagttcataattacctttgtttcatttgcttagctttctatttacataaataggtaaaaattccttctcaaaaatcttttacagaagtgttctcaaactcaatgcattgaaacatgctatagtttataaatcttggatccatcacttaaagaggcatttgacctgtttcagtatggataagttgttctctaagtctactgcatagctgagagcctaagatctctggggactcactccacttttctcttgagttggttccactatttcctggaacctcatacagccatctcagctagtcatgactgacctagatttaacacagtatatccttaatcagcttcctgattgagagtgtattttgagacattccatgtctagaaagtgtctttatctcacatgtaattgtgatagtctggctgagtataaaatcttacttaggatgttaacttaaaatcaatgtggtcaaggaaaggaggaaaaatatgtcctcctagtaattcccagtgtaagtggaaatgacccagccctagatttacttggctttagtttccatcaccatagatttctcaatcaaaaggcaaatatatctcatatgtcggaagattaatgtatgaataatcagtaccactggcatatggctactctcctattttccttacccctttgtcttcacaaggaagcccagactctgtttgccagtggctgggtcctggggccgataacttcaagctaaacattcaatatcagtatggtaggtgaggaagattttctcagagtggctcattatctggaaagtgtaagaatgaggtggcagaaagaggtagaaacagcatgaaaaggcagagccaaggagagatcgacaaacaagaaggattgtgcccatatttctctattctctctagcattatgaatcatttcccctcaggattttggagatgttgcatcagtgttgctaccgaacattccaaagccattctaattctgttactttgtatgttcttttttttccctatacataatttactattgcatgtttttctcagggtttctgaaatttcagaatatcctgatgtggatctattttgattcattgtactgaagaccatttcagcccatcttacactttgattctggaaagtcttcttttccctggagcttataattacttttatttcatttgcttagctttctatgtacataagtagataaaaattaattcattctcaaaatcttccacagaaatgctttcaaactcaatgcattaaaaacatgctatagtttataaaccttcttggatctatcaaggaagatttatttgattattttatctcctccattccatctgttttcttataattcctaatatttggaggttggacctcatgaactgatcctataattttactaattttcctccagtttttcatctatttgactttttgctctattttcagggaaatatcctcaactttatctgctaactcttctgttaagtactttatttctgctctcatgcttttaatttccaaaagctctttttgtgagctggctgttcatttttttatagaatcctgtccttatttgacaggtcctatatatttttttattttgagattattagtgatagttcttctaagttttcttctctctgcacactgtatttcctctaagttgcttttttaaatttttgacctgtgtttgctttgctttcgtttatgttacaggctttcctaaaattcctggtgatccttggctatctgctcgaatttaaaaacaagcactaaagaagggcactaaaaaacagattgtcatagcagtattatccataatagccaaatgatagaagcaatgcaaatgtccatcaacagagggacaaatgaataagcaaatgtggtatattgatacaatggaatactattctgtaatgaagatgggaaagaacggagtactgatacacgctacaacatgggtaaactgaaaacattattacgtgaaataagccagtcataaaccacatattgtgtatattttatccataagaaatgttcagaataggcaaatctataaaaatacaaagtagatttgtagttgctgagggctgggaaaagggtttggggagagaaatgactgctaatgggagtatgggatgttcttttggggctgataaaatgttccaaaattcattgtgtgataactacacatctgtaaatatactaaaaaccactgaattgtatccaataaagtactaaattgtatgatatatg

SEQ ID NO: 182056 - DNA, 5652 bp, Homo sapiens
  Payload ID: 15852
  Gene Symbol: SRGAP1
  Gene Name: SLIT-ROBO Rho GTPase activating protein 1
  ENST ID: ENST00000543397
  CDS Start-End: 1476-4544
cttgctgttaatgaacttggttaaacatggtcaagtgtatgtatgtatatattatcagtactggccttctctatctaagaggaatagcaagaaatttagagacattatttggacattgatttctactaactccactgaattagattcagccttcactttttgggaaatgcacggacactgggaaagatgaaatgaagaagttttccagcatgatgttcttgtctttggagcttagccttacttaggtcttagaacaaaaacaagtcggtagttattagttactgtatctcattttccaaaacacacgtttctttgttacagtcatttacacatatttttgcatgccacatttttgcttttgagcttttgctgaatcactaaatgaccacctttcatgttcctaatgtattaaaattatcagaggattctttgaggattaaatgtgtcagtaagggtattattttgaacaatgcgtaaaaggtgaaggccagctgaagaggcctttttgttgtgaacagaataatatactggaatctgaggactgcactgttatgaatggattatttggctatggaaagaagttatttttaggcacagcatccctataagccctgaagctatgtgttttacaaactagaaattatgcactaaataaaaattaccagatgtcagtctctgtatgtgccaaatggcaaatgtgtaatggttcagagcctggaagaaatgatgcttatttctttgccattcaaactcaaaagggatagctgaggtagagtgctgttgaaaaaattgcagtgtttccagctacccaaagatgttacgaattgttatctgaaaggctttcattctttcccctcatggctcgttgtgtgtttgtggcattacaaatgtaacccacatatttattctaatttattacattctttcctgaggctcctcttgttcttttaaagggtcagcagataacttattttaagaatcaacctggacacagtattctaacaaaggtccaatacagagctaaataaataataggagtcatagccagacacagtgactcacgcctgtaatcccaacattttgggaggccaaggcgggtggattacctggtggtgcatgcctgtagtctcagctactcaggaggctgaggcaggagaatcacttgaacccgggacgcagaggttacagtgaaccgagattgcgccactgcactccagcctgggcaacagagcgagacctctatctcaaaaataaataaataaatacatttaaaatatatatatatatatatatatatatatatatatatatatatatatatatatatatatttatatatatttcgtgacttatatcttgcacataccagcatacctcattaattttaatgtaaccatccattggcttctcttctctccttagaaattcgagctcaactggtagaacaacaaaaatgcctggagcagcaaacggagatgcgagttcagcttctccaggatctgcaagatttcttccgaaaaaaagctgaaattgagacggaatattcccggaatctagagaagttagcagaaaggttcatggcaaaaacaagaagcactaaggatcatcaacaatacaagaaagaccagaacctgttgtctccagtgaactgctggtatttgctcctgaaccaagtaaggagagaaagcaaagaccatgcaaccttgagtgacatctatctgaacaatgtgattatgcggttcatgcagataagtgaggattctaccaggatgtttaaaaagagcaaagagattgcattccaacttcatgaggatttaatgaaggttcttaatgagctttatacggtgatgaaaacataccatatgtatcatgcagagagcatcagtgcagagagcaagctgaaagaggccgaaaaacaagaggaaaagcaaattgggagatctggtgatccagtcttccatattcgactagaggagagacatcaacggcgaagctctgtaaagaaaattgaaaaaatgaaagaaaaaagacaagcaaaatattcagaaaataagctaaaatcaattaaggcacggaacgaatatctcctaacacttgaagccaccaatgcctcagttttcaagtactatattcatgatctttctgatttaattgattgctgtgatcttggctaccatgcaagtctgaacagagccctaagaacatatctgtctgcggagtacaaccttgaaacctccagacatgagggcttagacattattgagaatgcagttgataatttagagcccaggagcgataagcagagattcatggagatgtaccctgctgcgttctgtccaccaatgaagtttgagtttcagtctcacatgggtgatgaggtgtgccaggtcagtgcccagcagccagtccaggcagagctcatgctcaggtaccaacagttgcagtcccgccttgccacgctcaaaatcgagaatgaagaggttaagaaaacgactgaagccaccttgcagacgatacaagatatggtcaccatcgaggactatgatgtttctgaatgcttccagcacagtcgttccacagaatcagtgaagtccactgtctctgaaacctacctgagtaaacccagcatcgccaagagaagagccaaccagcaggaaactgaacagttctacttcatgaaactcagagaatatttggaaggcagtaatctcatcacaaaacttcaagccaaacatgacttgctgcagaggaccctgggagaaggtcatagagctgaatatatgactacaagccgaggacgaagaaactcgcacacaagacatcaggactcaggacaggttattcccctcattgtggaaagctgtattcggttcatcaatctctatggtcttcagcatcaggggattttcagagtgtctggttcccaggtggaagtcaatgatattaaaaattcatttgagagaggtgaaaatcctttggctgatgaccagagtaaccatgatattaactcagttgctggcgttctgaagctctatttccgtgggctggaaaaccccctctttcctaaggaaagatttaacgatctgatttcttgtatcagaatagataatctctatgagagggcgcttcacatccgcaaactcctcctgactttgcccaggtcggtccttatagtgatgaggtacctctttgccttcctcaatcatctatcacagtacagcgatgagaatatgatggacccttataacctggccatttgctttggcccaacattgatgcctgtcccagaaatacaggatcaagtgtcttgccaggcacatgtgaatgaaattatcaaaaccatcatcatccaccatgagactattttcccagatgctaaagagctggatggccctgtttatgagaaatgtatggctggagatgactattgcgacagcccatacagtgagcacggtacattggaggaagtggaccaagatgctggtacagagccccacacaagtgaagatgaatgtgagccaatagaagcaatagccaagtttgactatgttgggcggtctgccagagaactatccttcaagaagggtgcctccctgctgctgtatcaccgtgcatctgaggactggtgggaaggcaggcacaacgggattgacgggctggtgcctcaccagtatatagtggtgcaggatatggatgatacgttttcagacactctgagccaaaaagccgacagtgaggccagcagtgggccagtcacggaagacaagtcctcatccaaggacatgaactccccgacagaccgtcatcctgacggctatttagccaggcaacgaaaaagaggagagccaccccctccagtaaggcgtcctggcaggaccagtgatggccattgcccgctccaccctccacatgccctttctaactcctcagttgacctagggtccccaagccttgccagtcacccccggggcctgctgcagaaccgtggcctcaacaatgacagtcctgagcggaggcgcaggcctggccatggcagcctgaccaacatcagccggcacgactccctcaagaagatcgacagccctcccattagaaggtccacgtcatcagggcaatacacgggcttcaatgaccacaagccactggacccagagacaattgctcaggatattgaagaaacgatgaacacagctttgaatgaactccgagaactggagagacagagcacagcaaagcatgcccctgatgtggtgctggataccctggagcaagtgaaaaactctcccacccctgccacttccacggaatctctcagccctttgcacaacgttgccctcaggagctccgagcctcagattcgacgtagcacgagctcctccagtgacacaatgagtactttcaagcctatggtggcacccagaatgggcgtgcagctgaagcctccagcccttaggccaaaacctgctgttcttccaaaaacaaatcctaccataggacctgccccacctccccagggtccaacagacaagtcatgcacaatgtaaaaaccagccaagcaaggccataaagggaggtgacttaaaaaagaaaatggattagtgacaaaagtcactgatccataactttccttagttttgtgcttataactggagatcttttggcttttctatgttgtcgaatgtaatgtctgagactagctaaattaacacgggcatttgtattttgtaatttttttaaataactggacatatgtcattttaaggacaatagaaacacttagacttacttgaaaatccaatgctgcaccacttgtaatgaaggcaacaccgctctccacattgtacagagcttcaggtttaatgtagcccagctgagtcagaaaggttgtgacctgaaggcagaagaacccgaatgccacacctcattggagtatagccagtgttggtctgtggcacttgggctgaaaggtgataatggcattgcgtggtagctgacaatgagcaccttcggttccatgtggagcggggtttagctcatgcaaaagacttgcaattgtctccatgggacgatcccagtgggactgtcagcccacagctcgagtgggttggatgcttgcctctttcctaacagttatttccccgggtccagcttaaagactcgatggaaggaggtagaacctctgctgttactgcttgaacttaacctgggaaaggagaggaagacaccatctccaaagctattaatgtcactccttttgcgagcatgattaggccccggagatttccaagtccccccatctacacttacaaacgattagaagggtttaattttaaagactttctggttacactactccacgaactcctccaaagatccgttattcaataactgcctagaaaatgtttccatctcctctaaatccctgtgttctcctctgtggaaatgaaggcagcaagaagcacctgaggccttggttcatgcagtgttctcttttgactaaatcacctaggttcctttaaacatgctacaaagcccaggcatggtggtgcacacctgtactcccagctactcgggtggtttacacaggaggatggctttgggcctagtagttcgagtccagcctgggcagcatagtgtgagaccctgtctctt

SEQ ID NO: 182057 - DNA, 8406 bp, Homo sapiens
  Payload ID: 15852
  Gene Symbol: SRGAP1
  Gene Name: SLIT-ROBO Rho GTPase activating protein 1
  ENST ID: ENST00000631006
  CDS Start-End: 177-3245
gttgtgaccactgaacaaaacttgcccattgaaagcaaacccggaacagctggataatgtccaccccgagccgattcaagaaggacaaagagatcatagccgagtatgaaagtcaagtcaaagaaattcgagctcaactggtagaacaacaaaaatgcctggagcagcaaacggagatgcgagttcagcttctccaggatctgcaagatttcttccgaaaaaaagctgaaattgagacggaatattcccggaatctagagaagttagcagaaaggttcatggcaaaaacaagaagcactaaggatcatcaacaatacaagaaagaccagaacctgttgtctccagtgaactgctggtatttgctcctgaaccaagtaaggagagaaagcaaagaccatgcaaccttgagtgacatctatctgaacaatgtgattatgcggttcatgcagataagtgaggattctaccaggatgtttaaaaagagcaaagagattgcattccaacttcatgaggatttaatgaaggttcttaatgagctttatacggtgatgaaaacataccatatgtatcatgcagagagcatcagtgcagagagcaagctgaaagaggccgaaaaacaagaggaaaagcaaattgggagatctggtgatccagtcttccatattcgactagaggagagacatcaacggcgaagctctgtaaagaaaattgaaaaaatgaaagaaaaaagacaagcaaaatattcagaaaataagctaaaatcaattaaggcacggaacgaatatctcctaacacttgaagccaccaatgcctcagttttcaagtactatattcatgatctttctgatttaattgattgctgtgatcttggctaccatgcaagtctgaacagagccctaagaacatatctgtctgcggagtacaaccttgaaacctccagacatgagggcttagacattattgagaatgcagttgataatttagagcccaggagcgataagcagagattcatggagatgtaccctgctgcgttctgtccaccaatgaagtttgagtttcagtctcacatgggtgatgaggtgtgccaggtcagtgcccagcagccagtccaggcagagctcatgctcaggtaccaacagttgcagtcccgccttgccacgctcaaaatcgagaatgaagaggttaagaaaacgactgaagccaccttgcagacgatacaagatatggtcaccatcgaggactatgatgtttctgaatgcttccagcacagtcgttccacagaatcagtgaagtccactgtctctgaaacctacctgagtaaacccagcatcgccaagagaagagccaaccagcaggaaactgaacagttctacttcatgaaactcagagaatatttggaaggcagtaatctcatcacaaaacttcaagccaaacatgacttgctgcagaggaccctgggagaaggtcatagagctgaatatatgactacaagccgaggacgaagaaactcgcacacaagacatcaggactcaggacaggttattcccctcattgtggaaagctgtattcggttcatcaatctctatggtcttcagcatcaggggattttcagagtgtctggttcccaggtggaagtcaatgatattaaaaattcatttgagagaggtgaaaatcctttggctgatgaccagagtaaccatgatattaactcagttgctggcgttctgaagctctatttccgtgggctggaaaaccccctctttcctaaggaaagatttaacgatctgatttcttgtatcagaatagataatctctatgagagggcgcttcacatccgcaaactcctcctgactttgcccaggtcggtccttatagtgatgaggtacctctttgccttcctcaatcatctatcacagtacagcgatgagaatatgatggacccttataacctggccatttgctttggcccaacattgatgcctgtcccagaaatacaggatcaagtgtcttgccaggcacatgtgaatgaaattatcaaaaccatcatcatccaccatgagactattttcccagatgctaaagagctggatggccctgtttatgagaaatgtatggctggagatgactattgcgacagcccatacagtgagcacggtacattggaggaagtggaccaagatgctggtacagagccccacacaagtgaagatgaatgtgagccaatagaagcaatagccaagtttgactatgttgggcggtctgccagagaactatccttcaagaagggtgcctccctgctgctgtatcaccgtgcatctgaggactggtgggaaggcaggcacaacgggattgacgggctggtgcctcaccagtatatagtggtgcaggatatggatgatacgttttcagacactctgagccaaaaagccgacagtgaggccagcagtgggccagtcacggaagacaagtcctcatccaaggacatgaactccccgacagaccgtcatcctgacggctatttagccaggcaacgaaaaagaggagagccaccccctccagtaaggcgtcctggcaggaccagtgatggccattgcccgctccaccctccacatgccctttctaactcctcagttgacctagggtccccaagccttgccagtcacccccggggcctgctgcagaaccgtggcctcaacaatgacagtcctgagcggaggcgcaggcctggccatggcagcctgaccaacatcagccggcacgactccctcaagaagatcgacagccctcccattagaaggtccacgtcatcagggcaatacacgggcttcaatgaccacaagccactggacccagagacaattgctcaggatattgaagaaacgatgaacacagctttgaatgaactccgagaactggagagacagagcacagcaaagcatgcccctgatgtggtgctggataccctggagcaagtgaaaaactctcccacccctgccacttccacggaatctctcagccctttgcacaacgttgccctcaggagctccgagcctcagattcgacgtagcacgagctcctccagtgacacaatgagtactttcaagcctatggtggcacccagaatgggcgtgcagctgaagcctccagcccttaggccaaaacctgctgttcttccaaaaacaaatcctaccataggacctgccccacctccccagggtccaacagacaagtcatgcacaatgtaaaaaccagccaagcaaggccataaagggaggtgacttaaaaaagaaaatggattagtgacaaaagtcactgatccataactttccttagttttgtgcttataactggagatcttttggcttttctatgttgtcgaatgtaatgtctgagactagctaaattaacacgggcatttgtattttgtaatttttttaaataactggacatatgtcattttaaggacaatagaaacacttagacttacttgaaaatccaatgctgcaccacttgtaatgaaggcaacaccgctctccacattgtacagagcttcaggtttaatgtagcccagctgagtcagaaaggttgtgacctgaaggcagaagaacccgaatgccacacctcattggagtatagccagtgttggtctgtggcacttgggctgaaaggtgataatggcattgcgtggtagctgacaatgagcaccttcggttccatgtggagcggggtttagctcatgcaaaagacttgcaattgtctccatgggacgatcccagtgggactgtcagcccacagctcgagtgggttggatgcttgcctctttcctaacagttatttccccgggtccagcttaaagactcgatggaaggaggtagaacctctgctgttactgcttgaacttaacctgggaaaggagaggaagacaccatctccaaagctattaatgtcactccttttgcgagcatgattaggccccggagatttccaagtccccccatctacacttacaaacgattagaagggtttaattttaaagactttctggttacactactccacgaactcctccaaagatccgttattcaataactgcctagaaaatgtttccatctcctctaaatccctgtgttctcctctgtggaaatgaaggcagcaagaagcacctgaggccttggttcatgcagtgttctcttttgactaaatcacctaggttcctttaaacatgctacaaagcccaggcatggtggtgcacacctgtactcccagctactcgggtggtttacacaggaggatggctttgggcctagtagttcgagtccagcctgggcagcatagtgtgagaccctgtctcttaaaaaaaaaaaaaatgctacaaagtcctgatgatcctaaatttgaaatcccaactgtcctctccatttgtctttgagccaaccctgaactggccctggtacctgagtaagagccatgcagggccatcagcagaacatggccttgtggttctcacccagttgtgtacctcacaaccacaacttctttttctttgtcccttttcccctttttggttttggttttgtatgtgggctctatgtaactcccatagtcagctgaactctcaattggagaccctctttctctggcatcctagcacacaggcaattttttaagcctatatttatgctacattttcccccatcttaagaaaatttgctttgatttccattctcctactagcagcagctgatatcacctgtagacctatgagcattttatctattctatcattgaagttactgataaagatttttgttgttgttgttgttgttgggagaaatggatttcccacaactaatccctctggcccaccattaatttccttcttggtttcatttcaaactggcagccaattgcacgcccatctaagagctacacagtgtagattttacttcatcagcccattggtgaatgcatcgtgcagaaaagaactgggatctgtactaaaatcaagatcattactttgatctctacctcagtttgccagtgtagtcattctattgcaggaagagattaaattgatgagatattgttactttcagagtcacactgctgattgcttgcctggggcctaatttcacaaatgaatagtgacttttttcccatgtatttctaggtatggtaaacttttaaacctccaaattttcagagccatactttttgcccattttgaaaaagaagcccaggacagcaccttgtctagcccctccccatttctcctgagcttttggggtccttcagcacccttggacaccgtggagatccagccaagactgagctttgaatagcactagcccttttaaacaatcctcacaaattccttaggaatttaaactttccaaaataatcccccacttttttttttttttttttttttttttgagttggagtcttgctctgtcgcccaggccagagtacagtggtgcaatctcggctccctgcaacctccatctcccgggttcaagcaattctcctgagtagctgggattacaggcgccaccaccacgcccagctaatttttgtatttttagtagagatggggtgtcaccatgttggccaggctggtctcaaactcctgacctcaggtgacccaccagcctcagcctcccaaagtgctgggattacagatgtgagccaccatgcccggccattccaccacttctttaaaatagtaagaattcttaaaaaccatattccttgtttgatggaagagtaagatgttaacagagggcatcaaagggccagaggtgtctttgaatttattttttttcaatgtcttttctgagcttcagccttagcttttcagatcttcctcctacctgttcatttattcagccttctatctggtcatcctccccagcggctcctctctctgatgtgtccacctacggtggaacgaggattgcctttctgtgctccccatcaggactttgctgtcttggccggcaggagtcgtgctgctgcagagcctcacaggctgtgccttgtttcaggaaacagctcctaatactctcccatcactcactttacctgtctccatcttatttccctatactcctattgtcagcttgagactttttttttttttcaattccaaatgaagggtatgacctcagagtgagtgaggactcagtaaagactcacctctccttacttggtttattaaatgtcttcagattccagagataagacaaggtggccacttcacaaagaatccagaatcatgctcagtaaagctcattaaaagccactgcagctgagaaggttcacagcccttctttatagccacagaggcagcacacaggggaggtgggaagacacagggaaacgagagaagaaggataatgaggccttgaggtgttctgcccccaatttcaaggagcttatcaggcttcatgtgcaatttggggaggggagctttttgatggtgggtaaataatggctctacaaagattacctgactccactgacacaagaatatgtattctcagctgatataactgtgtgttcacatcccatccatagaactcactgaaggagattcatcaagtcagccttttggactgggttggggtttggggagtggatttggggatagagagaaaggtgtacttagtacacattttctaatgggcgttacgtgaactgtttgaacctgctgagtggcgctttgtagagctccatgttcacgttcagtgtcaacaccattcaacagctttgcacatcttcgtacaacataatctggctttggtgccccttgagccacctgtagaataatttatagcagggtcccacaatctactgcaatgatcgtgaacagttatcagtggatatagtgctccaagagtcaaattgtatccgttaagggttttctaacttttgctatcccccccgcgaccaaaaaaagggggggtttataatttaaagaaaaggaaaagaggcgtgggttggtagttgtgtccttaacatttaggaatgacatagcctctggagtctacaaactgaagaaactttcatctgatcagccttggaaatccaaagttaaagagcctatgtgtctcttgaggcgggggttagaggattcaaatttgggatgatgctcattgattcctgaccatagcagtgagaggccattttttgtgcaggaaatgtgcttaggactcagtcttgttttcgattatccaccacagaaaccctgagacacagagcagcttagaagtctctacccaggcgtaaatagagctccctactccagaccacctgccacccacctcccaagttgagaacacaagctccagctgggctggagagtcaggcttggtgcagggtgactttggcgaagttttgtcagatccataaagcaaactggaatttgagctttcacttaccctagtatacgttcttaaaaaaaaaaaaaagtctatgtggtataatcgagatggatacctgtgtctttaaattacgtagggaattttgtatgtttaaataattgtactgggttccataatgcttatcttagaaactttagtaaaagaaaatatatgaaccgtgcatttgtgaatgccccccttagagcattcatccaagttcagtgtgtagtgtgatggttattatagatatttaaagtatagtaagtggctgtgtaacaggagagactgctgtttacctacgtactgaagggtaactgctgcccgcgtaattaaatcagtattgtcctttcctgtcggtttgatcaattgcggtaccggtagcttcctgcttgtgactgttacctaattgtgtcaatgtacatctgtagtatgtacatgtgaaagtgcctttctattttagaggagttttagccttgctcttgtaccgttgccccgctctgtgccccacccccacctcctcctcccaattcctgctgcccactcgagtgtttcgaagcttcctccctgtcccccaccttccccatccccgccttcctgtgcctcggtgctcagtaatgtcccatctcacctccctgtcggtcctcagactgtctcgttttccttgtagacgtgattgtgcctttctcacccctgtgtcctcccatcccaccgcatcagtcccccgctcatgtgctgctgacagcatcgcattcgcccgtgctctgtactgcctctcaccatttcattccctcctctctgaggtgaaaataaagggggatgcttttacagtctggaaagaaaaaaaatgttttgttaatctgttgtgacaatgcacttttatgtatagtactgtacatttttggcatgtaccattacaggcttcagtatacagtcaggtttgttcttcacggtgtatctttataataaataagatagttctggc

SEQ ID NO: 182058 - DNA, 1477 bp, Homo sapiens
  Payload ID: 15853
  Gene Symbol: SRGAP2
  Gene Name: SLIT-ROBO Rho GTPase activating protein 2
  ENST ID: ENST00000419187
  CDS Start-End: 449-1366
catgttgtgcggaaggacttccactccccgcctgtgtcgttgatgtcagaccccaggccagcctccgggcgctgcagttctcccggctaatgctgaggctgcggctccggctctagcacaggcaccagccgccgccgcacccggccccagcgcccaccgtctgcatgtgcccgccgtagccgtctgcccagcccgcagcccgcgctccacggagcgctggagaccaccgtggggggccccttctgccctcgagagaagcggtcttggaggtattgatttaggtggttggattttttccgtggatctatcaattcacaattcgaatttggaagaaagaaggaaaacatgacgtctccagccaaattcaaaaaggataaggagatcatagcagagtacgatactcaggtcaaagagtaaagaagtcggccagcagctccaagatgatttgatgaaggtcctgaacgagctctactcggtgatgaagacatatcacatgtacaatgccgacagcatcagtgctcagagcaaactaaaggaggcggagaagcaggaggagaagcaaattggtaaatcggtaaagcaggaggaccggcagaccccacgctcccctgactccacggccaacgttcgcattgaggagaaacatgtccggaggagctcagtgaagaagattgagaagatgaaggagaagcgtcaagccaagtacacggagaataagctgaaggccatcaaagcccggaatgagtacttgctggctttggaggcaaccaatgcatctgtcttcaagtactacatccatgacctatctgaccttattgattgttgtgacttaggctaccatgcaagtctgaaccgggctctacgcaccttcctctctgctgagttaaacctggaacagtcgaagcatgagggtctggatgccatcgagaatgcagtagaaaacctggatgccaccagtgacaagcagcgcctcatggagatgtacaacaacgtcttctgcccccctatgaagtttgagtttcagccccacatgggggatatggcttcccagctctgtgcccagcagcctgtccagagtgagctggtacagagatgccaacaactgcagtctcgcttatccactctaaagattgaaaacgaagaggtaaagaagacaatggaggccaccctgcaaaccatccaggacattgtgactgtcgaggactttgatgtgtctgactgcttccagtacagcaactccatggagtccgtcaagtccacggtctctgaaaccttcatgagcaagcccagcattgctaagaggagagccaaccagcaagagacagagcagttttatttcacagtaagggagtgctatggcttttaaagagcgtcagcatgcactgcagcactcaagggagatttggaactcagagtccttgttaagtgtctgaaggacaggcgttgaatatcttagatacgaatgtgggcatactca

SEQ ID NO: 182059 - DNA, 498 bp, Homo sapiens
  Payload ID: 15853
  Gene Symbol: SRGAP2
  Gene Name: SLIT-ROBO Rho GTPase activating protein 2
  ENST ID: ENST00000572793
  CDS Start-End: 145-498
tggaggttgctgtgagccgagatcgtgcccttgcactccagcctgggcaacaagagtgaaactccatctcaaaaaaaaaaaaaaaaaagaaaagaaagaaagaaatctcacctttctgagatccgtgctcagctcacagagcagatgaaatgcctggaccagcagtgtgagcttcgggtgcaactgttgcaggacctccaggacttcttccgaaagaaggcagagattgagatggactactcccgcaacctggagaagctggcagaacgcttcctggccaagacacgcagcaccaaggaccagcaattcaagaaggatcagaatgttctctctccagtcaactgctggaatctcctcttaaaccagagtaaagaagtcggccagcagctccaagatgatttgatgaaggtcctgaacgagctctactcggtgatgaagacatatcacatgtacaatgccgacagcatcagtgctcagagcaaactaaaggaggcggag

SEQ ID NO: 182060 - DNA, 6301 bp, Homo sapiens
  Payload ID: 15853
  Gene Symbol: SRGAP2
  Gene Name: SLIT-ROBO Rho GTPase activating protein 2
  ENST ID: ENST00000573034
  CDS Start-End: 63-3278
ggttggattttttccgtggatctatcaattcacaattcgaatttggaagaaagaaggaaaacatgacgtctccagccaaattcaaaaaggataaggagatcatagcagagtacgatactcaggtcaaagagatccgtgctcagctcacagagcagatgaaatgcctggaccagcagtgtgagcttcgggtgcaactgttgcaggacctccaggacttcttccgaaagaaggcagagattgagatggactactcccgcaacctggagaagctggcagaacgcttcctggccaagacacgcagcaccaaggaccagcaattcaagaaggatcagaatgttctctctccagtcaactgctggaatctcctcttaaaccaggtgaagcgggaaagcagggaccataccaccctgagtgacatctacctgaataatatcattcctcgatttgtacaagtcagcgaggactcaggaagactctttaaaaagagtaaagaagtcggccagcagctccaagatgatttgatgaaggtcctgaacgagctctactcggtgatgaagacatatcacatgtacaatgccgacagcatcagtgctcagagcaaactaaaggaggcggagaagcaggaggagaagcaaattggtaaatcggtaaagcaggaggaccggcagaccccacgctcccctgactccacggccaacgttcgcattgaggagaaacatgtccggaggagctcagtgaagaagattgagaagatgaaggagaagcgtcaagccaagtacacggagaataagctgaaggccatcaaagcccggaatgagtacttgctggctttggaggcaaccaatgcatctgtcttcaagtactacatccatgacctatctgaccttattgatcagtgttgtgacttaggctaccatgcaagtctgaaccgggctctacgcaccttcctctctgctgagttaaacctggaacagtcgaagcatgagggtctggatgccatcgagaatgcagtagaaaacctggatgccaccagtgacaagcagcgcctcatggagatgtacaacaacgtcttctgcccccctatgaagtttgagtttcagccccacatgggggatatggcttcccagctctgtgcccagcagcctgtccagagtgagctggtacagagatgccaacaactgcagtctcgcttatccactctaaagattgaaaacgaagaggtaaagaagacaatggaggccaccctgcaaaccatccaggacattgtgactgtcgaggactttgatgtgtctgactgcttccagtacagcaactccatggagtccgtcaagtccacggtctctgaaaccttcatgagcaagcccagcattgctaagaggagagccaaccagcaagagacagagcagttttatttcacaaaaatgaaagagtacctggagggcaggaacctcatcaccaagttacaagccaagcatgaccttctgcagaaaaccctgggagaaagtcagcggacagattgcagtctagccaggcgcagctcaactgtgaggaaacaggactccagccaggcaattcctctggtggtggaaagctgtatccggtttatcagcagacacggactacagcatgaaggaattttccgggtgtcaggatcccaggtggaagtgaatgacatcaaaaatgcctttgagagaggagaggaccccctggctggggaccagaacgaccatgacatggattccatagctggtgtcctgaagctttacttccgggggctggaacaccctctcttccccaaggacatctttcatgacctgatggcctgcgtcacaatggacaacctgcaggagagagctctgcacatccggaaagtcctcctagtcctgcccaaaaccactctgattatcatgagatacctctttgccttcctcaatcatttatcacagttcagtgaagagaacatgatggacccctacaacctcgccatctgcttcgggccctcgctaatgtcagtgccagagggccacgaccaggtgtcctgccaagcccacgtgaatgagctgatcaaaaccatcatcatccagcatgagaacatcttcccaagccccagggagctggagggccctgtctacagcagaggaggaagcatggaggattactgtgatagccctcatggagagactacctcggttgaagactcaacccaggatgtgaccgcagagcaccacacgagcgatgacgaatgtgagcccatcgaggccattgccaagtttgactacgtgggccggacagcccgagagctatcctttaagaagggagcatccctgctgctttaccagcgggcttccgacgactggtgggaaggccggcacaatggcatcgacggactcatcccccatcagtacatcgtggtccaagacaccgaggacggtgtcgtggagaggtccagccccaagtctgagattgaggtcatttctgagccacctgaagaaaaggtgacagccagagcgggggccagctgtcccagtgggggtcatgtagccgatatttatcttgcaaacatcaacaagcaaaggaagcgtccagaatctgggagcatccggaaaacttttcggagtgacagccatgggctgagcagttccctgactgactcctcctccccaggggtgggggctagctgccgcccatcctcccagcccatcatgagccagagcctccccaaagaagggccagataagtgttccatcagtgggcacgggagcctcaactccatcagccgccactcatccctgaagaatcggctggatagtccacagatccggaagactgccacagcgggaaggtcaaaaagcttcaataaccatcggcccatggaccctgaggtcattgctcaggatattgaggcaacaatgaactcggccctgaatgagctacgggaactagaacggcagagcagtgtcaaacacacccctgacgtggttctggacaccttggagcccctcaaaacctccccagtggtggcccccacgtcagagccctccagccctctgcacacccagctcctcaaggaccccgagcccgccttccagcgcagcgccagtactgctggggacatcgcctgcgccttccggcctgtcaagtctgtcaagatggctgccccggtcaaaccaccagccacacggcccaagcccactgtcttccccaaaacaaatgccactagccctggtgtcaactcatcaacttccccacagtctactgacaagtcttgtactgtctgagggataataatttaattgttctagacaaggggactatagggactgactgttattaaaatcttcctatttaactagcttggggacttcagttgaaaattaggttctaagttgttcttgcaggaattagcctccccgtctcccaaaaccttgagaatgaagcccttggtatcgcctctcccttcccactgccctctgcttcccccagtcgtcgtaattcagccagctgcagtccgtaccgttcttaggttagccagagacaggttttcattatcaggtcactgtgaaatctggtaaggcagtcctgaggacatgggctcaagtctcagtcccctcagaccacggtgatgccttgaccagatggttggctactgccatccagctttcagtggcatcttgttttgggaactgattatagagaatcatatatagtccagtcttcattttacatacacacacatattttacacacacacacattttacacacacacacacacacacacacacacatatgtttttctagtctctggcatgtgtagcctctcctggtcatagaccagtctctttgtaagttattgtggcagttcacacagtagccaccaggggtctctgtttccatcacaaactttgttctgtctgggccagagaacctagcctttgaaatctctccatcatatgaaacataacgggatgggacaatcccgtaacctgtttggggttgggggctttctctctgtgttctttccattgatgtgaattggtcattggtgtttgctcttgcctctcctccatcccctagaagtacacccccgtcttattaaggagcttttaaagtttttctgaatgtatagacatttctcgggttcctacctttgtctctgatggaccattttccatttaagacattttcctgtataagacagttttatagctggttccttttagggtaaagagtcttaagagagttttattgtgtctatggcaggtttgggaaaggtaagaaatgggtcctttttcctcctaatgtttttggcacttaaaacataaaattcattatcctattaaaaaattaaattcagctttgctaatccagaaattgttcccaaatgaaaacttgttttaagtccaccccttagtttccttattttacaaggtctctcttcagggaccaacaggggcttagagagccttagttagattaaagggagaccctacctcttaaaaccagttttcatttatgcaaacaaggacaattaagggaaccctgaccccacaggctctcaagtcttcccaaggccagaatcgaaagaaaattaaaatttgaatgctgaatattctggctctactctggccttttttctggttcccttccaaaatgcacaaatcatacccttgtctgctccaattcagtctccaaacctggtgcctgtgctcctggcccccctagcatcatgctatcccaggagtatcaggaccagacacatccacagccaggctcatgggtctcagacagcaacttgagttaaagctgaaactcatccttcttctctgtgttttctggtttaaaagctgcacttatattttagccttattattttctgtagttccggagagatggtgggttgccattctggtaggaaaatctgagttttcttatctttgacctagaagagattctttttggaccaacctgcgaaattggtagttaggtctatggaaagtggtaggatttttttttttttaatcctgtgcaaaggaaaagaggtgctttgtgggaaatcactaatgagaaggctaacctgcagcaccagagaaacctttccaagtgctaggcaggagaactgaagaactctttcagtgaagtgagtcagcctagaagaggcaacccacagtcttgatttttgttgctgtttcctgacctgttcttgcctgtcacctgggcctacacaggtcccaagccaacggggctttcatacccaaggatctgtttccttgctgaaaatgaaaccctatctttcactttacattcctttcaatccaactgatcaaaactggtacccacacttgccctttctccctctctccagcacactcccctctaagaaagtaaaagcaaagctttcttaatggcaacactttgggcctgttctgttgctcctgccttatttctctttcaaccctgtacatgactcgtgttcaccatccccttgatcagtgtccatccgcgctaatttgcatcatgaactgaacagtgtgtgagtggtcacctactaaacccagctctgggggcagagctgtcttccccatctctggtgctcctaacacctgtgagatggtcctgtcgagaggactaggaaccgataggaggagagtccttctcggcagagctcactgcaaacaactggaattgaggttgcacactgtgatttttacaccgaaaagccaaaaggagctggccatccagggcctagggagaccagccttcctcagctatgcttgccgaaaccagcatgatgcttcaaagagccctgctccacccctcatggcatggatccttttcctggtgtggactctgaagggtcagtcttcggggaagagaggtggggtggggctactagcatcccaatttagaaaatagaggagtttgtagccagcagcctgtaaactggaaacactggtctcagccaacctcctcagggcgccctggcttctccccaaggagatgaggagcggtgatgccagcaccgggatgcgcagagcactggaagggctggtgcagatctacttcccatgcagaagagaagtcacatcttccagggaatcgcaatgttgtggcgtctgacttgtatgtcacatttgtgtaaaatggtatattctttaaaatagtgttgataactggaatattgtatgtatgcttggagatgctttgtgtgaacctaagactgtcactcaacagatgttggattggggaaaatccaaagcacaacttcaaaataaaatacatttttaggtttcgatgctgca

SEQ ID NO: 182061 - DNA, 3212 bp, Homo sapiens
  Payload ID: 15853
  Gene Symbol: SRGAP2
  Gene Name: SLIT-ROBO Rho GTPase activating protein 2
  ENST ID: ENST00000605610
  CDS Start-End: 299-2668
agaccccaggccagcctccgggcgctgcagttctcccggctaatgctgaggctgcggctccggctctagcacaggcaccagccgccgccgcacccggccccagcgcccaccgtctgcatgtgcccgccgtagccgtctgcccagcccgcagcccgcgctccacggagcgctggagaccaccgtggggggccccttctgccctcgagagaagcggtcttggaggtattgatttaggtggttggattttttccgtggatctatcaattcacaattcgaatttggaagaaagaaggaaaacatgacgtctccagccaaattcaaaaaggataaggagatcatagcagagtacgatactcaggtcaaagagatccgtgctcagctcacagagcagatgaaatgcctggaccagcagtgtgagcttcgggtgcaactgttgcaggacctccaggacttcttccgaaagaaggcagagattgagatggactactcccgcaacctggagaagctggcagaacgcttcctggccaagacacgcagcaccaaggaccagcaattcaagaaggatcagaatgttctctctccagtcaactgctggaatctcctcttaaaccaggtgaagcgggaaagcagggaccataccaccctgagtgacatctacctgaataatatcattcctcgatttgtacaagtcagcgaggactcaggaagactctttaaaaagagtaaagaagtcggccagcagctccaagatgatttgatgaaggtcctgaacgagctctactcggtgatgaagacatatcacatgtacaatgccgacagcatcagtgctcagagcaaactaaaggaggcggagaagcaggaggagaagcaaattggtaaatcggtaaagcaggaggaccggcagaccccacgctcccctgactccacggccaacgttcgcattgaggagaaacatgtccggaggagctcagtgaagaagattgagaagatgaaggagaagcgtcaagccaagtacacggagaataagctgaaggccatcaaagcccggaatgagtacttgctggctttggaggcaaccaatgcatctgtcttcaagtactacatccatgacctatctgaccttattgattgttgtgacttaggctaccatgcaagtctgaaccgggctctacgcaccttcctctctgctgagttaaacctggaacagtcgaagcatgagggtctggatgccatcgagaatgcagtagaaaacctggatgccaccagtgacaagcagcgcctcatggagatgtacaacaacgtcttctgcccccctatgaagtttgagtttcagccccacatgggggatatggcttcccagctctgtgcccagcagcctgtccagagtgagctggtacagagatgccaacaactgcagtctcgcttatccactctaaagattgaaaacgaagaggtaaagaagacaatggaggccaccctgcaaaccatccaggacattgtgactgtcgaggactttgatgtgtctgactgcttccagtacagcaactccatggagtccgtcaagtccacggtctctgaaaccttcatgagcaagcccagcattgctaagaggagagccaaccagcaagagacagagcagttttatttcacaaaaatgaaagagtacctggagggcaggaacctcatcaccaagttacaagccaagcatgaccttctgcagaaaaccctgggagaaagtcagcggacagattgcagtctagccaggcgcagctcaactgtgaggaaacaggactccagccaggcaattcctctggtggtggaaagctgtatccggtttatcagcagacacggactacagcatgaaggaattttccgggtgtcaggatcccaggtggaagtgaatgacatcaaaaatgcctttgagagaggagaggaccccctggctggggaccagaacgaccatgacatggattccatagctggtgtcctgaagctttacttccgggggctggaacaccctctcttccccaaggacatctttcatgacctgatggcctgcgtcacaatggacaacctgcaggagagagctctgcacatccggaaagtcctcctagtcctgcccaaaaccactctgattatcatgagatacctctttgccttcctcaatcatttatcacagttcagtgaagagaacatgatggacccctacaacctcgccatctgcttcgggccctcgctaatgtcagtgccagagggccacgaccaggtgtcctgccaagcccacgtgaatgagctgatcaaaaccatcatcatccagcatgagaacatcttcccaagccccagggagctggagggccctgtctacagcagaggaggaagcatggaggattactgtgatagccctcatggagagactacctcggttgaagactcaacccaggatgtgaccgcagagcaccacacgagcgatgacgaatgtgagcccatcgaggccattgccaagtttgactacgtgggccggacagcccgagagctatcctttaagaagggagcatccctgctgctttaccagcgggcttccgacgactggtgggaaggccggcacaatggcatcgacggactcatcccccatcagtacatcgtggtccaagacacgttgatatcctgagtgagtctgcaccctcccagcctcttcccggctcgttctgcagggaaatcctccctctgttgatagcatcgcaaacctggtggcaatctgtgcgtggacaggaccctcccaaatttagcattatgacttcaccacaggatcaagagaagatgaattgtgggggagaaggggctttctttgtcatcagtagccagaggggccaggagagcagtggagagacctgggaccggcttggatgctctgagcggggctagaggcgctacgacagtgtgtggcggtgtcctgccacgacgccgccgtctccagagccaccacacagttgactgtccttacccggcagtgctcaggacctcagccgataaaccacaacctggacttgccgcctccttctccaggaggccgccccagcacggcctccccaggaagcagcatggggtagaaggcagatgcctcgaatccaggtgtcccctagccacgctttcctgaggagctgaggagcccgcagaactcagcggattatttatttttatttaaacgacccttc

SEQ ID NO: 182062 - DNA, 1108 bp, Homo sapiens
  Payload ID: 15853
  Gene Symbol: SRGAP2
  Gene Name: SLIT-ROBO Rho GTPase activating protein 2
  ENST ID: ENST00000579225
  CDS Start-End: 849-1108
aatctgtgaccacgcctcggcagtgctagtcacacctccaagttttgccagctcctccccctcattccgggcctctcgggatcagctcttcctattggctatgggccccatcggtcgatagaaaacgggcggtgattggtaaaggggtgggctctacttcccggcggggtcctgcggagttggcggaggctcctccagggactggggcaccgatctgcgtagaaacgggtggcggggaagagaggggaggagagctctgagtgggaagcggagccgggggcctgggacccgtcgcgtcagagccaggcaagtgaaccggagcaaacgacttccgatccagtctgcgctgttgcggctcccgtttgggatttgatttgcagcatctttgagcctctacgacaaaaaaccgcgaagcacgcccagccctcccccggcaccccgaaaagcacccactccctcccggggacacagctgggcgcgtccacacccccgcagccccacaccatgttgtgcggaaggacttccactccccgcctgtgtcgttgatgtcagaccccaggccagcctccgggcgctgcagttctcccggctaatgctgaggctgcggctccggctctagcacaggcaccagccgccgccgcacccggccccagcgcccaccgtctgcatgtgcccgccgtagccgtctgcccagcccgcagcccgcgctccacggagcgctggagaccaccgtggggggccccttctgccctcgagagaagcggtcttggaggtattgatttaggtggttggattttttccgtggatctatcaattcacaattcgaatttggaagaaagaaggaaaacatgacgtctccagccaaattcaaaaaggataaggagatcatagcagagtacgatactcaggtcaaagagatccgtgctcagctcacagagcagatgaaatgcctggaccagcagtgtgagcttcgggtgcaactgttgcaggacctccaggacttcttccgaaagaaggcagagattgagatggactactcccgcaacctggagaagctggcagaacgcttcctggccaagacacgcagcaccaaggaccagcaattcaa

SEQ ID NO: 182063 - DNA, 2484 bp, Homo sapiens
  Payload ID: 15853
  Gene Symbol: SRGAP2
  Gene Name: SLIT-ROBO Rho GTPase activating protein 2
  ENST ID: ENST00000605476
  CDS Start-End: 1-1353
gtaaagaagacaatggaggccaccctgcaaaccatccaggacattgtgactgtcgaggactttgatgtgtctgactgcttccagtacagcaactccatggagtccgtcaagtccacggtctctgaaaccttcatgagcaagcccagcattgctaagaggagagccaaccagcaagagacagagcagttttatttcacaaaaatgaaagagtacctggagggcaggaacctcatcaccaagttacaagccaagcatgaccttctgcagaaaaccctgggagaaagtcagcggacagattgcagtctagccaggcgcagctcaactgtgaggaaacaggactccagccaggcaattcctctggtggtggaaagctgtatccggtttatcagcagacacggactacagcatgaaggaattttccgggtgtcaggatcccaggtggaagtgaatgacatcaaaaatgcctttgagagaggagaggaccccctggctggggaccagaacgaccatgacatggattccatagctggtgtcctgaagctttacttccgggggctggaacaccctctcttccccaaggacatctttcatgacctgatggcctgcgtcacaatggacaacctgcaggagagagctctgcacatccggaaagtcctcctagtcctgcccaaaaccactctgattatcatgagatacctctttgccttcctcaatcatttatcacagttcagtgaagagaacatgatggacccctacaacctcgccatctgcttcgggccctcgctaatgtcagtgccagagggccacgaccaggtgtcctgccaagcccacgtgaatgagctgatcaaaaccatcatcatccagcatgagaacatcttcccaagccccagggagctggagggccctgtctacagcagaggaggaagcatggaggattactgtgatagccctcatggagagactacctcggttgaagactcaacccaggatgtgaccgcagagcaccacacgagcgatgacgaatgtgagcccatcgaggccattgccaagtttgactacgtgggccggacagcccgagagctatcctttaagaagggagcatccctgctgctttaccagcgggcttccgacgactggtgggaaggccggcacaatggcatcgacggactcatcccccatcagtacatcgtggtccaagacaccgaggacggtgtcgtggagaggtccagccccaagtctgagattgaggtcatttctgagccacctgaagaaaaggtgacagccagagcgggggccagctgtcccagtgggggtcatgtagccgatatttatcttgcaaacatcaacaagtaagctctgcttttcattttctgctcccctgaatgacttgcaacacccagcctcaccctctggcctaacccccatctccattcctgtgctgcacgtagggctcccagctcccccagcctaacagtttgcatgtggtcattgctgctgcaaggcggacagggctgaggatgctgctacaagcctcggggcaggtccaggtctccagctagctgccctcgtgctgtggaagggtgctttactgtgtgttcccgcagtgtctgtccacccagacctttgtggcagtcttacagctaaaactttgaccaaagctttggtcactttatgcaacctggttttgtactgtttctcagaggtgccttcttttttccaatccatactcaaataatagtctttgatgtctgtcttccttgacccgtgttcgtgcaaagattcagagtctgtgtgtggcttctactaggctgatgttacaccaggtgggtttattgagatatcatgtgtctgttcctccccctgtcctgcattcactcctgtggaggaaaggaggccacgatgtccctaaggaaagctttgtcctgagctcttcattcattggctaacccctagctcccttttcttctgccctttcacaccaggagaaataattttccattttgttcctattgctttggccttttgtattattctacccccttagtccctttgcagatccccactcctgctcagcaggctcttacctctgacccccagctttcattgtggctgttagcaacatcctggggtttaaactccacccacgcccgatctggctgtctagagggattctacgcctgcgtgctgccgcctccccaagaggcattcaggttattggagaactaatctcatctcaaggggccagacaccaagtcccaaagcctacagacctctttccgccaggccctgaaacctggccccgtgccagcaggatgacaagccccagggcgctcctgatgaatatggattggagatgatgtacagtttttattcccctctggcttttgaggaatgaaatgatttgcactttgaaaacctgttaaccgtagcctctggacactgagactggaaggagaataaaggatgcttgttgtttttaaacta

SEQ ID NO: 182064 - DNA, 1013 bp, Homo sapiens
  Payload ID: 15853
  Gene Symbol: SRGAP2
  Gene Name: SLIT-ROBO Rho GTPase activating protein 2
  ENST ID: ENST00000604925
  CDS Start-End: 1-673
cctctttgccttcctcaatcatttatcacagttcagtgaagagaacatgatggacccctacaacctcgccatctgcttcgggccctcgctaatgtcagtgccagagggccacgaccaggtgtcctgccaagcccacgtgaatgagctgatcaaaaccatcatcatccagcatgagaacatcttcccaagccccagggagctggagggccctgtctacagcagaggaggaagcatggaggattactgtgatagccctcatggagagactacctcggttgaagactcaacccaggatgtgaccgcagagcaccacacgagcgatgacgaatgtgagcccatcgaggccattgccaagtttgactacgtgggccggacagcccgagagctatcctttaagaagggagcatccctgctgctttaccagcgggcttccgacgactggtgggaaggccggcacaatggcatcgacggactcatcccccatcagtacatcgtggtccaagacaccgaggacggtgtcgtggagaggtccagccccaagtctgagattgaggtcatttctgagccacctgaagaaaaggtgacagccagagcgggggccagctgtcccagtgggggtcatgtagccgatatttatcttgcaaacatcaacaactttcattgtggctgttagcaacatcctggggtttaaactccacccacgcccgatctggctgtctagagggattctacgcctgcgtgctgccgcctccccaagaggcattcaggttattggagaactaatctcatctcaaggggccagacaccaagtcccaaagcctacagacctctttccgccaggccctgaaacctggccccgtgccagcaggatgacaagccccagggcgctcctgatgaatatggattggagatgatgtacagtttttattcccctctggcttttgaggaatgaaatgatttgcactttgaaaacctgttaaccgtagcctctggacactgagactggaaggaga

SEQ ID NO: 182065 - DNA, 884 bp, Homo sapiens
  Payload ID: 15853
  Gene Symbol: SRGAP2
  Gene Name: SLIT-ROBO Rho GTPase activating protein 2
  ENST ID: ENST00000604010
  CDS Start-End: 1-884
gaatgtgagcccatcgaggccattgccaagtttgactacgtgggccggacagcccgagagctatcctttaagaagggagcatccctgctgctttaccagcgggcttccgacgactggtgggaaggccggcacaatggcatcgacggactcatcccccatcagtacatcgtggtccaagacaccgaggacggtgtcgtggagaggtccagccccaagtctgagattgaggtcatttctgagccacctgaagaaaaggtgacagccagagcgggggccagctgtcccagtgggggtcatgtagccgatatttatcttgcaaacatcaacaacaacttacatcttgacaacacaaagcccgtgaccaccaagcaaaggaagcgtccagaatctgggagcatccggaaaacttttcggagtgacagccatgggctgagcagttccctgactgactcctcctccccaggggtgggggctagctgccgcccatcctcccagcccatcatgagccagagcctccccaaagaagggccagataagtgttccatcagtgggcacgggagcctcaactccatcagccgccactcatccctgaagaatcggctggatagtccacagatccggaagactgccacagcgggaaggtcaaaaagcttcaataaccatcggcccatggaccctgaggtcattgctcaggatattgaggcaacaatgaactcggccctgaatgagctacgggaactagaacggcagagcagtgtcaaacacacccctgacgtggttctggacaccttggagcccctcaaaacctccccagtggtggcccccacgtcagagccctccagccctctgcacacccagctcctcaaggaccccgagcccgcctt

SEQ ID NO: 182066 - DNA, 4705 bp, Homo sapiens
  Payload ID: 15853
  Gene Symbol: SRGAP2
  Gene Name: SLIT-ROBO Rho GTPase activating protein 2
  ENST ID: ENST00000624873
  CDS Start-End: 63-3275
ggttggattttttccgtggatctatcaattcacaattcgaatttggaagaaagaaggaaaacatgacgtctccagccaaattcaaaaaggataaggagatcatagcagagtacgatactcaggtcaaagagatccgtgctcagctcacagagcagatgaaatgcctggaccagcagtgtgagcttcgggtgcaactgttgcaggacctccaggacttcttccgaaagaaggcagagattgagatggactactcccgcaacctggagaagctggcagaacgcttcctggccaagacacgcagcaccaaggaccagcaattcaagaaggatcagaatgttctctctccagtcaactgctggaatctcctcttaaaccaggtgaagcgggaaagcagggaccataccaccctgagtgacatctacctgaataatatcattcctcgatttgtacaagtcagcgaggactcaggaagactctttaaaaagagtaaagaagtcggccagcagctccaagatgatttgatgaaggtcctgaacgagctctactcggtgatgaagacatatcacatgtacaatgccgacagcatcagtgctcagagcaaactaaaggaggcggagaagcaggaggagaagcaaattggtaaatcggtaaagcaggaggaccggcagaccccacgctcccctgactccacggccaacgttcgcattgaggagaaacatgtccggaggagctcagtgaagaagattgagaagatgaaggagaagcgtcaagccaagtacacggagaataagctgaaggccatcaaagcccggaatgagtacttgctggctttggaggcaaccaatgcatctgtcttcaagtactacatccatgacctatctgaccttattgattgttgtgacttaggctaccatgcaagtctgaaccgggctctacgcaccttcctctctgctgagttaaacctggaacagtcgaagcatgagggtctggatgccatcgagaatgcagtagaaaacctggatgccaccagtgacaagcagcgcctcatggagatgtacaacaacgtcttctgcccccctatgaagtttgagtttcagccccacatgggggatatggcttcccagctctgtgcccagcagcctgtccagagtgagctggtacagagatgccaacaactgcagtctcgcttatccactctaaagattgaaaacgaagaggtaaagaagacaatggaggccaccctgcaaaccatccaggacattgtgactgtcgaggactttgatgtgtctgactgcttccagtacagcaactccatggagtccgtcaagtccacggtctctgaaaccttcatgagcaagcccagcattgctaagaggagagccaaccagcaagagacagagcagttttatttcacaaaaatgaaagagtacctggagggcaggaacctcatcaccaagttacaagccaagcatgaccttctgcagaaaaccctgggagaaagtcagcggacagattgcagtctagccaggcgcagctcaactgtgaggaaacaggactccagccaggcaattcctctggtggtggaaagctgtatccggtttatcagcagacacggactacagcatgaaggaattttccgggtgtcaggatcccaggtggaagtgaatgacatcaaaaatgcctttgagagaggagaggaccccctggctggggaccagaacgaccatgacatggattccatagctggtgtcctgaagctttacttccgggggctggaacaccctctcttccccaaggacatctttcatgacctgatggcctgcgtcacaatggacaacctgcaggagagagctctgcacatccggaaagtcctcctagtcctgcccaaaaccactctgattatcatgagatacctctttgccttcctcaatcatttatcacagttcagtgaagagaacatgatggacccctacaacctcgccatctgcttcgggccctcgctaatgtcagtgccagagggccacgaccaggtgtcctgccaagcccacgtgaatgagctgatcaaaaccatcatcatccagcatgagaacatcttcccaagccccagggagctggagggccctgtctacagcagaggaggaagcatggaggattactgtgatagccctcatggagagactacctcggttgaagactcaacccaggatgtgaccgcagagcaccacacgagcgatgacgaatgtgagcccatcgaggccattgccaagtttgactacgtgggccggacagcccgagagctatcctttaagaagggagcatccctgctgctttaccagcgggcttccgacgactggtgggaaggccggcacaatggcatcgacggactcatcccccatcagtacatcgtggtccaagacaccgaggacggtgtcgtggagaggtccagccccaagtctgagattgaggtcatttctgagccacctgaagaaaaggtgacagccagagcgggggccagctgtcccagtgggggtcatgtagccgatatttatcttgcaaacatcaacaagcaaaggaagcgtccagaatctgggagcatccggaaaacttttcggagtgacagccatgggctgagcagttccctgactgactcctcctccccaggggtgggggctagctgccgcccatcctcccagcccatcatgagccagagcctccccaaagaagggccagataagtgttccatcagtgggcacgggagcctcaactccatcagccgccactcatccctgaagaatcggctggatagtccacagatccggaagactgccacagcgggaaggtcaaaaagcttcaataaccatcggcccatggaccctgaggtcattgctcaggatattgaggcaacaatgaactcggccctgaatgagctacgggaactagaacggcagagcagtgtcaaacacacccctgacgtggttctggacaccttggagcccctcaaaacctccccagtggtggcccccacgtcagagccctccagccctctgcacacccagctcctcaaggaccccgagcccgccttccagcgcagcgccagtactgctggggacatcgcctgcgccttccggcctgtcaagtctgtcaagatggctgccccggtcaaaccaccagccacacggcccaagcccactgtcttccccaaaacaaatgccactagccctggtgtcaactcatcaacttccccacagtctactgacaagtcttgtactgtctgagggataataatttaattgttctagacaaggggactatagggactgactgttattaaaatcttcctatttaactagcttggggacttcagttgaaaattaggttctaagttgttcttgcaggaattagcctccccgtctcccaaaaccttgagaatgaagcccttggtatcgcctctcccttcccactgccctctgcttcccccagtcgtcgtaattcagccagctgcagtccgtaccgttcttaggttagccagagacaggttttcattatcaggtcactgtgaaatctggtaaggcagtcctgaggacatgggctcaagtctcagtcccctcagaccacggtgatgccttgaccagatggttggctactgccatccagctttcagtggcatcttgttttgggaactgattatagagaatcatatatagtccagtcttcattttacatacacacacatattttacacacacacacattttacacacacacacacacacacacacacacatatgtttttctagtctctggcatgtgtagcctctcctggtcatagaccagtctctttgtaagttattgtggcagttcacacagtagccaccaggggtctctgtttccatcacaaactttgttctgtctgggccagagaacctagcctttgaaatctctccatcatatgaaacataacgggatgggacaatcccgtaacctgtttggggttgggggctttctctctgtgttctttccattgatgtgaattggtcattggtgtttgctcttgcctctcctccatcccctagaagtacacccccgtcttattaaggagcttttaaagtttttctgaatgtatagacatttctcgggttcctacctttgtctctgatggaccattttccatttaagacattttcctgtataagacagttttatagctggttccttttagggtaaagagtcttaagagagttttattgtgtctatggcaggtttgggaaaggtaagaaatgggtcctttttcctcctaatgtttttggcacttaaaacataaaattcattatcctattaaaaaattaaattcagctttgctaatccagaaattgttcccaaatgaaaacttgttttaagtccaccccttagtttccttattttacaaggtctctcttcagggaccaacaggggcttagagagccttagttagattaaagggagaccctacctcttaaaaccagttttcatttatgcaaacaaggacaattaagggaaccctgaccccacaggctctcaagtcttcccaaggccagaatcgaaagaaaattaaaatttgaatgctgaatattctggctctactctggccttttttctggttcccttccaaaatgcacaaatcatacccttgtctgctccaattcagtctccaaacctggtgcctgtg

SEQ ID NO: 182067 - DNA, 7120 bp, Homo sapiens
  Payload ID: 15854
  Gene Symbol: SRGAP2B
  Gene Name: SLIT-ROBO Rho GTPase activating protein 2B
  Uniprot ID: P0DMP2
  ENST ID: ENST00000612199
  CDS Start-End: 849-2225
aatctgtgaccacgcctcggcagtgctagtcacacctccaagttttgccagctcctccccctcattccgggcctctcgggatcagctcttcctattggctatgggccccatcggtcgatagaaaacgggcggtgattggtaaaggggtgggctctacttcccggcggggtcctgcggagttggcggaggctcctccagggactggggcacagatctgcgtagaaacgggtggcggggaagagaggggaggagagctctgagtgggaagcggagccgggggcctgggacccgtcgcgtcagagccaggcaagtgaaccggagcaaacgacttccgatccagtctgcgctgttgcggctcccgtttgggatttgatttgcagcatctttgagcctctacgacaaaaaaccgcgaagcacgcccagccctcccccggcaccccgaaaagcacccactccctcccggggacacagctgggcgcgtccacacccccgcagccccacaccatgttgtgcggaaggacttccactccccgcctgtgtcgttgatgtcagaccccaggccagcctccgggcgctgcagttctcccggctaatgctgaggctgcggctccggctctagcacaggcaccagccgccgccgcacccggcctcagcgcccaccgtctgcatgtgcccgccgtagccgtctgcccagcccgcagcccgcgctccacggagcgctggagaccaccgtggggggccccttctgccctcgagagaagcggtcttggaggtattgatttaggtggttggattttttccgtggatctatcaattcacaattcgaatttggaagaaagaaggaaaacatgacgtctccagccaaattcaaaaaggataaggagatcatagcagagtacgatactcaggtcaaagagatccgtgctcagctcacagagcagatgaaatgcctggaccagcagtgtgagcttcgggtgcaactgttgcaggacctccaggacttcttccgaaagaaggcagagattgagatggactactcccgcaacctggagaagctggcagaacgcttcctggccaagacatgcagcaccaaggaccagcaattcaagaaggatcagaatgttctctctccagtcaactgctggaatctcctcttaaaccaggtgaagcgggaaagcagggaccataccaccctgagtgacatctacctgaataatatcattcctcgatttgtacaagtcagcgaggactcaggaagactctttaaaaagagtaaagaagtcggccagcagctccaagatgatttgatgaaggtcctgaacgagctctactcggtcatgaagacatatcacatgtacaatgccgacagcatcagtgctcagagcaaactaaaggaggcggagaagcaggaggagaagcaaattggtaaatcggtaaagcaggaggaccggcagaccccacgctcccctgactccacggccaacgttcgcattgaggagaaacatgtccggaggagctcagtgaagaagattgagaagatgaaggagaagcgccaagccaagtacacggagaataagctgaaggccatcaaagcccggaatgagtacttgctggctttggaggcaaccaatgcatctgtcttcaagtactacatccatgacctatctgaccttattgattgttgtgacttaggctaccatgcaagtctgaaccgggctctacgcaccttcctctctgctgagttaaacctggaacagtcgaagcatgagggtctggatgccatcgagaatgcagtagaaaacctggatgccaccagtgacaagcagcgcctcatggagatgtacaacaacgtcttctgcccccctatgaagtttgagtttcagccccacatgggggatatggcttcccagctctgtgcccagcagcctgtccagagtgagctgctacagagatgccaacaactgcagtctcgcttatccactctaaagattgaaaacgaagaggtaaagaagacaatggaggccaccctgcaaaccatccaggacattgtgactgtcgaggacttcgatgtgtctgactgcttccagtacagcaactccatggagtccgtcaagtccacggtctctgaaaccttcatgagcaagcccagcattgctaagaggagagccaaccagcaagagacagagcagttttatttcacagtgagggagtgctatggcttttaaagagcgtcagcatgcactgcagcactcaagggagatttggaactcagagtccttgttaagtgtctgaaggacaggcgttgaatatcttagatacgaatgtgggcatactcagagaccatccctacagttaaaggtgcaaacattaaaagttgtatatgtctaacagggatccgcccaagagaaaggatgctcccaagtatacaactaagaagattttcttttttaagaaatttttaactagctagtaggctttcactggaaagtttccttctcaggcacaggggatcctgaaaggggaacttcatcttttagttcttggagagtacatacaaatattcataataacacatattttgtttataaaaatctataatctcttctaggtgatatgatgacattattttataacttttattgttgggaaactattttttctaattattgctaaaacttaaaggatgggtaatatgcagcattactattttgcacataattccaaaacatcgtattttcttattcatgtatctctagtcttcttttagacagttggacccttttttctctttttttttttttttttttttttttaagtattgttaacaatcctttggaagtcactactggtctttgtgtgctgctttttaataattgagttattttgagcttgccaagtaggatctattgcctggactaaaatttatttcctaatcttctgatgaccaagaaaggaaaaattaagtttgcagatgtgagatgaaatatagccagtgaatatgcatactgattctgaatgaaaggaattaacttttcagtcaagaaacagtctgcatgcagtaaattgaatttttcctgcaactggaatgatttgtttaattcttctttgaacactgccctttctccagtaagaacactaatgatttgctaatattttttaaagaaatctgtttttttaattagttaagctcagacttcctcttattttttatcctagagaaaactgctaaaagggaatgatatatcagtactattcttctaaaacaactttttaaaaatgattatacaaagccaaatatgctcattatataaaatttagaagcaaaaagaaggaaataaaaattttccataattctaccagctagagataatggtgttagaatatattcctttctaatctgttttctatgcatgcacaaacacatatgtgagcacatatttataattttattctaaaaaataggatactgctgtacatattgttttacaatctaagtcatataattataatattctttaagcatatttatgagtaaaatattaaaacctatacaaaaaaataatagaatggcattttagctcattcattgatttttataaaatatttaacacactccctggtttgtagttagcgttcaataaatgctaaaaatttatcttcaccatcatcattaatttatttattaatcattattaaattattcattgatcattttttgaggatttactattgccagacactgtgctacaagctgggaatgctgacagtataagataaagagggaaatgatgggggatgggtcatgtaaagggagaactttcatttttacttcatatatatctaagcagttataataggttgatttttgtaatttaaaaaatgtaaaaatgcatacatgcactagtgcatgaatggcagccaggatgagtggaattggagaagcatcacacacacagtgacttttgtgtttgatcttgaagaatgagcgaaccaggcagggagtcggggaggagaatcgcattccttgaggaaagagcagcatgtgggaaaacataaatgcacgcaataacctggctcacatgttaagagaactttctgactataatgagggatgtgttgctgccccaagcttcattatctaaggagtttgttgaacactctctagaggcttttaataataggattgtttagctggtctgtctggactggttagatataacactatttaaatgacccaatctcattacattgtgaagatttccattttttaggttacgtaagaaattttggacctaaaaatcttgcattttaagacagtctttgtcagaattactttttggctctaaatgaattctgtaacatttgtattctaaattgacctttagtaaaagcaggaatggccatattcaaactggtaacctcgcaaatcctgcccaccctttcactttctgtctcaatacattgatgtcctctaacccatttcctgtcttatgtggctttagtgccacttatcaaaattgtgtgcaaatttccttggctaacagtaacagtttttgtctgggcttgtctagcagtggaattctgcctgagttcatcatttttgtgactggtacttgaagtgcatcagatgattaatttcatgataagagggctttttggggtggtgaaatagacatttatggaaaatgggatacccacattaagcagggtgactacctgtttaccatacaacccacacaaagccaatacaactatagatgtgctttatttagtctgttgcctctgcaaacattgcccgtgtgtttctctatgcccttcaaaaacatcagagcagcacatcctggaagatcctatcttttgtaagtttaagaagcagcctcttgtcacaggttgactcctaggtagtgtgcctagtgaccaagagggctgctaagaaagctttctgaccacttgtggctgtcattggactgatttgcccagatgacatcaattgggaatttgaggcatgacctataaagatcagttgcttgcaagagtctcaggaaaataattgtggagttaagaaacttgaagcgatttttaaaaattacctaacccaaccttctcatttgaaaaattaaaaaataaataggccagatatggcagctcatgcctgtaatcccagcgctgtgggagcctgaggcgggtgggtctcttgaggccaggagttcaagaccagcctggacaacatggtgaaaccctgtctctactaaaaacacaaaaattagctgagtgtggtggcaggcgcctgtaatcccagctactcaggaggctaaggtgggaggattacttgaaccggggaggcataggttgtagtgagccaagatcgtgtcactgcactccagcctgggtgacagagtaagactctgcctaaaaaaaaaaaagaaagattaaaaaataaataaatctgctgggcgtggtggctcacgcctgtaatcccagcactttgggaggccgaggcgggcggatcacctgaggtcgggagtttgagaccagcctgatcaacatggagaaacctcgtctctactaaaaacacgaaaaaattagctgggcgtggtggcgcatgcctcattcacgtacatgggagagtctacaaagtcacacgtattcataggttaagccacatgctgacaaatgtcataagaagaccctacacttttaccttggccgatccctcccctcagtgcaagctctgtgcaagagtgaacttgaacttcactcagtgcaagagtgaacacacactttgtgccggctttaaagaacccagcacaaagccagtctgcatggcctacagacatattttgctggacaatgattacttgcttttctttttgtttttcttgtatttgcctgtttgattggctcctgacataccagaaaatcactgtcaaaacattagcttaacatttgttaaggaaacaaaaagacttcggtgaccacaccttataaaccaaacagttttgtaaatcactttggaaaatttcactaaaaaaaaaaatccttaacaatataataagtaaagaaaatttaaaaccacaaaacatcactgtgtttgtagggggaggtctgatttacagagtaaccacatagtaattataattattagaatgtccagttttcaaaaaacgttacaaggcatacaaagaatgggaaagtgtggctcattcaaaggaacaaaataaagtgacagaaaatatccctaaagaaacccagacatcaaacttaccagacaaagactttaaaacaactgtcttcattatactcaaatgtcaaaaggaaaacataaacaaagaaataaaggaatcagaaaaaatattaaaaagtaggaatatcagcaaagagataacaaattctggagtggaaaactacaatgataaaaatttaaaaatcaccagagggatttaagagtatatttgcacacacagaggaagccatgaacttgaagagaagaaaatggaaaatactctgagaaacagaaagaataaaaaataaacaatgagcacagactaatgaatctgtgggacatcatcaaatagaccaacattcatattctagaaggataaattatgttgttaaaaagtttaccattctttcttttcacctttcttccttcttccttccccctcctcctcctttttacttttcttcctcttcctttctcttcttctttctctccttcattatccctttcgctgtctctctttctccctttctcttttttcttttctttcaattttctcaattactaagagatgtttaagtacccttagcatgttagtagatacggttatttctccctttagttctcttttgagatttatagtcactcaaataaagagataacccaaacataagcgtcacaaacaggctttcataccattcttaatttggtcctgtaattcttcattgctgtattaattttctgatgcttttaaggatgttttataacaagttgtgtagctttttccaatggaatgtttattctgaattatctaattcatattgtaagtatagagggagtttaacataaaattattaaactaatatttgtgaaagaatgtatttgtgcatttaacaaata

SEQ ID NO: 182068 - DNA, 1477 bp, Homo sapiens
  Payload ID: 15854
  Gene Symbol: SRGAP2B
  Gene Name: SLIT-ROBO Rho GTPase activating protein 2B
  ENST ID: ENST00000619678
  CDS Start-End: 449-1366
catgttgtgcggaaggacttccactccccgcctgtgtcgttgatgtcagaccccaggccagcctccgggcgctgcagttctcccggctaatgctgaggctgcggctccggctctagcacaggcaccagccgccgccgcacccggcctcagcgcccaccgtctgcatgtgcccgccgtagccgtctgcccagcccgcagcccgcgctccacggagcgctggagaccaccgtggggggccccttctgccctcgagagaagcggtcttggaggtattgatttaggtggttggattttttccgtggatctatcaattcacaattcgaatttggaagaaagaaggaaaacatgacgtctccagccaaattcaaaaaggataaggagatcatagcagagtacgatactcaggtcaaagagtaaagaagtcggccagcagctccaagatgatttgatgaaggtcctgaacgagctctactcggtcatgaagacatatcacatgtacaatgccgacagcatcagtgctcagagcaaactaaaggaggcggagaagcaggaggagaagcaaattggtaaatcggtaaagcaggaggaccggcagaccccacgctcccctgactccacggccaacgttcgcattgaggagaaacatgtccggaggagctcagtgaagaagattgagaagatgaaggagaagcgccaagccaagtacacggagaataagctgaaggccatcaaagcccggaatgagtacttgctggctttggaggcaaccaatgcatctgtcttcaagtactacatccatgacctatctgaccttattgattgttgtgacttaggctaccatgcaagtctgaaccgggctctacgcaccttcctctctgctgagttaaacctggaacagtcgaagcatgagggtctggatgccatcgagaatgcagtagaaaacctggatgccaccagtgacaagcagcgcctcatggagatgtacaacaacgtcttctgcccccctatgaagtttgagtttcagccccacatgggggatatggcttcccagctctgtgcccagcagcctgtccagagtgagctgctacagagatgccaacaactgcagtctcgcttatccactctaaagattgaaaacgaagaggtaaagaagacaatggaggccaccctgcaaaccatccaggacattgtgactgtcgaggacttcgatgtgtctgactgcttccagtacagcaactccatggagtccgtcaagtccacggtctctgaaaccttcatgagcaagcccagcattgctaagaggagagccaaccagcaagagacagagcagttttatttcacagtgagggagtgctatggcttttaaagagcgtcagcatgcactgcagcactcaagggagatttggaactcagagtccttgttaagtgtctgaaggacaggcgttgaatatcttagatacgaatgtgggcatactca

SEQ ID NO: 182069 - DNA, 486 bp, Homo sapiens
  Payload ID: 15854
  Gene Symbol: SRGAP2B
  Gene Name: SLIT-ROBO Rho GTPase activating protein 2B
  ENST ID: ENST00000621582
  CDS Start-End: 1-131
ttaaaaagagtaaagaagtcggccagcagctccaagatgatttgatgaaggtcctgaacgagctctactcgcatcagtgctcagagcaaactaaaggaggcggagaagcaggaggagaagcaaattggtaaatcggtaaagcaggaggaccggcagaccccacgctcccctgactccacggccaacgttcgcattgaggagaaacatgtccggaggagctcagtgaagaagattgagaagatgaaggagaagcgccaagccaagtacacggagaataagctgaaggccatcaaagcccggaatgagtacttgctggctttggaggcaaccaatgcatctgtcttcaagtactacatccatgacctatctgaccttattgatcagtgttgtgacttaggctaccatgcaagtctgaaccgggctctacgcaccttcctctctgctgagttaaacctggaacagtcgaagcatgagggtctggatgcc

SEQ ID NO: 182070 - DNA, 7204 bp, Homo sapiens
  Payload ID: 15855
  Gene Symbol: SRGAP2C
  Gene Name: SLIT-ROBO Rho GTPase activating protein 2C
  Uniprot ID: P0DJJ0
  ENST ID: ENST00000367123
  CDS Start-End: 858-2237
aatctgtgaccacgcctcggcagtgctagtcacacctccaagttttgccagctcctccccctcattccgggcctctcggtatcagctcttcctattggctatgggccccatcggtcgatagaaaacgggcggtgattggtaaaggggtgggctctacttcccggcggggtcctgcggagttggcggaggcggcggaggctcctccagggactggggcaccgatctgcgtagaaacgggtggcggggaagagaggggaggagagctctgagtgggaagcggaaccgggggcctgggacccgtcgcgtcagagccaggcaagtgaaccggagcaaacgacttccgatccagtctgcgctgttgcggctcccgtttgggatttgatttgcagcatctttgagcctctacgacaaaaaaccgcgaagcacgcccagccctcccccggcaccccgaaaagcacccactccctcccggggacacagctgggcgcgtccacacccccgcagccccacaccatgttgtgcggaaggacttccactccccgcctgtgtcgttgatgtcagaccccaggccagcctccgggcgctgcagttctcccggctaatgctgaggctgcggctccggctctagcacaggcaccagccgccgccgcacccggcctcagcgcccaccgtctgcatgtgcccgccgtagccgtctgcccagcccgcagcccgcgctccacggagcgctggagaccaccgtggggggccccttctgccctcgagagaagcggtcttggaggtattgatttaggtggttggattttttccgtggatctatcaattcacaattcgaatttggaagaaagaaggaaaacatgacgtctccagccaaattcaaaaaggataaggagatcatagcagagtacgatactcaggtcaaagagatccgtgctcagctcacagagcagatgaaatgcctggaccagcagtgtgagcttcgggtgcaactgttgcaggacctccaggacttcttccgaaagaaggcagagattgagatggactactcccgcaacctggagaagctggcagaacacttcctggccaagacacgcagcaccaaggaccagcaattcaagaaggatcagaatgttctctctccagtcaactgctggaatctcctcttaaaccaggtgaagtgggaaagcagggaccataccaccctgagtgacatctacctgaataatatcattcctcgatttgtacaagtcagcgaggactcaggaagactctttaaaaagagtaaagaagtcggccagcagctccaagatgatttgatgaaggtcctgaacgagctctactcggtcatgaagacatatcacatgtacaatgccgacagcatcagtgctcagagcaaactaaaggaggcggagaagcaggaggagaagcaaattggtaaatcggtaaagcaggaggaccggcagaccccatgctcccctgactccacggccaacgttcgcattgaggagaaacatgtccggaggagctcagtgaagaagattgagaagatgaaggagaagcaccaagccaagtacacggagaataagctgaaggccatcaaagcccagaatgagtacttgctggctttggaggcaaccaatgcatctgtcttcaagtactacatccatgacctatctgaccttattgatcagtgttgtgacttaggctaccatgcaagtctgaaccgggctctacgcaccttcctctctgctgagttaaacctggaacagtcgaagcatgagggtctggatgccatcgagaatgcagtagaaaacctggatgccaccagtgacaagcagcgcctcatggagatgtacaacaacgtcttctgcccccctatgaagtttgagtttcagccccacatgggggatatggcttcccagctctgtgcccagcagcctgtccagagtgagctggtacagagatgccaacaactgcagtctcgcttatccactctaaagattgaaaacgaagaggtaaagaagacaatggaggccaccctgcaaaccatccaggacattgtgactgtcgaggactttgatgtgtctgactgcttccagtacagcaactccatggagtccgtcaagtccacggtctctgaaaccttcatgagcaagcccagcattgctaagaggagagccaaccagcaagagacagagcagttttatttcacagtaagggagtgctatggcttttaaagagcgtcagcatgcactgcagcactcaagggagatttggaactcagagtccttgttaagtgtctgaaggacaggcattgaatatcttagatacgaatgtgggcatactcagagaccatccctacacttaaaggtgcaaacattaaaagttgtatatgtctaacagggatccgcccaagagaaaggatgctcccaagtatacaactaagaagattttcttttttaagaaatttttaactagctagtaggctttcactggaaagtttccttctcaggcacaggggatcctgaaaggggaacttcatcttttagttcttggagagtacatacaaatattcataataacacatattttgtttataaaaatctataatctcttctaggtgatatgatgacattattttataacttttattgttgggaaactattttttctaattattgctaaaacttaaaggatgggtaatatgcagcattactattttgcacataattccaaaacatcgtattttcttattcatgtatctctagtcttcttttagacagttggacccttttttctttttctttttttttttttttttttaagtattgttaacaatcctttggaagtcactactggtctttgtgtgctgctttttaataattgagttattttgagcttgccaagtaggatctattgcctggactaaaatttatttcctaatcttctgatgaccaagaaaggaaaaattaagtttgcagatgtgagatgaaatatagccagtgaatatgcatactgattctgaatgaaaggaattaacttttcagtcaagaaacagtctgcatgcagtaaattgaatttttcctgcaactggaatgatttgtttaattcttctttgaacactgccctttctccagtaagaacactaatgatttgctaatattttttaaagaaatctgtttttttaattagttaagctcagacttcctcttattttttatcctagagaaaactgctaaaagggaatgatatatcagtactattcttctaaaacaactttttaaaaatgattatacaaagccaaatatgctcattatataaaatttagaagcaaaaagaaggaaataaaaattttccataattctaccagctagagataatggtgttagaatatattcctttctaatctgttttctatgcatgcacaaacacatatgtgagcacatatttataattttattctaaaaaataggacactgctgtacatattgttttacaatctaagtcatataattataatattctttaagcatatttatgagtaaaatattaaaacctatacaaaaaaataacagaatggcattttagctcattcattgatttttataaaatatttaacacactccctggtttgtagttagcgttcaataaatgctaaaaatttatcttcaccatcatcattaatttatttattaatcattattaaattattcattgatcattttttgaggatttactattgccagacactgtgctacaagctgggaatgctgacagtataagataaagagggaaatgatgggggatgggtcatgtaaagggagaactttcatttttacttcatatatatctaagcagttataataggttgatttttgtaatttaaaaaatgtaaaaatgcatacatgcactagtgcatgaatggcagccaggatgagtggaattggagaagcatcacacacacagtgacttttgtgtttgatcttgaagaatgagcgaaccaggcagggagtcggggaggagaatcgcattccttgaggaaagagcagcatgtgggaaaacataaatgcacgcaataacctggctcacatgttaagagaactttctgactataatgagggatgtgttgctgccccaagcttcattatctaaggagtttgttgaacactctctagaggcttttaataataggattgtttagctggtctgtctggactggttagatataacactatttaaatgacccaatctcattacattgtgaagatttccattttttaggttacgtaagaaattttggacctaaaaatcttgcattttaagacagtctttgtcagaattactttttggctctaaatgaattctgtaacatttgtattctaaattgacctttagtaaaagcaggaatggccatattcaaactggtaacctcgcaaatcctgcccaccctttcactttctgtctcaatacattgatgtcctctaacccatttcctgtcttatgtggctttagtgccacttatcaaaattgtgtgcaaatttccttggctaacagtaacagtttttgtctgggcttgtctagcagtggaattctgcctgagttcatcatttttgtgactggtacttgaagtgcatcagatgattaatttcatgataagagggctttttggggtggtgaaatagacatttatggaaaatgggatacccacattaagcagggtgactacctgtttaccatacaacccacacaaagccaatacaactatagatgtgctttctttagtctgttgcctctgcaaacattgcccgtgtgtttctctatgcccttcaaaaacatcagagcagcacatcctggaagatcctatcttttgtaagtttaagaagcagcctcttgtcacagcttgactcctaggtagtgtgcctagtgaccaagagggctgctaagaaagctttctgaccacttgtggctgtcattggactgatttgcccagatgacatcaattgggaatttgaggcatgacctataaagatcagttgcttgcaagagtctcaggaaaataattgtggagttaagaaacttgaagcgatttttaaaaattacctaacccaaccttctcatttgaaaaattaaaaaataaataggccagatatggcggctcatgcctgtaatcccagcgctgtgggagcctgaggcgggtgggtctcttgaggccaggagttcaagaccagcctggacaatgtggtgaaaccctgtctctactaaaaacacaaaaattagctgggtgtggtggcaggcgcctgtaatcccagctactcaggaggctaaggtgggaggattacttgaactggggaggcataggttgtagtgagccaaggtcgtgtcactgcactccagcctgggtgacagagtaagactctgcctaaaaaaaaaaaaagaaagattaaaaaataaataaatctgctgggcgtggtggctcacgcctgtaatcccagcactttgggaggccgaggcgggtggatcacctgaggtcgggagtttgagaccagcctgatcaacatggagaaacctcgtctctactaaaaacacaaaaaaattagctgggcgtggtggcgcatgcctcattcacgtacatgggagagtctacaaagtcacacgtattcataggttaagccacatgctgacaaatgtcataagaagaccctacacttttaccttggccgatccctcccctcagtgcaagctctgtgcaagagtgaacttgaacttcactcagtgcaagagtgaacacacactttgtgccggctttaaagaacccagcacaaagccagtctgcatggcctacagacatattttgctggacaatgattacttgcttttctttttgtttttcttgtatatgcctgtttgattggttcctgacataccagaaaatcactgtcaaaacattagcttaacatttgttaaggaaacaaaaagacttcggtgaccacaccttataaaccaaacagttttgtaaatcactttggaaaatttcactaaaaaaaaaaatccttaacaatataataagtaaagaaaatttaaaaccacaaaacattactgtgtttgtagggggaggtctgatttacagagtaaccacatagtaattataattattagaatgtccagttttcaaaaaacgttacaaggcatacaaagaatgggaaagtgtggctcattcaaaggaacaaaataaagtgacagaaaatatccctaaggaaacccagacatcaaacttaccagacaaagactttaaaacaactctcttcattatactcaaatgtcaaaaggaaaacataaacaaagaaataaaggaatcagaaaaaatattaaaaagtaggaatatcagcaaagagataacaaattctggagtggaaaactacaatgataaaaatttaaaaatcaccagagggatttaagagtatatttgcacacacagaggaagccatgaacttgaagagaagaaaatggaaaatactgtctctgagaaacagaaagaataaaaaataaacaatgagcagagactaatgaatttgtgggacatcatcaaatagaccaacattcatattctagaaggataaattatgttgttaaaaagtttaccattctttcttttcacctttcttccttcttccttccccctcctcctttttacttttcttcctcttcctttctcttcttctttctcgccttcattatccctttcgctgtttctctttctccctttctcttttttcttttctttcaattttctcaattactaagagatgtttaagtacccttagcatgttagtagatatggttatttctccctttagttctcttttgagatttatagtcactcaaataaagagataacccaaacataagcgtcacaaacaggctttcataccattcttaatttggtcctgtaattcttcattgctgtattaattttctgatgcttttaaggatgttttataacaaattgtgtagctttttccaatggaatgtttattctgaattatctaattcatattgtaagtatagagggagtttaatataaaattattaaactaatatttgtgaaagaatgtatttgagcatttaacaaatatgttaatcctcagactgttattgggcagctgagcatacaggaataaaaataacacaatttttatgtgtacaa

SEQ ID NO: 182071 - DNA, 1477 bp, Homo sapiens
  Payload ID: 15855
  Gene Symbol: SRGAP2C
  Gene Name: SLIT-ROBO Rho GTPase activating protein 2C
  ENST ID: ENST00000304465
  CDS Start-End: 449-1366
catgttgtgcggaaggacttccactccccgcctgtgtcgttgatgtcagaccccaggccagcctccgggcgctgcagttctcccggctaatgctgaggctgcggctccggctctagcacaggcaccagccgccgccgcacccggcctcagcgcccaccgtctgcatgtgcccgccgtagccgtctgcccagcccgcagcccgcgctccacggagcgctggagaccaccgtggggggccccttctgccctcgagagaagcggtcttggaggtattgatttaggtggttggattttttccgtggatctatcaattcacaattcgaatttggaagaaagaaggaaaacatgacgtctccagccaaattcaaaaaggataaggagatcatagcagagtacgatactcaggtcaaagagtaaagaagtcggccagcagctccaagatgatttgatgaaggtcctgaacgagctctactcggtcatgaagacatatcacatgtacaatgccgacagcatcagtgctcagagcaaactaaaggaggcggagaagcaggaggagaagcaaattggtaaatcggtaaagcaggaggaccggcagaccccatgctcccctgactccacggccaacgttcgcattgaggagaaacatgtccggaggagctcagtgaagaagattgagaagatgaaggagaagcaccaagccaagtacacggagaataagctgaaggccatcaaagcccagaatgagtacttgctggctttggaggcaaccaatgcatctgtcttcaagtactacatccatgacctatctgaccttattgattgttgtgacttaggctaccatgcaagtctgaaccgggctctacgcaccttcctctctgctgagttaaacctggaacagtcgaagcatgagggtctggatgccatcgagaatgcagtagaaaacctggatgccaccagtgacaagcagcgcctcatggagatgtacaacaacgtcttctgcccccctatgaagtttgagtttcagccccacatgggggatatggcttcccagctctgtgcccagcagcctgtccagagtgagctggtacagagatgccaacaactgcagtctcgcttatccactctaaagattgaaaacgaagaggtaaagaagacaatggaggccaccctgcaaaccatccaggacattgtgactgtcgaggactttgatgtgtctgactgcttccagtacagcaactccatggagtccgtcaagtccacggtctctgaaaccttcatgagcaagcccagcattgctaagaggagagccaaccagcaagagacagagcagttttatttcacagtaagggagtgctatggcttttaaagagcgtcagcatgcactgcagcactcaagggagatttggaactcagagtccttgttaagtgtctgaaggacaggcattgaatatcttagatacgaatgtgggcatactca

SEQ ID NO: 182072 - DNA, 8415 bp, Homo sapiens
  Payload ID: 15856
  Gene Symbol: SRGAP3
  Gene Name: SLIT-ROBO Rho GTPase activating protein 3
  Uniprot ID: O43295
  ENST ID: ENST00000360413
  CDS Start-End: 263-3490
ctgtgctcctagggtgattcttcttttgcaagaggagctgaccagggcaagctactagagccatttctcggcaagtaaagagatttttccttccagaaggagaaggatttttctccctgctctgcagccaagtgaaagagattagtccctaaacctgtgaaatcgaccagagctgtgtgattaccagggcttgagagaggactcgaaaagaaaaggagaaataaatcaaacagcctgtcagttcctttggccacgtcagaagatgtcatctcaaactaagttcaagaaagacaaagagatcattgctgaatatgaagcccaaataaaagagatccgcacgcagctggtggagcagttcaaatgtctggagcagcaatcagagtcgcgactgcagctgcttcaagacctccaggagtttttccgccggaaagctgagattgagctcgagtactcccgcagcctggagaagctggctgagcgcttctcctccaaaatccgcagctcccgggagcaccagttcaagaaggaccagtacctcctctcgcctgtgaactgttggtatctggttctgcatcagacccggcgggagagccgagaccatgccaccctcaatgacatcttcatgaacaatgtcatcgtccgcctctcccagatcagtgaggatgtcatcagactcttcaaaaagagcaaggagattggcctgcagatgcacgaggagctcctgaaggtgaccaatgagctctacacagtcatgaaaacctaccacatgtaccatgcagagagcatcagtgcggaaagcaagctgaaggaggctgagaagcaggaggagaagcagttcaataagtcaggagacctcagcatgaacctgctccggcacgaggaccggccccagcgccgcagctctgtgaagaagattgagaagatgaaggagaagaggcaggccaagtactctgagaacaagctgaaatgcacaaaggcccggaatgactacttgctcaatctggcagccaccaacgcagctataagcaaatactacatccatgatgtctctgatctgatcgattgctgtgatttgggcttccatgccagcctggcccgcaccttccggacctatctctcagctgaatacaacctggagacctctcgccacgaagggctggatgtcattgagaatgcagtggacaacctggattcccgaagtgacaagcacacagtcatggacatgtgcaatcaagtcttctgccctccactcaagttcgagttccagccccacatgggggatgaggtctgccaggtcagcgctcagcagcccgtccagacagaactgctcatgcgttatcaccagctgcagtccagactggccaccctcaagatagagaatgaggaggttaggaaaaccctggatgccaccatgcagacattacaggacatgctgactgtggaggactttgatgtctccgatgccttccaacacagtcgatcgacagagtccgtcaagtcggctgcctctgagacctacatgagcaagatcaacattgccaagaggagagccaaccagcaggaaacagaaatgttttattttacaaaatttaaagagtatgtgaatggcagtaacctcatcaccaagctgcaggccaagcacgatttactcaagcagaccctgggcgaaggggaaagagcagaatgcggcaccaccagaggaagaagaaatgctcgaaccaggaaccaggattcaggacaagctataccgcttgtagtcgagagctgcatccgttacatcaatttatatggactccagcagcaggggatcttcagagtgccaggatctcaggtggaagtcaatgacatcaaaaattcctttgagagaggtgaagacccccttgtggacgatcaaaatgaacgagatatcaattcagtcgctggtgttttaaaactgtatttccgaggactggaaaacccactctttcctaaggaaaggtttcaagatttgatatctactattaaactggagaacccagccgagagggtgcaccagatccaacaaatcctcgtcacccttccccgcgtggtcattgtggtcatgagatacctcttcgctttcctcaaccacctctcccagtatagcgacgagaacatgatggatccctacaacctggccatctgcttcgggcctaccctcatgcacatccctgatgggcaggaccctgtgtcctgccaggcacacatcaatgaagtcatcaaaaccatcatcatccatcatgaagccatcttccccagcccccgggagctagagggacctgtgtatgaaaaatgcatggctggaggggaagaatattgtgacagcccacacagcgagccaggggccatcgatgaagttgaccatgacaatggcactgagcctcataccagcgatgaagaagtggagcagatcgaggctattgccaagtttgactacatggggcggtccccgcgtgagctatccttcaagaagggggcctcgctgctcctgtaccaccgcgcctcggaggactggtgggagggccggcacaacggcgtggatggactcatcccccatcagtacatagttgtacaggacatggatgatgccttctccgacagcctgagccagaaggctgacagcgaggccagcagtgggccattgctggatgacaaggcctcttccaaaaacgacctccagtcccccacggagcacatctcggattacggctttgggggggtgatgggccgagtgcggttacgatctgatggagcagccatccccagacgccgaagcgggggcgacacacacagcccgccccggggcctgggccccagcatagacacaccaccccgggctgctgcctgccccagcagcccccacaaaatccccctcacccgggggaggatcgagagccctgagaagcggaggatggcgacgttcgggagcgctggcagcatcaactaccctgacaagaaggcgctctccgaagggcactcgatgaggtcgacctgcggttccaccaggcacagcagcctaggggaccacaagtccctggaggccgaggccctggcagaagacatcgagaagaccatgagcacggctctgcacgagttgcgggaactcgagaggcagaacacggtcaagcaggcgccagatgtggtgctggacaccctggagcccctgaagaacccgccaggccccgtcagctcggagcccgccagtccccttcacaccatcgtcatccgcgaccccgatgccgccatgcgccgcagcagcagctcctccaccgagatgatgaccaccttcaagccagccctgtccgcccgcctggctggcgcccagctccgcccgccccccatgcggcccgtgcggccggtggtccagcaccggtccagcagcagcagcagctcgggcgtgggcagcccggccgtgacgcccaccgagaagatgttccccaacagctcagcggacaagtcgggcaccatgtgacctgcaggatgggccgcgccgccgtggcccgctgtggctcaccacggcccagggtggccttggtggcttccacgtgcttcccagtgaccctggccttggagggcagaggtccgtctgggagggtgtgtctgtgcagagctgaggcccgggcgctggctgcagctcacgtccagccatgggaatcccacggacctctcgcgtgtcaacagacgaccagaggagtgctggagctccagcagccccaaccacagcattccctaacatggaggcaaaataccacatggcttctcccgcatatcgtcactggaaacttcctctctcgacattctctctacatacgtatatgtgtgtgtatatcgatgtgtgcatatatacacatgtatacgtatgtacgtgtctgtaggtgtgtgtatatatatatatatttatgcatctatatacatatactagatctggacacacgcatactaagtgtatatagtatctcctttttctttttatgaaacttagatttacctcagatccatgccaccaaacatctcccaccgagttatttggtgggatttgcagggacttttctgggagaacttaaaggcccatagtaactgcgaatgaagcaatataccactaacctgcagaaaaacacaaacaaaaacagactcccactgtctccagaagtcgtggccttccagaacagtctgcccctcaaggaagggtggggcaggcagtacccccaagcaggctgctcccagaggtggggaacccttcataggaaatccccacccccgtccaccccagagaccctgcccttccacccggaggccaaaggccaactgtactcccaaaggcatgggagaaggttggcgagaagacccctgactaccacatccttgtgtttgtgtgtagagacgggggatagtgagaacctaagccccatcgtagcacagtattacatgtggttgggaaaaataaaaatacagtggtgtggaatactccaaaacctagaaatgctgtaggaataaatctgtggtaactatagaggtttaacttatatcattttcaaactatttaattttttcttttcctggttctactaattatactgtgtcagatttggaactaaacaggcaaggaggctttgagtcacatcgttttcattttaaatcaggctgtgatgcactgtggctggtgccgtcttgcatgaaacgcatgagccgtgagcgcccagttcagactggggccagggaggggcagtccttggcactttctgtcctagaggacactgtcagttgagttaatacaagtgacatagcttcccttccctcccccttcacccactccctccagaacatttagtgtagatgaaaatgtggtgatagaaatgggtgcatgatcttcacgtgtgacagccaggcctttgcctcttggccaagtaaagcccttccgggtcgctctccttcgattccattttacctcctcttctgatcacttccagagatgagctgtttctggataatggcacacgggcaaatctgtgtgccctgtgggccgctgttacttaccctctcctgcgagacccaggggcttttccctactgttcccacgcttcctctctctcgaggccactgaagtttggagtcaaaaggcccagagtctgagtcccagccctgagcacttaggagccttctgacttagggtttgtcactccacctcattgagcctgactgttctgctccataaaatagggtaataaaggtcaaacatcagtgagcaagctgtgtacactggaaaacactgaatcaatacaatgcgtttgtgattatcattagtaaggtaagtcttagatcagagccctccagcccttctttttgaaacctcccaatggcatttcagaagtgagcagtggaattttcctgccatcctaataagagccctggattccatcattaacatttcagcccattggatgaagtggtgccctctcctctggtcccccgcgaaaaggtaaatacacccaaagggagggacctagttaagtcactggcacctagataagttaggagggtaaagccactacctcgtctgaaggactggacttgacaccccacagtggaagggagcatcaggagaggaacaaaaaaagggatctcagggagaggccagtgtcaaacttgacctcccttgtttggcctagaatgaacccttctctttagctcctggatatgaaaggccatctgcttggagcacagaaagatattgccattttacagcttaagagagtaaggccttgggctgtgctgtgacctgcccaagatttgacactggctaggagcagaggctgcgtcaggctcttaaagtcatgtgtttgcatgctggatgctatactgtccagccaggacacaagacttctgatttctaccctcaagatactcccagatcctaaatccagtagcctcccaggcaaaatatagcaatctgccacaactgccagatgaaaagcaacaatcagagtagaaaaatctgttgcctgatatacataacaccaatcagaccgtgtggatttttctctgaattgactgattttgtttttttcttactgaaaatggacctgcctttcactgaattttctgagggcagagtcttagctgttttctttaagcaccttttttttttttttccattgggaaatggctgatgagttcacatttagggatgtacacacacagatggcagacgtctccccactcatccagccccagatctgagccttgacgcaggccaagtggaaaaatactttcccgcccccctcccctgttcccacttcctcatctggcactatgcatgtctcactcaccctccacagcactcagtcccatcgacgttcactgaacattggctttctctttctgactcctgcctgttttagtccactatatattgctgtatttgcttaaatgctggaaagtaactgttaaaatgtgaaattgtaatttttaaaaaggctacaattaaattttagccaatgccactcaccaaatctttgcacctagtagatagatcaatgtaaaaacaaatacctaactgtacagtgagtgtgggggaaatgtagtaacctagttagtagtcttcaatataaccaattgtacaaggggaagtggtgtttacctacttgttcatcaccattattgaaagccgtactgatcagttagttgacaacgggcatttttttttctttgcttcatggaatgatttcttttcttaaccttcgacttatcctgaggtcaagccttttgtctttatgtgtaaccgacgttcagtctattctaggaatgaaccagcaagttgttcatttaaaactgaccaaagacaattaattcctggtctagtttcctgggccttgtggctcagctgccactaaagagctttttggataaaattgagaacaagctgtgcttcctaccccactctccccgtccccttttattcccttttcctcttaaagagctgctctgagctgtgggattctatgaaaaattcttgcctttccttgtttcagtgctaacgatttctcacctcgaagcgccttttgaaccccggacagagtgcacaatcggagggaattgcgagcttgggaattagactttggagtcttttctctgaagtcaccaggccaggggtcaggagagagatggattcccaagggatgaaaggtttctattcaatgaagaaatcggagtgggaagagacacagggaaattgagccatattttggctatcggctggaaccagcagttcagagatctgccttataaacatttaaaaccggtttgtggtacacaaagaggaaccagtgtgggaaggggcctttatgtggggctttcttctctgttggagtcccttggagtgccttgttgggtatatttctctgtcattcaggaggcacgaatgtggaggacttctcgtgacctggtcgtgatgtggcattcagtgcatgtccacagctaatggaaaaacacgaggactcgggtaatggttcttcctctcagtctttctattcctaacttttcacacatccagatggttccacactagtgcaaatgcctcactctcctgagaaacccagaaagaagagtggctggctcacaaccatggggttagcccctgctgggctgggagtcggggtggcggccaggaggaaaggcagaaaggggtgagccgaggtgttgcctagctgattttctgctgtgcagagctaatgctgacatttcatgtcaacttccccggttctctggggtctcctctcctctgagcagccacatagaacattccccacatatccaaagctgcccaggggagccgagagaagggactttgctgtcaggtccaagccctcctgacctccctgagattgatctgccagtgtcctgctgtccctctgggactggccacatggccatcgctgccccttgttgacacctcctttctgtgtgagttgtccccggccaataacaaagctgttccttgaaccagaacaaccagagtgcacttttccttccttagacggaagtagatcctggctagggtttctgcccaggcccttgttcccggcagtgtgactgtttacatggtttggcaataggtttgattctgattgcttcagagtggctggtctattttgtttcctttggtttccttcctccccaaattgtgacaggaaaaacagaccaaaaccaccctaggaaattgctggttgcctgtccccacgtgatgataaatgttgccctcttctggatatcgtttctctaccttacgaccaaacgcccgtcctatagagtgtctgattggatcctctgtcgcgtattctgatggtgcctgctggtttgacgtggagctatcctgtgaaataaaacagcttaacttttctc

SEQ ID NO: 182073 - DNA, 8656 bp, Homo sapiens
  Payload ID: 15856
  Gene Symbol: SRGAP3
  Gene Name: SLIT-ROBO Rho GTPase activating protein 3
  Uniprot ID: O43295
  ENST ID: ENST00000383836
  CDS Start-End: 429-3728
gtgtgtgtgtatgcctgtgtgcacagcacaactgtgtgcgtgtcccggtgagtgtgcctgtgcatgcgtgagtgtgtgtacgtgtgcatgtgtgtgtgagtgcgcttggttattactattattattatttttggaagaaaaatctttgaaaatctggggcaggttactgtgctcctagggtgattcttcttttgcaagaggagctgaccagggcaagctactagagccatttctcggcaagtaaagagatttttccttccagaaggagaaggatttttctccctgctctgcagccaagtgaaagagattagtccctaaacctgtgaaatcgaccagagctgtgtgattaccagggcttgagagaggactcgaaaagaaaaggagaaataaatcaaacagcctgtcagttcctttggccacgtcagaagatgtcatctcaaactaagttcaagaaagacaaagagatcattgctgaatatgaagcccaaataaaagagatccgcacgcagctggtggagcagttcaaatgtctggagcagcaatcagagtcgcgactgcagctgcttcaagacctccaggagtttttccgccggaaagctgagattgagctcgagtactcccgcagcctggagaagctggctgagcgcttctcctccaaaatccgcagctcccgggagcaccagttcaagaaggaccagtacctcctctcgcctgtgaactgttggtatctggttctgcatcagacccggcgggagagccgagaccatgccaccctcaatgacatcttcatgaacaatgtcatcgtccgcctctcccagatcagtgaggatgtcatcagactcttcaaaaagagcaaggagattggcctgcagatgcacgaggagctcctgaaggtgaccaatgagctctacacagtcatgaaaacctaccacatgtaccatgcagagagcatcagtgcggaaagcaagctgaaggaggctgagaagcaggaggagaagcagttcaataagtcaggagacctcagcatgaacctgctccggcacgaggaccggccccagcgccgcagctctgtgaagaagattgagaagatgaaggagaagaggcaggccaagtactctgagaacaagctgaaatgcacaaaggcccggaatgactacttgctcaatctggcagccaccaacgcagctataagcaaatactacatccatgatgtctctgatctgatcgattgctgtgatttgggcttccatgccagcctggcccgcaccttccggacctatctctcagctgaatacaacctggagacctctcgccacgaagggctggatgtcattgagaatgcagtggacaacctggattcccgaagtgacaagcacacagtcatggacatgtgcaatcaagtcttctgccctccactcaagttcgagttccagccccacatgggggatgaggtctgccaggtcagcgctcagcagcccgtccagacagaactgctcatgcgttatcaccagctgcagtccagactggccaccctcaagatagagaatgaggaggttaggaaaaccctggatgccaccatgcagacattacaggacatgctgactgtggaggactttgatgtctccgatgccttccaacacagtcgatcgacagagtccgtcaagtcggctgcctctgagacctacatgagcaagatcaacattgccaagaggagagccaaccagcaggaaacagaaatgttttattttacaaaatttaaagagtatgtgaatggcagtaacctcatcaccaagctgcaggccaagcacgatttactcaagcagaccctgggcgaaggggaaagagcagaatgcggcaccaccaggcccccctgtcttccccctaaaccacagaaaatgaggagacctaggcctctctcagtgtatagccataaactctttaacggcagtatggaagcattcattaaggattcaggacaagctataccgcttgtagtcgagagctgcatccgttacatcaatttatatggactccagcagcaggggatcttcagagtgccaggatctcaggtggaagtcaatgacatcaaaaattcctttgagagaggtgaagacccccttgtggacgatcaaaatgaacgagatatcaattcagtcgctggtgttttaaaactgtatttccgaggactggaaaacccactctttcctaaggaaaggtttcaagatttgatatctactattaaactggagaacccagccgagagggtgcaccagatccaacaaatcctcgtcacccttccccgcgtggtcattgtggtcatgagatacctcttcgctttcctcaaccacctctcccagtatagcgacgagaacatgatggatccctacaacctggccatctgcttcgggcctaccctcatgcacatccctgatgggcaggaccctgtgtcctgccaggcacacatcaatgaagtcatcaaaaccatcatcatccatcatgaagccatcttccccagcccccgggagctagagggacctgtgtatgaaaaatgcatggctggaggggaagaatattgtgacagcccacacagcgagccaggggccatcgatgaagttgaccatgacaatggcactgagcctcataccagcgatgaagaagtggagcagatcgaggctattgccaagtttgactacatggggcggtccccgcgtgagctatccttcaagaagggggcctcgctgctcctgtaccaccgcgcctcggaggactggtgggagggccggcacaacggcgtggatggactcatcccccatcagtacatagttgtacaggacatggatgatgccttctccgacagcctgagccagaaggctgacagcgaggccagcagtgggccattgctggatgacaaggcctcttccaaaaacgacctccagtcccccacggagcacatctcggattacggctttgggggggtgatgggccgagtgcggttacgatctgatggagcagccatccccagacgccgaagcgggggcgacacacacagcccgccccggggcctgggccccagcatagacacaccaccccgggctgctgcctgccccagcagcccccacaaaatccccctcacccgggggaggatcgagagccctgagaagcggaggatggcgacgttcgggagcgctggcagcatcaactaccctgacaagaaggcgctctccgaagggcactcgatgaggtcgacctgcggttccaccaggcacagcagcctaggggaccacaagtccctggaggccgaggccctggcagaagacatcgagaagaccatgagcacggctctgcacgagttgcgggaactcgagaggcagaacacggtcaagcaggcgccagatgtggtgctggacaccctggagcccctgaagaacccgccaggccccgtcagctcggagcccgccagtccccttcacaccatcgtcatccgcgaccccgatgccgccatgcgccgcagcagcagctcctccaccgagatgatgaccaccttcaagccagccctgtccgcccgcctggctggcgcccagctccgcccgccccccatgcggcccgtgcggccggtggtccagcaccggtccagcagcagcagcagctcgggcgtgggcagcccggccgtgacgcccaccgagaagatgttccccaacagctcagcggacaagtcgggcaccatgtgacctgcaggatgggccgcgccgccgtggcccgctgtggctcaccacggcccagggtggccttggtggcttccacgtgcttcccagtgaccctggccttggagggcagaggtccgtctgggagggtgtgtctgtgcagagctgaggcccgggcgctggctgcagctcacgtccagccatgggaatcccacggacctctcgcgtgtcaacagacgaccagaggagtgctggagctccagcagccccaaccacagcattccctaacatggaggcaaaataccacatggcttctcccgcatatcgtcactggaaacttcctctctcgacattctctctacatacgtatatgtgtgtgtatatcgatgtgtgcatatatacacatgtatacgtatgtacgtgtctgtaggtgtgtgtatatatatatatatttatgcatctatatacatatactagatctggacacacgcatactaagtgtatatagtatctcctttttctttttatgaaacttagatttacctcagatccatgccaccaaacatctcccaccgagttatttggtgggatttgcagggacttttctgggagaacttaaaggcccatagtaactgcgaatgaagcaatataccactaacctgcagaaaaacacaaacaaaaacagactcccactgtctccagaagtcgtggccttccagaacagtctgcccctcaaggaagggtggggcaggcagtacccccaagcaggctgctcccagaggtggggaacccttcataggaaatccccacccccgtccaccccagagaccctgcccttccacccggaggccaaaggccaactgtactcccaaaggcatgggagaaggttggcgagaagacccctgactaccacatccttgtgtttgtgtgtagagacgggggatagtgagaacctaagccccatcgtagcacagtattacatgtggttgggaaaaataaaaatacagtggtgtggaatactccaaaacctagaaatgctgtaggaataaatctgtggtaactatagaggtttaacttatatcattttcaaactatttaattttttcttttcctggttctactaattatactgtgtcagatttggaactaaacaggcaaggaggctttgagtcacatcgttttcattttaaatcaggctgtgatgcactgtggctggtgccgtcttgcatgaaacgcatgagccgtgagcgcccagttcagactggggccagggaggggcagtccttggcactttctgtcctagaggacactgtcagttgagttaatacaagtgacatagcttcccttccctcccccttcacccactccctccagaacatttagtgtagatgaaaatgtggtgatagaaatgggtgcatgatcttcacgtgtgacagccaggcctttgcctcttggccaagtaaagcccttccgggtcgctctccttcgattccattttacctcctcttctgatcacttccagagatgagctgtttctggataatggcacacgggcaaatctgtgtgccctgtgggccgctgttacttaccctctcctgcgagacccaggggcttttccctactgttcccacgcttcctctctctcgaggccactgaagtttggagtcaaaaggcccagagtctgagtcccagccctgagcacttaggagccttctgacttagggtttgtcactccacctcattgagcctgactgttctgctccataaaatagggtaataaaggtcaaacatcagtgagcaagctgtgtacactggaaaacactgaatcaatacaatgcgtttgtgattatcattagtaaggtaagtcttagatcagagccctccagcccttctttttgaaacctcccaatggcatttcagaagtgagcagtggaattttcctgccatcctaataagagccctggattccatcattaacatttcagcccattggatgaagtggtgccctctcctctggtcccccgcgaaaaggtaaatacacccaaagggagggacctagttaagtcactggcacctagataagttaggagggtaaagccactacctcgtctgaaggactggacttgacaccccacagtggaagggagcatcaggagaggaacaaaaaaagggatctcagggagaggccagtgtcaaacttgacctcccttgtttggcctagaatgaacccttctctttagctcctggatatgaaaggccatctgcttggagcacagaaagatattgccattttacagcttaagagagtaaggccttgggctgtgctgtgacctgcccaagatttgacactggctaggagcagaggctgcgtcaggctcttaaagtcatgtgtttgcatgctggatgctatactgtccagccaggacacaagacttctgatttctaccctcaagatactcccagatcctaaatccagtagcctcccaggcaaaatatagcaatctgccacaactgccagatgaaaagcaacaatcagagtagaaaaatctgttgcctgatatacataacaccaatcagaccgtgtggatttttctctgaattgactgattttgtttttttcttactgaaaatggacctgcctttcactgaattttctgagggcagagtcttagctgttttctttaagcaccttttttttttttttccattgggaaatggctgatgagttcacatttagggatgtacacacacagatggcagacgtctccccactcatccagccccagatctgagccttgacgcaggccaagtggaaaaatactttcccgcccccctcccctgttcccacttcctcatctggcactatgcatgtctcactcaccctccacagcactcagtcccatcgacgttcactgaacattggctttctctttctgactcctgcctgttttagtccactatatattgctgtatttgcttaaatgctggaaagtaactgttaaaatgtgaaattgtaatttttaaaaaggctacaattaaattttagccaatgccactcaccaaatctttgcacctagtagatagatcaatgtaaaaacaaatacctaactgtacagtgagtgtgggggaaatgtagtaacctagttagtagtcttcaatataaccaattgtacaaggggaagtggtgtttacctacttgttcatcaccattattgaaagccgtactgatcagttagttgacaacgggcatttttttttctttgcttcatggaatgatttcttttcttaaccttcgacttatcctgaggtcaagccttttgtctttatgtgtaaccgacgttcagtctattctaggaatgaaccagcaagttgttcatttaaaactgaccaaagacaattaattcctggtctagtttcctgggccttgtggctcagctgccactaaagagctttttggataaaattgagaacaagctgtgcttcctaccccactctccccgtccccttttattcccttttcctcttaaagagctgctctgagctgtgggattctatgaaaaattcttgcctttccttgtttcagtgctaacgatttctcacctcgaagcgccttttgaaccccggacagagtgcacaatcggagggaattgcgagcttgggaattagactttggagtcttttctctgaagtcaccaggccaggggtcaggagagagatggattcccaagggatgaaaggtttctattcaatgaagaaatcggagtgggaagagacacagggaaattgagccatattttggctatcggctggaaccagcagttcagagatctgccttataaacatttaaaaccggtttgtggtacacaaagaggaaccagtgtgggaaggggcctttatgtggggctttcttctctgttggagtcccttggagtgccttgttgggtatatttctctgtcattcaggaggcacgaatgtggaggacttctcgtgacctggtcgtgatgtggcattcagtgcatgtccacagctaatggaaaaacacgaggactcgggtaatggttcttcctctcagtctttctattcctaacttttcacacatccagatggttccacactagtgcaaatgcctcactctcctgagaaacccagaaagaagagtggctggctcacaaccatggggttagcccctgctgggctgggagtcggggtggcggccaggaggaaaggcagaaaggggtgagccgaggtgttgcctagctgattttctgctgtgcagagctaatgctgacatttcatgtcaacttccccggttctctggggtctcctctcctctgagcagccacatagaacattccccacatatccaaagctgcccaggggagccgagagaagggactttgctgtcaggtccaagccctcctgacctccctgagattgatctgccagtgtcctgctgtccctctgggactggccacatggccatcgctgccccttgttgacacctcctttctgtgtgagttgtccccggccaataacaaagctgttccttgaaccagaacaaccagagtgcacttttccttccttagacggaagtagatcctggctagggtttctgcccaggcccttgttcccggcagtgtgactgtttacatggtttggcaataggtttgattctgattgcttcagagtggctggtctattttgtttcctttggtttccttcctccccaaattgtgacaggaaaaacagaccaaaaccaccctaggaaattgctggttgcctgtccccacgtgatgataaatgttgccctcttctggatatcgtttctctaccttacgaccaaacgcccgtcctatagagtgtctgattggatcctctgtcgcgtattctgatggtgcctgctggtttgacgtggagctatcctgtgaaataaaacagcttaacttttctcaaa

SEQ ID NO: 182074 - DNA, 3929 bp, Homo sapiens
  Payload ID: 15856
  Gene Symbol: SRGAP3
  Gene Name: SLIT-ROBO Rho GTPase activating protein 3
  ENST ID: ENST00000618999
  CDS Start-End: 354-1361
gggccccagtgcccccgtccccaccaccagtctcatgctcctacccttgtgtgcccgcagagatccgcacgcagctggtggagcagttcaaatgtctggagcagcaatcagagtcgcgactgcagctgcttcaagacctccaggagtttttccgccggaaagctgagattgagctcgagtactcccgcagcctggagaagctggctgagcgcttctcctccaaaatccgcagctcccgggagcaccagttcaagaaggaccagtacctcctctcgcctgtgaactgttggtatctggttctgcatcagacccggcgggagagccgagaccatgccaccctcaatgacatcttcatgaacaatgtcatcgtccgcctctcccagatcagtgaggatgtcatcagactcttcaaaaagagcaaggagattggcctgcagatgcacgaggagctcctgaaggtgaccaatgagctctacacagtcatgaaaacctaccacatgtaccatgcagagagcatcagtgcggaaagcaagctgaaggaggctgagaagcaggaggagaagcagttcaataagtcaggagacctcagcatgaacctgctccggcacgaggaccggccccagcgccgcagctctgtgaagaagattgagaagatgaaggagaagaggcaggccaagtactctgagaacaagctgaaatgcacaaaggcccggaatgactacttgctcaatctggcagccaccaacgcagctataagcaaatactacatccatgatgtctctgatctgatcgattgctgtgatttgggcttccatgccagcctggcccgcaccttccggacctatctctcagctgaatacaacctggagacctctcgccacgaagggctggatgtcattgagaatgcagtggacaacctggattcccgaagtgacaagcacacagtcatggacatgtgcaatcaagtcttctgccctccactcaagttcgagttccagccccacatgggggatgaggtctgccaggtcagcgctcagcagcccgtccagacagaactgctcatgcgttatcaccagctgcagtccagactggccaccctcaagatagagaatgaggaggttaggaaaaccctggatgccaccatgcagacattacaggacatgctgactgtggaggactttgatgtctccgatgccttccaacacagtcgatcgacagagtccgtcaagtcggctgcctctgagacctacatgagcaagatcaacattgccaagaggagagccaaccagcaggaaacagaaatgttttattttacaaaggggcctgatgatgttttccccatttgccatccaagactctgatgaggcttaaacgtacgtgtgtgaaaactgtcaagtgctctgtggatacaagtcgagtgactcttaatggccaataggccaggtcctgggagcctaggaccatggaaaaggagagaggacaccacaacctcccaccagcccagtcgttccagaaacccatcaagaaatttaaagagtatgtgaatggcagtaacctcatcaccaagctgcaggccaagcacgatttactcaagcagaccctgggcgaaggggaaagagcagaatgcggcaccaccaggcccccctgtcttccccctaaaccacagaaaatgaggagacctaggcctctctcagtgtatagccataaactctttaacggcagtatggaagcattcattaagaggaagaagaaatgctcgaaccaggaaccaggattcaggacaagctataccgcttgtagtcgagagctgcatccgttacatcaatttatatggactccagcagcaggggatcttcagagtgccaggatctcaggtggaagtcaatgacatcaaaaattcctttgagagaggtgaagacccccttgtggacgatcaaaatgaacgagatatcaattcagtcgctggtgttttaaaactgtatttccgaggactggaaaacccactctttcctaaggaaaggtttcaagatttgatatctactattaaaaagttgccccatacccagtttcatttggggtgtttctcacagtactctgagagatatttgcagccaggaaagtgtcccaggagatggcaagagaagagaactggagaacccagccgagagggtgcaccagatccaacaaatcctcgtcacccttccccgcgtggtcattgtggtcatgagatacctcttcgctttcctcaaccacctctcccagtatagcgacgagaacatgatggatccctacaacctggccatctgcttcgggcctaccctcatgcacatccctgatgggcaggaccctgtgtcctgccaggcacacatcaatgaagtcatcaaaaccatcatcatccatcatgaagccatcttccccagcccccgggagctagagggacctgtgtatgaaaaatgcatggctggaggggaagaatattgtgacagcccacacagcgagccaggggccatcgatgaagttgaccatgacaatggcactgagcctcataccagcgatgaagctcctcgggctgatgggcagaaggcttctctggacaccaggactgaagatgaggagggacagagagaatagggcttgctgggtcagcgaagaagcagccatgggactcacccagtggggcttcctccccataagaaccaccccccagaaagtgctgcctcccacttctcagggtaaaggttcacagtggcccccagaatgcatgagtcagagctttgggtccccctccgagatgatccttcttctttttgttctttgtaaggctgctggtttctgggaatgacaaaggcaggaaaaatcattctgggaaggaagaagccacagtctgggagagccagtttcatgttccctgaaggctctcaaagtatcctgtgtgtattagtggggggtattgaatcaggggcactctttggtggaaaatcaattgcattttctaaatgttacattcttgccatccctggccaaacagtggcagaatagtgagctgcagagacagtcaaggggtcactgtgctcagaaaaaagagacctggagttgaagcacagagggagtccttatggtcatgtaatctgaggcaagccacatcacctctggcctctatttccttatctataaaatgggaatgacagcaccaagcaaattatggcatgggttaaaatgaggtgacatatgtgaaggagcctagcacagtgcctgggacagggaggtggataagaaacatcaatggactctgtatcaaacagacatccttcctaatcctgatagaaaaactgagtcctggagaattttcttgacctaactggcattggcagttactggtcattggcaaccagaacctcctgatttgtttacctgtttcctcttagacatttcatttaggggatcatcaatatctgtcttctttgctcttgacagcacccggtatgaatggaatccagcaggcctcaaaggtcaaatcaggcagagaaccatgagtccaggtctttgccatgcatgaatcagccaatgaatgccaaattgcaggaacaatttagttgtttgtgtatctgttgcctttcttgtctcaaagattctgtaccaactgggcgtggtggctcacacctgtaaccccaacactttgggaagttgaggtgggcagatcacttgagcccaggaattcgagaccagcctgggcaacatggtgaaactccgtctctacaaaaaaaaccaaaatacaaaaattagccaggcatggtggcatatgcctgtggtcccagcaactcaggaggctgaagtgggagaattacttaagcccagggaggttgaggctgcagtgagccatgattgtgccactgtactccagcctgagtgacagaacaaggtcctgtctc

SEQ ID NO: 182075 - DNA, 1173 bp, Homo sapiens
  Payload ID: 15857
  Gene Symbol: SCIMP
  Gene Name: SLP adaptor and CSK interacting membrane protein
  Uniprot ID: Q6UWF3
  ENST ID: ENST00000399600
  CDS Start-End: 106-522
actgtctctagcagtgggtgaaggcctgtgagtgaggaatgcctctcaccagctgtgcctgagctgcagcactccagccactgctgtctccttagctgctcacatatggatactttcacagttcaggattccactgcaatgagctggtggaggaataatttctggatcatcttagctgtggccatcatcgttgtctctgtgggtctgggcctcatcctgtactgtgtctgcaagaaatgggaaattgccaagcccctgaaacacaagcaagtagatgaagaaaagatgtatgagaatgttcttaatgagtcgccagttcaattaccgcctctgccaccgaggaattggccttctctagaagactcttccccacaggaagccccaagtcagccgcccgctacatactcactggtaaataaagttaaaaataagaagactgtttccatcccaagctacattgagcctgaagatgactatgacgatgttgaaatccctgcaaatactgaaaaagcatcattttgaaacagccatttcttctttttggcaaaactgaagagggttcacacaacttattttaaaacaatcaagaatggttgaacttcagtaggtctctgggccctgaaagccagtggtgattttatgaagctctataagataaagcacttcccaaaccttagatgaagacacccctgcgatcggatgactgcagccagaggagacacatgggtgctcggctctgaggacttagaggggtcagccttgtgctgttgaggaaactttccatgggaaggaccacggggctccatggctcccacctgtgggaaactactcatttcttggcattctttcccccttcattccctttggtttgcatggttctgagtgatattaaatctcagcatttggttgtgcagaccctcccaggctcccatccccagcaaggccctcaccaagcatgctggtctttaccctctcaccccacccacctcctgcactgtgaggctgtgggtgagttacagctgagtgctctcgtgcccaggttcccacaccacatctcgcgagtttgcaagggcagggagtaccttttgttctcgtgaaccctccccacctagacaccctgcaaaccccagtgcctttatatgatgtaggccaaattgaccatagagatttgag

SEQ ID NO: 182076 - DNA, 569 bp, Homo sapiens
  Payload ID: 15857
  Gene Symbol: SCIMP
  Gene Name: SLP adaptor and CSK interacting membrane protein
  ENST ID: ENST00000574297
  CDS Start-End: 106-498
actgtctctagcagtgggtgaaggcctgtgagtgaggaatgcctctcaccagctgtgcctgagctgcagcactccagccactgctgtctccttagctgctcacatatggatactttcacagttcaggattccactgcaatgagctggtggaggaataatttctggatcatcttagctgtggccatcatcgttgtctctgtgggtctgggcctcatcctgtactgtgtctgtaagtggcagcttagacgaggcaagaaatgggaaattgccaagcccctgaaacacaagcaagtagatgaagaaaagatgtatgagaatgttcttaatgagtcgccagttcaattaccgcctctgccaccgaggaattggccttctctagaagactcttatggagtcttgctctgtcacccaggctggagtgcaatggcacgatctcggctcactgcaagctccgcctcccgggttcatgccattctcctacctcagcctccggagtagctgggactacaggcacccgccaccacgcccagctaattttttgtatttttagtagagaaggagtttcaccg

SEQ ID NO: 182077 - DNA, 2155 bp, Homo sapiens
  Payload ID: 15857
  Gene Symbol: SCIMP
  Gene Name: SLP adaptor and CSK interacting membrane protein
  Uniprot ID: Q6UWF3
  ENST ID: ENST00000571800
  CDS Start-End: 69-440
aatgcctctcaccagctgtgcctgagctgcagcactccagccactgctgtctccttagctgctcacatatggatactttcacagttcaggattccactgcaatgagctggtggaggaataatttctggatcatcttagctgtggccatcatcgttgtctctgtgggtctgggcctcatcctgtactgtgtctgcaagaaatgggaaattgccaagcccctgaaacacaagcaagtagatgaagaaaagatgtatgagaatgttcttaatgagtcgccagttcaattaccgcctctgccaccgaggaattggccttctctagaagactcttatggagtcttgctctgtcacccaggctggagtgcaatggcacgatctcggctcactgcaagctccgcctcccgggttcatgccattctcctacctcagcctccggagtagctgggactacaggcacccgccaccacgcccagctaattttttgtatttttagtagagaaggagtttcaccgcgttagccaggatggtctcgatctcctgacctcgtgatccaccggcctcggcctcccaaagtgctgggattataagcgtgagccacttttttttgtttttgagatggagtctcgctctgtcccccaggctggagtgcagtggcgcgatctccactcactgcaagctccgcctcccaggttcacaccattctcccacctcagcctcctgagtagctgggactacaggtgcccaccaccacgcctggctaattttttgtatttttagtagagacggggtttcaccatgttagccaggatggtctaaatttcctgacctcatgatctgtccacctcggcctcccgaagtgctgggattacaggtgtgagacaccacgcccgtcccctatgaaggtgtcttagatagctcaggctgctgtaacaaaaataccatagactggggtgcttacacaacagaaatttgttttctcgttgttctgaagctggaagcccgagatgagggtgttggccgatttctgtgaggtttctggtgagggttctcctcctggcttgcagacagctgccttcttgctatgtccccacaaatggcctttccttggtgcattcaagctggggaagagcatcagggagtcagatttctggtgtttcttcttacaaggacactgatcctgttggatcaaggcctcatccctatggccacatatagcctcactgggggttaaggcttgaacacctgaattttggggggacacaaacattcagtctgtaacactaggatttatagatgcagcatcctgattattttatttttgaggcagagtcttggtttctcacccaggctggagtgcagtggcatgatttcagctcactgcaatctccacttcctaggtccaagctattttcctgcctcagcctcctgagtaactgggattataggcgtgcaccaccacactcagctaattttttgtatgtttagtagagacggggtttcaccatattgaccaggctcgtcttgaactcctgacctcaagtgatccacccgcctcgacctcccaaggtgctgggattacaggcatgagccaccacacacagccagcatcctgtttaaaagagatagccagaggccaggcacagtggcatatgcttgtaataccaacactttggaaggccagggcgggctgatgacttgagctcaggagtctgagaacagcctgggcaacatggcaaaatcctatctttacaaaaattagccagcgtgatggtgcacacttatagtcccagctacttggaaggctgaggtggggggatcgcttgagcctgggaggtctgcagtgagccacgatagcatcactgcacctggacgacagagtgagaccctgtctcaaaaaaaaaaaaaaaagggatggaaaagcaaaaagggggcagcataagtaccgacgcacccaatagcctgatataagggtgtaaattcatgttcaaatcccagcttggaacataaacagaaagaaacatggggtgtcactaggcctttcacttcctatcagaaaaactctgcctggttcctttgactggaatgttcttccttaagctctttgcctcgctggattttcctcatccttcagatgtcagctcagaagttaccacctc

SEQ ID NO: 182078 - DNA, 2383 bp, Homo sapiens
  Payload ID: 15857
  Gene Symbol: SCIMP
  Gene Name: SLP adaptor and CSK interacting membrane protein
  Uniprot ID: Q6UWF3
  ENST ID: ENST00000574081
  CDS Start-End: 106-543
actgtctctagcagtgggtgaaggcctgtgagtgaggaatgcctctcaccagctgtgcctgagctgcagcactccagccactgctgtctccttagctgctcacatatggatactttcacagttcaggattccactgcaatgagctggtggaggaataatttctggatcatcttagctgtggccatcatcgttgtctctgtgggtctgggcctcatcctgtactgtgtctgtaagtggcagcttagacgaggcaagaaatgggaaattgccaagcccctgaaacacaagcaagtagatgaagaaaagatgtatgagaatgttcttaatgagtcgccagttcaattaccgcctctgccaccgaggaattggccttctctagaagactcttccccacaggaagccccaagtcagccgcccgctacatactcactggtaaataaagttaaaaataagaagactgtttccatcccaagctacattgagcctgaagatgactatgacgatgttgaaatccctgcaaatactgaaaaagcatcattttgaaacagccatttcttctttttggcaaaactgaagagggttcacacaacttattttaaaacaatcaagaatggttgaacttcagtaggtctctgggccctgaaagccagtggtgattttatgaagctctataagataaagcacttcccaaaccttagatgaagacacccctgcgatcggatgactgcagccagaggagacacatgggtgctcggctctgaggacttagaggggtcagccttgtgctgttgaggaaactttccatgggaaggaccacggggctccatggctcccacctgtgggaaactactcatttcttggcattctttcccccttcattccctttggtttgcatggttctgagtgatattaaatctcagcatttggttgtgcagaccctcccaggctcccatccccagcaaggccctcaccaagcatgctggtctttaccctctcaccccacccacctcctgcactgtgaggctgtgggtgagttacagctgagtgctctcgtgcccaggttcccacaccacatctcgcgagtttgcaagggcagggagtaccttttgttctcgtgaaccctccccacctagacaccctgcaaaccccagtgcctttatatgatgtaggccaaattgaccatagagatttgagttttcacctaggttttctccccgtgcttgcaagttgtactgtaacaatggacaaaggacaaaagttaccttctgatttacacctagaagcatcattttgcaataggtgtgttgggggtgctacaggaaaaatacatttcccccaggacaaatcatggggaacaggaaagaaaaggggcatgtaacaatggcatatacaagatgagagttcagggggcttaatatcccctgtccatcattttcatcagtacttactcgagttctaggaaaacagcctcaagccccttccttccagatcactgtccctgggcatctgggaggaggcagaaggtccactgtgatgtgctgcagccaatgagatgggccagggacatgggcagatgtcttgttaaacaagtgtcctaatggggtcaacaaggcccgagtcagctttataggctcttagacctcatcaattccttctagctgatcgccagagccctaggacttgactcattctaactatactcacaagatgctggtttctaagtgacctctgggaaatctggcaaatgaacagccttgcagagagagcactgtgaacctggaaaggcctgagagtgactcagatttccctcaagagatgggaaaatgtgttcctcccattttcaagctttctccctcaatcaacgctggagcactggggacctgggcttcctccctggttctctctttccagactctatgaaggcttccaccttgctattaatacctccttgggaggccaaggtgggcggatcacctgaggtcgggagttcgagaccagcctgaccaacatggagaaaccccatttctactaaaaatacaaaattagtcaggcatggtcgcgcatgcctgtaatcccagctacttgggaggctgaggcagaagaatcgcttgaaactgggaggcggaggttgcggtgagccgagaacatgccattgcactccagcctggacaacaagagtgaaactccatctaaaaataaataaataaataaataaataaaccctccttatgttaggccagtagttatctaactatggccttatgggactctggtatcccaccagccaaagagaggactcttcccaaattatagaacaaaaataagccaaaggattggagtgtttcaaacacatgctttcgtcttataaatgttctgtaaaccc

SEQ ID NO: 182079 - DNA, 3793 bp, Homo sapiens
  Payload ID: 15858
  Gene Symbol: SLU7
  Gene Name: SLU7 homolog, splicing factor
  Uniprot ID: O95391
  ENST ID: ENST00000297151
  CDS Start-End: 389-2149
tagtcccctggtgaggcttaagctcttgtctgttctggtcttttttttttttttttaacttcctaaaattctccgattctaaaagaaagctcctaaatagaagccaaaaagtagccgcccaacttgaaactccccacaagccgggtaaatagcgcgatacgcagcagctagagttctcgcgtttcccacggcgcaggagcactggagggcccccctccgcccccggccccgccaggaaattagtgcgcatgtgccggtcatccggaagttaccgcagtggccgccggaattaggcgaaaagccggaagtaaacattacgagattggcttggattctgtcggatggacttggggctagctgcggcggggctggaggaggccagataaccatgtcagccacagttgtagatgcagttaatgctgcacccctatcggggtccaaagaaatgagtttggaagaaccaaagaagatgaccagagaggactggagaaagaagaaggagctagaagaacagcgaaaattgggcaatgctcctgcagaagttgatgaagaaggaaaagacatcaacccccatattcctcagtatatttcttcagtgccatggtatattgatccttcaaaaagacctactttaaaacaccagagaccacaaccagaaaaacaaaagcagttcagctcatctggagaatggtacaagaggggtgtaaaagagaattccataattactaagtaccgcaaaggagcatgtgaaaattgtggggccatgacacacaaaaagaaagactgctttgagagacctaggcgagttggagccaaatttacaggtactaatatagctccagatgaacatgtccagcctcaactgatgtttgactatgatgggaagagggatcggtggaatggctacaatccagaagaacacatgaaaattgttgaagagtatgccaaagttgatttggcaaaacgaacattgaaagcccagaaactccaagaggaattagcctcaggaaaattagtggaacaggctaattctccaaaacaccagtggggagaagaggaaccaaattctcagatggaaaaagatcataatagtgaagatgaggatgaagataaatatgcagatgatattgacatgcctggacagaattttgactccaagagacgaattactgtccggaatctcaggattcgagaagatattgcaaaatatttgaggaatttagatccaaattctgcctactatgatccaaaaactagagcaatgagagagaatccttatgccaatgcaggaaagaatccagatgaagtgagttatgctggagataactttgttaggtacacaggagataccatttcaatggctcagacacagttgtttgcatgggaagcctatgacaagggatctgaagtgcatctacaggcagatcctacaaagctagagctgttgtataagtccttcaaagtcaaaaaagaagatttcaaagaacagcagaaagaaagcatcctggaaaagtatggtggccaagaacatttggatgcccctccagctgaattgcttttagcccagactgaagactatgtggagtactcaagacatgggacagtcatcaaaggacaggagcgggctgttgcctgctctaagtatgaggaggatgtgaagatccacaatcacacacatatctggggatcgtactggaaagaaggccgatggggatacaaatgctgtcactcttttttcaagtattcctattgtactggagaagctgggaaggagattgttaactctgaggagtgtattataaatgagataactggggaagaatctgtgaaaaaacctcaaaccctcatggagctgcatcaagaaaaactgaaagaggaaaagaagaagaagaaaaagaaaaagaagaagcatcgaaagagcagttcagatagtgatgatgaagaaaagaagcatgaaaaattgaaaaaggcactgaacgcagaggaggcccgccttcttcatgtcaaggagaccatgcagattgatgagaggaagcggccttacaatagcatgtatgaaactcgagaacctactgaagaggaaatggaggcatatagaatgaaacgtcagaggccagatgaccccatggcctctttccttggacagtagcaactagtcagaagaccatccaagatagatgcagctgatacattcttttcagcttcttattgatgattgtagatagaaaaatccttgtttattcttcttgctgcctggctttaataaatatttcagatgcctcacagtaagttcactcctttccatactgaggaaacaagaaaagaagaagaggcacatgaagtgtgcttttgggaatagaatttaaaattggattaagattttatttccagttttttttatttatttatttttttttttgagacggagtcttgctctgtcgcccaggctgaagtgcggtggcgcgatctcggctcactgcaagctccacctcccaggttcacgccattctcctgcctcagcctccctagtagttgggactacaggcgcccgccaccatgctcagctaattttttgtatttttagtagagacggtttcatcgtgttagccaggatggtctcgatctcctgaccttgtgatccacccgcctcagcctcccaaagtgctgagattacaggcgtgagccaccgcgcctggcctatttccagttttatgtgagtcatgtaaaaaagccttggctctctacctattaagaatgtctctttctctgtatttattaagcttcaaactttattgcttcgatttttgtggccctatatttagtattagcacaccttggttttgagaaaaaaacagggctttgtttttttaaataattactagcaactctgtgactacatttatttttattttttttagagacaggatcttgctatgttgcccaggctagagagcagtggcttttcacagacaaagtcataatgccctgcagtcttgggctcaagcgattctctcttccttggcctctggagtagactaaatgtgttagtctttgaatggaaaacaactattttctcatcattgggtcaatattgactgatcagtagtaggtcttttaccattctggacataagtctaggtgtagaaatcctttcctttatcatagaggatatggtttacattaccgtttgttttcattgtgattgcccctatgtaacaatcatgaatattagattttttaaattgtagaatatcctaatatttatagccagcagctgttactttgtttgtaaaatttgcaaaaaaacaaaacctgaagttggtttattgaaagaattataaggatagcttctagggatattagtaatagattgccatgatcctgaagcctcttctcagaacactgtgaagataatactgacagtagaatcagtgaaaacagcctaacaaaacctctgacatcagtatatcaacttttaacagcccactcactggcttttctaaactaccaaaaaccacctgtaggatactgcattaagtcagcatctcagaaacagtggtgtgagtaactgagtcaaattgtcaagtactttggatatacatagtgtcgagctttagattggtatgaaattaaacagcaatgcaaatagatttaattcctatttactttaagaatgaaaaacaatgttcattttcctacctaaacagggtggttcaacataaaggctgatgttgtgtccgttttgtattttatcttttgttaaagatacataaatgacaatacttaactgtga

SEQ ID NO: 182080 - DNA, 807 bp, Homo sapiens
  Payload ID: 15858
  Gene Symbol: SLU7
  Gene Name: SLU7 homolog, splicing factor
  ENST ID: ENST00000520664
  CDS Start-End: 503-807
attacgagattggcttggattctgtcggatggacttggggctagctgcggcggggctgggtaagaaaatattgttagaacttgcgggcgacggggagttggggaacctgagaaaatgagtcgaaggctcctaattattggatatatcttcacgggggtgatgagccctcaggtgttgagggagcgaggacgggggaccgaaaagccactgtcctgagacccattcatggcactcgtgccctgccaggccaggcctgcgtcttcagggaaacagtcgggataactatgagagtgtcgcctttgtggcggtgcctcgaagaccttgagcaatccccggactgcgagcagggaaagctgcttccagtacccaaattgacagactgtatttcctcgccagaaaaatttacttgagcttcagtttttcctgttaagtcgagatgatccgacttcagtggggtatcatgcgggtataaatgaaaacatctataggaggccagataaccatgtcagccacagttgtagatgcagttaatgctgcacccctatcggggtccaaagaaatgagtttggaagaaccaaagaagatgaccagagaggactggagaaagaagaaggagctagaagaacagcgaaaattgggcaatgctcctgcagaagttgatgaagaaggaaaagacatcaacccccatattcctcagtatatttcttcagtgccatggtatattgatccttcaaaaagacctactttaaaacaccagagaccacaaccagaaaaacaaaagcagttcagctcatctggagaatggta

SEQ ID NO: 182081 - DNA, 568 bp, Homo sapiens
  Payload ID: 15858
  Gene Symbol: SLU7
  Gene Name: SLU7 homolog, splicing factor
  ENST ID: ENST00000521826
  CDS Start-End: 138-568
tttcttgcaaactttgtggcacgttttctgggaagaaaaaactaggatcgtgtaatattaaaaaataaatcgagaggctttttttttttgctctccatattattaagctgcatggactgagaggaggccagataaccatgtcagccacagttgtagatgcagttaatgctgcacccctatcggggtccaaagaaatgagtttggaagaaccaaagaagatgaccagagaggactggagaaagaagaaggagctagaagaacagcgaaaattgggcaatgctcctgcagaagttgatgaagaaggaaaagacatcaacccccatattcctcagtatatttcttcagtgccatggtatattgatccttcaaaaagacctactttaaaacaccagagaccacaaccagaaaaacaaaagcagttcagctcatctggagaatggtacaagaggggtgtaaaagagaattccataattactaagtaccgcaaaggagcatgtgaaaattgtggggccatgacacacaaaaagaaagactgctttgagagacctaggcgagttggagccaaatt

SEQ ID NO: 182082 - DNA, 577 bp, Homo sapiens
  Payload ID: 15858
  Gene Symbol: SLU7
  Gene Name: SLU7 homolog, splicing factor
  ENST ID: ENST00000519349
  CDS Start-End: 206-577
attacgagattggcttggattctgtcggatggacttggggctagctgcggcggggctggatggtgctgtattgaatttttggacggtactgcattggaggattttaagcttgggcagtaggacattgtattaatctgttttcacattgccaatgaagacatagcccagacctgccaatttactaaagaaaggaggccagataaccatgtcagccacagttgtagatgcagttaatgctgcacccctatcggggtccaaagaaatgagtttggaagaaccaaagaagatgaccagagaggactggagaaagaagaaggagctagaagaacagcgaaaattgggcaatgctcctgcagaagttgatgaagaaggaaaagacatcaacccccatattcctcagtatatttcttcagtgccatggtatattgatccttcaaaaagacctactttaaaacaccagagaccacaaccagaaaaacaaaagcagttcagctcatctggagaatggtacaagaggggtgtaaaagagaattccataattactaagtaccgcaaaggagcatgtgaaaattgtggg

SEQ ID NO: 182083 - DNA, 1091 bp, Homo sapiens
  Payload ID: 15859
  Gene Symbol: SLX1A
  Gene Name: SLX1 homolog A, structure-specific endonuclease subunit
  Uniprot ID: Q9BQ83
  ENST ID: ENST00000251303
  CDS Start-End: 169-996
aggagaggggcacgtaccggcgctacggcttcctgcaggctgcctccggatagtccccgagagcttgttccgaagcaagcaccctgcagccctagcgatccagccctcccctggaccctaggtcacggcaatcaaccccctgctgtggttcccgaaccccaaggcccgatgggtcccgcgggggtcgcggcgaggccagggcgctttttcggcgtctacctgctctactgcctgaacccccggtaccggggccgcgtctacgtggggttcactgtcaacactgctcgtcgggtccagcagcacaatgggggccgcaaaaaaggcggggcctggcggaccagcgggcgagggccctgggagatggtgctcgtcgtgcacggcttcccgtcctccgtggccgcccttcggtttgagtgggcttggcagcacccgcacgcctcgcgccgcctggcgcacgtggggcctcgcctgcgaggagagacagccttcgctttccacctgcgcgtgctggcgcacatgctgcgcgcaccgccctgggctcgcctcccgctcacgctgcgctgggtgcgcccagacctccgccaggacctctgcctcccgccgccgccgcacgtgcctctggccttcgggcctccaccgccccaggccccggccccaaggcgccgcgcaggtccctttgatgacgcggagcctgagccagaccagggggatccaggggcctgctgctccctgtgcgcccagaccatccaggatgaagaggggcccttgtgttgcccccaccctggctgcctgctaagggcccatgtgatctgcctggcagaggagtttcttcaggaagaaccagggcagcttctgcccctagagggccaatgcccttgctgtgagaagtcactgctttggggagacctgatctggctgtgccagatggacactgagaaagaagtagaagactcagaattagaagaggcacactggacagacctgctggagacctgatcctcagtgtccttaccccctcctacctcttttctgtgccacctgctgtgggtccagcaggtttttacttgagtacaataaaaagtctgagtcaa

SEQ ID NO: 182084 - DNA, 762 bp, Homo sapiens
  Payload ID: 15859
  Gene Symbol: SLX1A
  Gene Name: SLX1 homolog A, structure-specific endonuclease subunit
  Uniprot ID: Q9BQ83
  ENST ID: ENST00000345535
  CDS Start-End: 182-667
cccgcctccagacaggagaggggcacgtaccggcgctacggcttcctgcaggctgcctccggatagtccccgagagcttgttccgaagcaagcaccctgcagccctagcgatccagccctcccctggaccctaggtcacggcaatcaaccccctgctgtggttcccgaaccccaaggcccgatgggtcccgcgggggtcgcggcgaggccagggcgctttttcggcgtctacctgctctactgcctgaacccccggtaccggggccgcgtctacgtggggttcactgtcaacactgctcgtcgggtccagcagcacaatgggggccgcaaaaaaggcggggcctggcggaccagcgggcgagggccctgggagatggtgctcgtcgtgcacggcttcccgtcctccgtggccgcccttcgggatgaagaggggcccttgtgttgcccccaccctggctgcctgctaagggcccatgtgatctgcctggcagaggagtttcttcaggaagaaccagggcagcttctgcccctagagggccaatgcccttgctgtgagaagtcactgctttggggagacctgatctggctgtgccagatggacactgagaaagaagtagaagactcagaattagaagaggcacactggacagacctgctggagacctgatcctcagtgtccttaccccctcctacctcttttctgtgccacctgctgtgggtccagcaggtttttacttgagtacaataaaaagtctgagtcaa

SEQ ID NO: 182085 - DNA, 589 bp, Homo sapiens
  Payload ID: 15859
  Gene Symbol: SLX1A
  Gene Name: SLX1 homolog A, structure-specific endonuclease subunit
  ENST ID: ENST00000563995
  CDS Start-End: 137-382
ctgcaggctgcctccggatagtccccgagagcttgttccgaagcaagcaccctgcagccctagcgatccagccctcccctggaccctaggtcacggcaatcaaccccctgctgtggttcccgaaccccaaggcccgatgggtcccgcgggggtcgcggcgaggccagggcgctttttcggcgtctacctgctctactgcctgaacccccggtaccggggccgcgtctacgtggggttcactgtcaacactgctcgtcgggtccagcagcacaatgggggccgcaaaaaaggcggggcctggcggaccagcgggcgagggccctgggagatggtgctcgtcgtgcacggcttcccgtcctccgtggccgcccttcggctgtgagaagtcactgctttggggagacctgatctggctgtgccagatggacactgagaaagaagtagaagactcagaattagaagaggcacactggacagacctgctggagacctgatcctcagtgtccttaccccctcctacctcttttctgtgccacctgctgtgggtccagcaggtttttacttgagtacaataaaaagtctgagtcaa

SEQ ID NO: 182086 - DNA, 1165 bp, Homo sapiens
  Payload ID: 15860
  Gene Symbol: SLX1B
  Gene Name: SLX1 homolog B, structure-specific endonuclease subunit
  Uniprot ID: Q9BQ83
  ENST ID: ENST00000330181
  CDS Start-End: 243-1070
gctgaatggtacgcgctcgccgactggacagcagtctggcttccgcggtcggacttctacacccgcctccagacaggagaggggcacgtaccggcgctacggcttcctgcaggctgcctccggatagtccccgagagcttgttccgaagcaagcaccctgcagccctagcgatccagccctcccctggaccctaggtcacggcaatcaaccccctgctgtggttcccgaaccccaaggcccgatgggtcccgcgggggtcgcggcgaggccagggcgctttttcggcgtctacctgctctactgcctgaacccccggtaccggggccgcgtctacgtggggttcactgtcaacactgctcgtcgggtccagcagcacaatgggggccgcaaaaaaggcggggcctggcggaccagcgggcgagggccctgggagatggtgctcgtcgtgcacggcttcccgtcctccgtggccgcccttcggtttgagtgggcttggcagcacccgcacgcctcgcgccgcctggcgcacgtggggcctcgcctgcgaggagagacagccttcgctttccacctgcgcgtgctggcgcacatgctgcgcgcaccgccctgggctcgcctcccgctcacgctgcgctgggtgcgcccagacctccgccaggacctctgcctcccgccgccgccgcacgtgcctctggccttcgggcctccaccgccccaggccccggccccaaggcgccgcgcaggtccctttgatgacgcggagcctgagccagaccagggggatccaggggcctgctgctccctgtgcgcccagaccatccaggatgaagaggggcccttgtgttgcccccaccctggctgcctgctaagggcccatgtgatctgcctggcagaggagtttcttcaggaagaaccagggcagcttctgcccctagagggccaatgcccttgctgtgagaagtcactgctttggggagacctgatctggctgtgccagatggacactgagaaagaagtagaagactcagaattagaagaggcacactggacagacctgctggagacctgatcctcagtgtccttaccccctcctacctcttttctgtgccacctgctgtgggtccagcaggtttttacttgagtacaataaaaagtctgagtcaa

SEQ ID NO: 182087 - DNA, 762 bp, Homo sapiens; identical to SEQ ID NO: 182084
  Payload ID: 15860
  Gene Symbol: SLX1B
  Gene Name: SLX1 homolog B, structure-specific endonuclease subunit
  Uniprot ID: Q9BQ83
  ENST ID: ENST00000351581
  CDS Start-End: 182-667

SEQ ID NO: 182088 - DNA, 400 bp, Homo sapiens
  Payload ID: 15860
  Gene Symbol: SLX1B
  Gene Name: SLX1 homolog B, structure-specific endonuclease subunit
  ENST ID: ENST00000567248
  CDS Start-End: 136-400
atctccgcggcggaactcagggaaggagctagctggggcgggggtgatgatccaggctgggttccagcatagggctcttggtgggcacgctggggtcgggtggaatgcaggagagagaggaggtgggacagggagatggtgctcgtcgtgcacggcttcccgtcctccgtggccgcccttcggtttgagtgggcttggcagcacccgcacgcctcgcgccgcctggcgcacgtggggcctcgcctgcgaggagagacagccttcgctttccacctgcgcgtgctggcgcacatgctgcgcgcaccgccctgggctcgcctcccgctcacgctgcgctgggtgcgcccagacctccgccaggacctctgcctcccgccgccgccgcacgtgcctctggcct

SEQ ID NO: 182089 - DNA, 6062 bp, Homo sapiens
  Payload ID: 15861
  Gene Symbol: SLX4IP
  Gene Name: SLX4 interacting protein
  Uniprot ID: Q5VYV7
  ENST ID: ENST00000334534
  CDS Start-End: 181-1407
gcgaaagtgcttcccttaagcttctgaaggttggctgcagttccggctacctgtgtagtccgagtttccacagccaggtactactccgccagtgaccctggacagtaacaaaacatataaagcccgagcccaaaccccgccaccatcataggtctgtagttactgtggaatcaataagccatggcatctaagaaatttgctgttaaatgtgggaattttgctgtcctcgtggatcttcatatcttgccacaaggttcaaacaaagatacaagctggttttctgaacagaagaaagaggaagtctgtttactgttaaaagaaaccattgattcaagagttcaggagtacttggaagttcgcaaacagcacaggccatcaaatgcagaattcacaagatccaatcccttgtccttaaaaggttatggctttcaaatcacagcctatttcctcaagagagggatacgccttcgctgcatcaggagcacacagaatgctgaactctgtgtattccctgacagatttgtggtttgtgtcagtcagcttgcattcagtcgtgatcttttagcaagtcagaatgaagatttgacagaaagagttctccatggagtgtctgattactttgctgagtgtgcagagagttcacttcctcccagtgcaaagctccggagaaatgctctgaaagaaattgtgaaaagaactgaaacaaaaagcagtgtcacgagcaaatcgcagaccagaagagacactgtggaaacatctagtgactcagtgattgcagagatagcaaggaggaggaatgatggtcaggcttcctccagtcccccatcagaatccatgggacaagcaaaggattccataaaggcagctgagagccactgggggcttcctgttcaaaagctggaaaaagttaatcagacccagccagaagacactagtggccagcaaaaacctcatcctggggagcggttaaagacagggcttctaagcaggagccccgtctgtagctgtgagtcagcatcaccatgtccaaaacaaagtccacgagtggccaaaacccaacagaaacgcaggaactgcagctctgcggaagacttcgaccaccacgggagagtttctcttggaagtgatcgattagtcccgagagaaataatagtggaaaaaagcaaagctgtcagggttttgccagcttcagagttgtcagatccagggttacttttgaaacaagatttggcaaaaaccacgtctaaggaagagttgcatgttttggaaagtctctcctccagacatcttatgaaaaataacccagggcaggcacagcaaaccggcttagccacaaacactgaaagattatctacaattcagaacagcccaaccaagaaaagaaagaaatacgaaagaggccattaacaccgaagaggtttgtaccgttggagttgaggacatagtggccaaacctgtgacaagagagctgcgaatatagatgccgggattttaaaggaattaattagaatgactaatttaaataggaagtgtgttatctgtgttatggctatggtttgttttcaaagcatttcaaaccgggaggctatatgcttgttctaacagcgttgcttctttatcattgtattttatgactgtcttcagagaattagtaatgacaaagagccatccaccttgtcagggaggagactgtgcaaggactgcatgaagaaactgatcatgagccccttcttggcacatcactgtgcagaccacacaatggaccgtgcaaagacagtgctgccgtgctgcctttcagctccaggggtacaatccatccccctgctcctcagcctgagtaggagggcagtgaaagaacaagctagtggttcttagcgcgtggtcctgggaccagcttcgttgtctggaaatgtgctagaaatgtggttattgggccctgccccatgctgagtaactgcctttgggtgattctgaaacatgctcgcgtttgagaaccactggactaatagaacactccccagtgcttcctgcagcctggttgccatggcctccagctcaccagttggggccagatgtgcacatgcatcccctcggactccctcaaactcgtaaaacacttgggtttggtgtatgggtcactctcttccgggttctacagtatggcagccatggcacccatgaaggtgttactttcccttataattgttgaagtcgatgggcgattctgcccaaccttaggagaagacatcagagaggctcgttgttgcctgtagctcaagcatgtcccagtccctgctcttgcacccacctccaggattttggtttgggacagactataacctaacaggaactcagtgaccaggttccagtttcccagttggaaggcttcgcaggcagttcaaatttcaagatgggagccttccctttacaatgtcacccactgtctccagtgggcttgatgaaatgtcacatagtgaattgtagcaatgacttattttggatggacacccgctaaaagtttccaataaccgaatttcactctaaaagaggaaagaaacaatattcaaggtccattcattcaatacatcttttttttttttctgttcaacatggggtggtcctttgaaatggcacctcccctaagtaataaggaaaaccaagtatattccctaaagtgttgaagttagcagaaaaatcacccagaaaagcccaaaacaatgacaagagtacagaaacaggcatagtgtaggttcatgcttgagatggattagtggtttattccatcccgttctatcctttcccgtatctcctgtccccacttgttaagaccagtaagactcatgaagcagcagctatatttcatggcaccattttgggtcatgaaattccatcttggtcaccaagcctgactgtggtggtagatactgttactttaatgttccaaaccctgcctagaaacctgttcctgtcccatgatcccagcctcaccacccccacttgaaacagcccttcctactggtatcctgtcctcttccctcttggcttttttcctgctcccagcggaacccagtcaggggattctataggagaagagggagcccaacagaatactaacttcagtggagctgactctgcttatacaataggggtgggctgcacagagtggaaaccgagtacctggtagaatgtgcatttccatggcccactgtaggcgcctctcttagagcaaacagtattttaggtgtgctctttattgaacacaggaccacagtgtgtcactgaatcttcttaaacagaagcaattagaacgatttagatatagggagggcacaagtaataagtaacccaggggatagaccaagaagcagctctctggaagagtctggaattaaaaagacggctgtactagaacagtagccactgcctgctccagaactaggggggagatatttgagctggagccaccagagaacatttctattgagaagtttttatttgtttgttctgttggttttttgttatttctgttttcttctaatctttctctgaagtatcactctggtattgagaaatttttatttcattagctaacctgggcttggtggttaaggctagtacttgtacttagaatgattctctgtcaggaaaagtcttggctttagagtttgttatagttggggatataacaattactgtgatcgaagagaaaaaatagcacctttggttgtagatagatgtagttttcctcacagccctcacgtcccttcatgtaaaagggattttaacaggatttacagagggaatggctctcagttcccacactgtgacatgtgtttgaggaattttgcctttaagcatttttcttgcacatggctgaaacacccctggctctcttgttatttgagtggttgcatgattctttggatatttggaagtacaaaggggtaaatggatgccaggggttttttgttgttgttgcttattaggtaggatatgaagagttctcactgttgggaatggtatgtgttttgacattctttttttttttttttttttttttgagacagagtctcgctctgtcgcccaggctggagtgcagtggggcgatcttggctcactgcaagctccgcctcctgggttcacgtcattctcctgtctcagcctcctgagtagctgggactacagacgctcgccaccacgcccggctaattttttgtatttttttttttttttttttttttttagcagaaacgggttttcaccgtgttggccagggtggtctcgatctcctgactcgtgatccgcccgcctcggcctcccaaagtgctgggattacaggtgagagccaccgcacccggcctgttttgacattcttaatgatcttaataatttggcatctgaaagtctgaaacagtgtcagtattgttagtcaaaaagaacaagttcttcaaccacttgcgtagtaccccaaattatattcaagtccctgtgactccaatgcttggagaagtcattgatatgatttgattaatgttataactttgaatttcctaactttctcagcggcatagattctaagccacttccatgtgctttcagatggcatcttaatagattggtgttgaggttattttaatgtccataaacaagaaaggtctgggaacaatctgtatgatttttctttcacattttcttatctttgccactggaggttaactgtcgtccagatatgcatatgaattgtgaaatgcaaagaagcaaacatttgggggtaggggagtaagtgctgtagttcttttgttcacttattttaatactatagaagtgtatttcattttataaaaagcaagaatcataaaaaccctctgtattttgatttatgaagaatatagcttctctctgaagtatctcaagatatatcttggggaccacaatgggatcacagtgtaattgtttgctgttggtgtcatgtttggattttagcatggtttgttatgcatgtcagtggcctctgatttcagaaagagcttggcgagggcagaacacataagggaaggaaacctctgctcaagagagtggcctgggatcacagtgtcgtcattcccaatttccttgaattccttcttggcagaccttactgtaatattacacaaaactgtaatgagtggccctcctttggaggtaacagatgcctttcctaagaactcaaagttctcttttcagcgtgctgtgacttgaatatggaaatcattttaatttcttcttttctcttatggggaaatttccatgcttggtttgtcaagacaagagaattcattccttattattgaaacattaatgaactgaaacacgttgaagcaagtaaaaaatcaaaattaggttggtttatcttaaatagttaaaagccttccttagtacaaaataaattaagcattgtaaaacgaagttaattcaggtaattactcagtacagaaatctaaccgtatatatcattggtattgcaatttaagggtataattaaattctcagaaatctgcaggactcactctaatttgctttctatatttatttacaagacagggaacaaatatgtgtcaatgtgcagcttaacagaggggacttgaatggataaaattatctttaattatctagagctacccagtactgggcttgaatttaatcatagtcaaatgtttcctctggcagcataatattaccatacaccatattaccttataattgccattacagttccttatcaaaaatgttaattctttgcttgagcaaaaatcaataaaaccttatgtttgaccctaaagtatttgatcagggaacagaaggtgtgaattggacagatcccccgaataactttcttcaatcaagttgaaaaaccaaacagctatgtaagtccccaggagagctctttttcccttatcttctcatttgttttgttataaactgtttaaatagttcaaatggttgtgcatgcctaggggatgaaacctatgtaatagaaatgtactgttttatgaataaggagtaaaattgttttaaaaaattaa

SEQ ID NO: 182090 - DNA, 597 bp, Homo sapiens
  Payload ID: 15861
  Gene Symbol: SLX4IP
  Gene Name: SLX4 interacting protein
  ENST ID: ENST00000488816
  CDS Start-End: 1-236
gttatggctttcaaatcacagcctatttcctcaagagagggatacgccttcgctgcatcaggagcacacagaatgctgaactctgtgtattccctgacagatttgtggtttgtgtcagtcagcttgcattcagtcgtgatcttttagcaagtcagaatgaagatttggataaccagagcaccattgcctgcttccttcttcctgaaggaaggggaaaatccacccttcacaattaaagtcctggcactgagccacatccagaggaggctgatctatgccctcccaataccaggggtgtcccagacagaagcatctggcagctacccaaggaattctggggtcctgcagaatccaagtttacaaaccaccagaacaaggttttgcttcaggatagtgtttgactccactgctgcgaaatgactgtctcctggctagtaggatctagatttctccctccctttgaccccaccttgtggaaacccagctgtctactggcagacattggtgagaaagcggagctacgctagggcagggagatgtcatggaaacctcaactcttcgctgtccgggtccttcaggccacctccccaatgagcc

SEQ ID NO: 182091 - DNA, 7307 bp, Homo sapiens
  Payload ID: 15862
  Gene Symbol: SLX4
  Gene Name: SLX4 structure-specific endonuclease subunit
  Uniprot ID: Q8IY92
  ENST ID: ENST00000294008
  CDS Start-End: 642-6146
gcgagtctccgttaagaaggtgccgcggcggcgccggagatgtgtaattaagtgaaccatatatgtttcatcatcatggagatcttggagaattatctgagcaccaggttcatatgtattcgatctcagaggcatctattggacaacaaaacactctttcagttgtgaactttatttatttattattattattttttgagacagagttttgctcttgttgcccaggttagagtgcagtggcacgatctcggctcactgcaatctccgcctcccaggttcaagcgattctcttgcctctgcctcccgagtagctgggattacaggcatctgctaccacgcctggccaattttttgtattttcagttgaaacgaggtttcaccatattggccaggctggtctcgaacttctgacctcaggtgatccaccccccgcctcgtcctccaaaagagctgggattacaagtgtgagccaccgcgcccggcccagttgtggactttaacagagggaagctttaaacatgtttaaccacaggcccaatttgaacaaagatacttcaatcattatagagaggaaaacagtactttttgttcaattgtgcaaactctccaagtatctaatggagaagtagagaagaaccctaatgaaactgagtgtgaatgaggctcagctaggcttctacttgggttcactttctcatctgtctgcctgtcctgggattgaccctcgctcctctgaagaccagcctgaaagccttaaaactggtcagatgatggatgagtctgatgaggactttaaagaactctgcgctagctttttccaaagggtgaaaaaacatggaatcaaggaagtgtcaggagaaaggaagacacaaaaggctgcctcaaacggcactcagataagaagcaaattgaaaaggaccaaacaaactgctaccaagaccaaaacccttcaaggccctgcagagaagaaacctccgtctggcagccaggcccctaggactaaaaagcaaagggtaaccaaatggcaagcaagtgaaccggcccactctgtgaatggggaggggggtgtgcttgcctctgctccagatccacctgtgctccgggaaacagcacaaaacacccagacgggtaaccagcaagaaccatcgccaaacctttccagagagaaaaccagagagaatgtgcccaacagcgactcccagcctcctccttcctgtttgacaacagcagtgccaagtccctccaaaccccgcacagcacaattggtcctacagcgaatgcagcagttcaagagagcagaccccgagcgtttgagacacgcttcagaagagtgctccctcgaggctgcgcgggaagaaaatgtcccaaaggatcctcaagaggagatgatggcggggaatgtgtatgggcttgggccccctgccccagagagcgacgctgcggtggccttgaccctgcagcaggagtttgcacgggtaggagcatcggcacatgatgatagcctggaggaaaagggtttgttcttctgccagatttgtcaaaagaacctctcagccatgaacgtgacccgaagggaacagcatgtgaacaggtgcttggatgaagctgaaaagacactaagaccttctgtgcctcagatccctgagtgcccgatttgtgggaaaccgtttcttaccttaaagagcagaaccagtcacttgaagcagtgtgctgtgaagatggaggttggcccccagctcctgcttcaggctgtgcggctgcagacagcacagcctgagggtagcagcagcccacccatgttcagcttcagtgatcacagtagaggtctgaaacggagaggacccaccagcaagaaggagccacggaagaggcggaaggtggacgaggcaccgtccgaggacctgctggtggccatggctctgtcccggtcggagatggagccgggtgcggctgtaccagcgctcaggctggaaagtgccttttctgagaggataagaccagaagcagagaataaaagtcgcaagaagaaacccccggtatcccccccattgttgttagtccaggactctgaaaccacaggccgacagatagaggaccgtgtggccctgctcctctctgaggaagtggaattgtctagcacgccaccacttcctgccagcaggattttaaaggaagggtgggaaagagcgggccagtgtcctcctccacctgaacgcaagcagagctttctgtgggagggcagcgcactgactggggcctgggccatggaggacttctacacggccaggctggtccctcctctcgtgccccagcggcctgcccagggccttatgcaggagcccgtgccgcctctggtgccacctgagcactcagagctgagcgagcgaaggtcacccgctctccacggcacccccactgcaggctgtggctccaggggcccgtcgccttcggccagccagagggagcaccaggccctgcaggacctcgtggacctggcgagggagggactgagcgccagcccgtggcccggcagtgggggcctggctggctcggaagggactgcagggttggacgtggtgcccggcggccttcctctgactgggtttgtggtgccatcgcaggacaagcacccggacaggggcggccgcaccttgctctccctcgggctgctggttgctgactttggcgccatggtcaataacccacacctgagtgatgtccagtttcagacggacagcggggaggtgctttacgcccacaagttcgtgctttatgcccgatgcccgctcctcatccagtatgtgaacaatgaaggcttctccgctgtagaggacggggttctgacccagcgtgtcctgctgggtgacgtgagcaccgaggccgcccgcacgttcctgcactatctctacactgcggacactggccttcctcctggccttagctctgagctgagctccctggcccacaggtttggcgtgagtgagctcgttcacctgtgcgaacaggtgcctattgccactgactcagagggcaaaccatgggaggagaaggaagcagagaattgcgaaagcagggccgagaatttccaggaactcttgaggtcaatgtgggcagatgaagaggaggaagcggagactttgttgaaatccaaggaccacgaagaagatcaagaaaacgtgaatgaagcagaaatggaagaaatttatgaatttgcagctactcagcgaaagcttctccaggaagaaagggcagcgggtgccggcgaggacgctgactggctggagggtggcagtccggtttctgggcaactcctagcaggtgtccaggtgcagaaacagtgggacaaggtggaggagatggagccgttggagccaggaagagatgaggccgccaccacctgggagaagatgggacagtgcgctctcccgccaccccagggccagcactcaggggcacggggagcagaggcccctgagcaggaggcgccagaggaggcgcttggccattccagctgctccagcccttccagggactgccaggcagagagaaaagaaggctctcttccgcactcagatgatgccggggattacgaacagctcttctcatcaactcagggagagatctcagagccgtcccaaataacaagtgagcccgaggaacaaagtggcgctgtcagggaaagggggctggaggtttctcatcgcctggctccctggcaggcatctccaccgcacccgtgccgcttcctattggggcctccccagggcgggagtccccgcgggtctcatcacacaagtgggtcgtccctgtcaacaccccggtcccgtggcggaacttcccaggtgggctccccaaccttgctgtctccagctgtgccatcaaagcagaaaagggacaggagcatcctcacgctgtctaaagagccagggcaccagaaaggcaaagagcgtcggtccgtgctggagtgcagaaataagggggtcctgatgttcccagaaaaatctccgtctattgacctaacccagtcaaatcctgaccattcgagctccagatctcagaaatcttcatccaaactgaacgaagaagatgaggtcatcctcttactggactcggatgaggagctggagctagaacaaaccaaaatgaagtccatttctagtgatcctctggaagaaaagaaagctctagaaattagccctaggtcctgtgagctgttttccatcattgatgttgatgcagatcaggaaccttcccagagcccaccaagaagcgaagctgtgctgcagcaggaggatgagggggcgctgccggagaatcggggctctttgggcaggagaggggctccctggctgttctgtgaccgtgagagcagccccagcgaggccagcaccacagacacctcgtggctggtgcccgccaccccgctggccagcagaagccgtgactgttcttcccagacccaaatcagcagcctcaggagcgggctggccgtgcaggcggtgactcagcacacgcccagggcctcagtaggaaacagggaagggaacgaagtcgcacagaagttttctgtcatcaggccccagacaccaccgccccagacaccgtcctcatgcctcactcccgtctctccaggaacttctgacggcagaaggcaaggccacagaagcccttcccgtccccaccccgggggccacccgcactcctctccgctggctccacatcccatctcaggggaccgcgcccacttcagcaggcggttcctgaaacactcgccgcctgggccaagcttcctgaaccagaccccagcgggtgaagtggtggaagtcggagacagtgacgatgagcaggaggtggcctcccatcaggccaacagaagccccccactggacagtgaccccccaattccaattgacgactgctgctggcacatggagcccctctcgccaattcccattgaccactggaacctggagcggaccggccccctgagcaccagcagccccagccgcaggatgaacgaggccgccgacagccgtgactgtcgctccccgggactcctggacaccacccccatccgaggaagctgcactacccagaggaaattgcaagagaagtcctcgggcgcgggctccctggggaatagcaggccgagctttctgaattcggctctgtgggacgtttgggacggggaagagcagaggcctccagagacccctcctccggcccagatgccaagcgctggtggagctcagaagcccgaagggttagagacacccaaaggtgctaatcggaagaagaacttgccccccaaagtgcccataacgccgatgccacagtattccattatggagacgccggtgctgaagaaggaactggataggtttggagtccgccctctgcctaaacgccagatggttctgaagctgaaggagatattccagtacactcaccagaccctggactcagactccgaggacgagagccagtcctcacagccgctgttgcaggcgcctcactgccagaccctcgcctcccagacctacaagccttcaagggcaggggtccatgcccagcaggaggccaccacaggacctggggcccataggcccaagggacctgctaagaccaagggcccccgacatcaaaggaagcatcatgaaagcatcacacccccaagcaggtcgcccaccaaggaggcacctccaggcctcaatgatgacgcccagatcccagcctctcaagaatccgtggccacctctgtggatggcagtgacagctccttgagctcacagagttcttcctcctgtgagtttggagcggcatttgagtctgcaggtgaagaggagggcgagggggaggtcagtgcctcgcaggcagccgtgcaggcggcggacacagacgaggcgctgaggtgctacatccgctccaagccggccctgtaccagaaggtgctgctgtaccagccctttgagctgcgggagctgcaggcagagctgaggcagaacggcctccgtgtgtcctcgcgcaggctgttggacttcctggacacccactgtatcaccttcaccactgccgccacccgcagggagaagctccagggcaggaggcggcagcctcggggcaagaagaaggtggagcggaactgatggggccatcccgaccccaccccaacctgccatcagcagcccccacccccgccatttgcagggaggacctgggacacccagcgtgggtcaggcctccacaggcatttctgggcctggggaccacatcagctctgcgctgtgatgatgaccacagcccaatccagggcttcctcctctgggctctgctttctagggtggcatttggagcatgtcacccactggatttacagactccagccccttcctctgtccgtgctcacagtgtgtctccctttttggttttctttttttttttctttttgagacagtcgtgctgtgtcacctaggctggagtgcagtggcacaatctcggctcactgcaacctccgcctcccgggttcaagcaattctcctgcctcagcctcccagatagctgggactacaggcacacgctgccacgcccagctgattttttatattttagtagaaacggggtttcaccatgttgctcaggctggtcacaaactccagagctcaggcaatccgcctgctgcggcctcccaaagtgctgggatcacaggcgccagccactgcgcccggcccagtgtgtctcccttaacccaagagggccctcagctgtcccagggggcagtgggccatcaccagctggccagggcatggcctattctgccacatttgccaccctctgagcccaccagtcctgggcacagctgccctacatgtctgtcctgagatggacgtcaggtccagcctgccccggcagcccgggcccgtcctcctcagcactcaggccaaccccagccaccgccagcctgagaccaggtgtcctgaggctccctgcactgccacagcccagatgcagttctcctgacccagccgtgctacccggacacttgtcattgttaccagcagtctccaaactggacagtgcacaagggcccagaacaactctgatgccaccacaaaacaaacatgttcactagcggattccattctttgggttaaagctgcctccagcctcaggagcagtgtggaggaagatgagggccaggaaagaaggaaaccttggtttctccatccttgtgaatgtcctcgtctgtttcaaatacagtgcagtcagttttatatgatgtgcaataaaccaaaaaggctttattaaaa

SEQ ID NO: 182092 - DNA, 1966 bp, Homo sapiens
  Payload ID: 15863
  Gene Symbol: SMAD1
  Gene Name: SMAD family member 1
  Uniprot ID: Q15797
  ENST ID: ENST00000302085
  CDS Start-End: 424-1821
gggtattggcagctgaggagtggaggctgggcagctccgactccctgacgccagcgcgaccagatcaatccaggctccaggagaaagcaggcgggcgggcggagaaaggagaggccgagcggctcaacccgggccgaggctcggggagcggagagtggcgcagcgcccggccgtccggacccgggccgcgagaccccgctcgcccggccactcgtgctcccacacggacgggcgcgccgccaacccggtgctgactgggttacttttttaaacactaggaatggtaatttctactcttctggacttcaaactaagaagttaaagagacttctctgtaaataaacaaatctcttctgctgtccttttgcatttggagacagctttatttcaccatatccaaggagtataactagtgctgtcattatgaatgtgacaagtttattttcctttacaagtccagctgtgaagagacttcttgggtggaaacagggcgatgaagaagaaaaatgggcagagaaagctgttgatgctttggtgaaaaaactgaagaaaaagaaaggtgccatggaggaactggaaaaggccttgagctgcccagggcaaccgagtaactgtgtcaccattccccgctctctggatggcaggctgcaagtctcccaccggaagggactgcctcatgtcatttactgccgtgtgtggcgctggcccgatcttcagagccaccatgaactaaaaccactggaatgctgtgagtttccttttggttccaagcagaaggaggtctgcatcaatccctaccactataagagagtagaaagccctgtacttcctcctgtgctggttccaagacacagcgaatataatcctcagcacagcctcttagctcagttccgtaacttaggacaaaatgagcctcacatgccactcaacgccacttttccagattctttccagcaacccaacagccacccgtttcctcactctcccaatagcagttacccaaactctcctgggagcagcagcagcacctaccctcactctcccaccagctcagacccaggaagccctttccagatgccagctgatacgcccccacctgcttacctgcctcctgaagaccccatgacccaggatggctctcagccgatggacacaaacatgatggcgcctcccctgccctcagaaatcaacagaggagatgttcaggcggttgcttatgaggaaccaaaacactggtgctctattgtctactatgagctcaacaatcgtgtgggtgaagcgttccatgcctcctccacaagtgtgttggtggatggtttcactgatccttccaacaataagaaccgtttctgccttgggctgctctccaatgttaaccggaattccactattgaaaacaccaggcggcatattggaaaaggagttcatctttattatgttggaggggaggtgtatgccgaatgccttagtgacagtagcatctttgtgcaaagtcggaactgcaactaccatcatggatttcatcctactactgtttgcaagatccctagtgggtgtagtctgaaaatttttaacaaccaagaatttgctcagttattggcacagtctgtgaaccatggatttgagacagtctatgagcttacaaaaatgtgtactatacgtatgagctttgtgaagggctggggagcagaataccaccgccaggatgttactagcaccccctgctggattgagatacatctgcacggccccctccagtggctggataaagttcttactcaaatgggttcacctcataatcctatttcatctgtatcttaaatggccccaggcatctgcctctggaaaactattgagccttgcatgtacttgaaggatggatgagtcagacacgattgagaactgacaaaggagccttgataatacttgacctctgtgaccaactgttggattcagaaatttaaac

SEQ ID NO: 182093 - DNA, 1658 bp, Homo sapiens
  Payload ID: 15863
  Gene Symbol: SMAD1
  Gene Name: SMAD family member 1
  Uniprot ID: Q15797
  ENST ID: ENST00000394092
  CDS Start-End: 241-1638
cactgcatgtgtattcgtgagttcgcggttgaacaactgttcctttactctgctccctgtctttgtgctgactgggttacttttttaaacactaggaatggtaatttctactcttctggacttcaaactaagaagttaaagagacttctctgtaaataaacaaatctcttctgctgtccttttgcatttggagacagctttatttcaccatatccaaggagtataactagtgctgtcattatgaatgtgacaagtttattttcctttacaagtccagctgtgaagagacttcttgggtggaaacagggcgatgaagaagaaaaatgggcagagaaagctgttgatgctttggtgaaaaaactgaagaaaaagaaaggtgccatggaggaactggaaaaggccttgagctgcccagggcaaccgagtaactgtgtcaccattccccgctctctggatggcaggctgcaagtctcccaccggaagggactgcctcatgtcatttactgccgtgtgtggcgctggcccgatcttcagagccaccatgaactaaaaccactggaatgctgtgagtttccttttggttccaagcagaaggaggtctgcatcaatccctaccactataagagagtagaaagccctgtacttcctcctgtgctggttccaagacacagcgaatataatcctcagcacagcctcttagctcagttccgtaacttaggacaaaatgagcctcacatgccactcaacgccacttttccagattctttccagcaacccaacagccacccgtttcctcactctcccaatagcagttacccaaactctcctgggagcagcagcagcacctaccctcactctcccaccagctcagacccaggaagccctttccagatgccagctgatacgcccccacctgcttacctgcctcctgaagaccccatgacccaggatggctctcagccgatggacacaaacatgatggcgcctcccctgccctcagaaatcaacagaggagatgttcaggcggttgcttatgaggaaccaaaacactggtgctctattgtctactatgagctcaacaatcgtgtgggtgaagcgttccatgcctcctccacaagtgtgttggtggatggtttcactgatccttccaacaataagaaccgtttctgccttgggctgctctccaatgttaaccggaattccactattgaaaacaccaggcggcatattggaaaaggagttcatctttattatgttggaggggaggtgtatgccgaatgccttagtgacagtagcatctttgtgcaaagtcggaactgcaactaccatcatggatttcatcctactactgtttgcaagatccctagtgggtgtagtctgaaaatttttaacaaccaagaatttgctcagttattggcacagtctgtgaaccatggatttgagacagtctatgagcttacaaaaatgtgtactatacgtatgagctttgtgaagggctggggagcagaataccaccgccaggatgttactagcaccccctgctggattgagatacatctgcacggccccctccagtggctggataaagttcttactcaaatgggttcacctcataatcctatttcatctgtatcttaaatggccccaggcatctgcct

SEQ ID NO: 182094 - DNA, 421 bp, Homo sapiens
  Payload ID: 15863
  Gene Symbol: SMAD1
  Gene Name: SMAD family member 1
  ENST ID: ENST00000507367
  CDS Start-End: 392-421
gagtcgattgcctcactgcatgtgtattcgtgagttcgcggttgaacaactgttcctttactctgctccctgtctttgatcttggccccctcaagtcctgagtgccttggttcctctttgatgcctttaaaaagctgggcttttgtttgtttgttttctggcttgtttgtttggaaggaggttggtctgatacgtgctactccagtttagccagggtgctgactgggttacttttttaaacactaggaatggtaatttctactcttctggacttcaaactaagaagttaaagagacttctctgtaaataaacaaatctcttctgctgtccttttgcatttggagacagctttatttcaccatatccaaggagtataactagtgctgtcattatgaatgtgacaagtttattttcctttaca

SEQ ID NO: 182095 - DNA, 573 bp, Homo sapiens
  Payload ID: 15863
  Gene Symbol: SMAD1
  Gene Name: SMAD family member 1
  ENST ID: ENST00000503324
  CDS Start-End: 399-573
attgtgtcccccgcgccggcggggcgacccctgcgggagctggaggacgaccgctggcgctgctctccaaggcgcctggtggagcgggtctcgcgggcgggggaccccggcgccccgggcccctccacatcccgcacgggttttcttctcggccccagcaagcctctttggggtcgaggtcaaggaaagttcgcaccgagatcccctctaatttattcaaaggtgctgactgggttacttttttaaacactaggaatggtaatttctactcttctggacttcaaactaagaagttaaagagacttctctgtaaataaacaaatctcttctgctgtccttttgcatttggagacagctttatttcaccatatccaaggagtataactagtgctgtcattatgaatgtgacaagtttattttcctttacaagtccagctgtgaagagacttcttgggtggaaacagggcgatgaagaagaaaaatgggcagagaaagctgttgatgctttggtgaaaaaactgaagaaaaagaaaggtgccatggaggaactggaaaaggccttgagctgcccag

SEQ ID NO: 182096 - DNA, 558 bp, Homo sapiens
  Payload ID: 15863
  Gene Symbol: SMAD1
  Gene Name: SMAD family member 1
  ENST ID: ENST00000507594
  CDS Start-End: 272-558
caattctgggtacgtacaacttctggggcctgcaaattattggagagtgagtgaggggcaacgaaagatagacataaaagggcgcgtctcgaaaggtgctgactgggttacttttttaaacactaggaatggtaatttctactcttctggacttcaaactaagaagttaaagagacttctctgtaaataaacaaatctcttctgctgtccttttgcatttggagacagctttatttcaccatatccaaggagtataactagtgctgtcattatgaatgtgacaagtttattttcctttacaagtccagctgtgaagagacttcttgggtggaaacagggcgatgaagaagaaaaatgggcagagaaagctgttgatgctttggtgaaaaaactgaagaaaaagaaaggtgccatggaggaactggaaaaggccttgagctgcccagggcaaccgagtaactgtgtcaccattccccgctctctggatggcaggctgcaagtctcccaccggaagggactgcctcatgtcatttactgccgtgtgtggcgctggcccga

SEQ ID NO: 182097 - DNA, 616 bp, Homo sapiens
  Payload ID: 15863
  Gene Symbol: SMAD1
  Gene Name: SMAD family member 1
  ENST ID: ENST00000514778
  CDS Start-End: 298-616
attatttggagcaacaaggttacctactcgaatcactggatcctgagttgacacaaaacgcatctgttgactcagggtttgtataaccacgtgcagtatttactaggctatccaattctgggtgctgactgggttacttttttaaacactaggaatggtaatttctactcttctggacttcaaactaagaagttaaagagacttctctgtaaataaacaaatctcttctgctgtccttttgcatttggagacagctttatttcaccatatccaaggagtataactagtgctgtcattatgaatgtgacaagtttattttcctttacaagtccagctgtgaagagacttcttgggtggaaacagggcgatgaagaagaaaaatgggcagagaaagctgttgatgctttggtgaaaaaactgaagaaaaagaaaggtgccatggaggaactggaaaaggccttgagctgcccagggcaaccgagtaactgtgtcaccattccccgctctctggatggcaggctgcaagtctcccaccggaagggactgcctcatgtcatttactgccgtgtgtggcgctggcccgatcttcagagccaccatgaactaaaaccactgg

SEQ ID NO: 182098 - DNA, 569 bp, Homo sapiens
  Payload ID: 15863
  Gene Symbol: SMAD1
  Gene Name: SMAD family member 1
  ENST ID: ENST00000514831
  CDS Start-End: 232-569
aatttggagaggatccctggtcgcgcggcagcggcggcggcgcgcgggtgagcgggtgctgactgggttacttttttaaacactaggaatggtaatttctactcttctggacttcaaactaagaagttaaagagacttctctgtaaataaacaaatctcttctgctgtccttttgcatttggagacagctttatttcaccatatccaaggagtataactagtgctgtcattatgaatgtgacaagtttattttcctttacaagtccagctgtgaagagacttcttgggtggaaacagggcgatgaagaagaaaaatgggcagagaaagctgttgatgctttggtgaaaaaactgaagaaaaagaaaggtgccatggaggaactggaaaaggccttgagctgcccagggcaaccgagtaactgtgtcaccattccccgctctctggatggcaggctgcaagtctcccaccggaagggactgcctcatgtcatttactgccgtgtgtggcgctggcccgatcttcagagccaccatgaactaaaaccactggaatgctgtgagtttccttt

SEQ ID NO: 182099 - DNA, 2085 bp, Homo sapiens
  Payload ID: 15863
  Gene Symbol: SMAD1
  Gene Name: SMAD family member 1
  Uniprot ID: Q15797
  ENST ID: ENST00000515385
  CDS Start-End: 543-1940
atgtgtattcgtgagttcgcggttgaacaactgttcctttactctgctccctgtctttgttagtgtttctcggggttgtttctgtaggaaggtgggggtggtgggcgtgagagacagatgtgggcttgtttttctagttgctgaaactgtatgaaggctttaaagggagaacgttttcttgatgtgctttaggaggggaggaggaacaaatgcctgccagatctcacagctacagtagctgagcttttgtttattttgaagagcatgcaatttttaaatacacggtgcaagataaccagtaaaggcgcgttccttctgaaaattgaggccggtctcagaaccatctcctgagaaagcatccttttcgtgctgactgggttacttttttaaacactaggaatggtaatttctactcttctggacttcaaactaagaagttaaagagacttctctgtaaataaacaaatctcttctgctgtccttttgcatttggagacagctttatttcaccatatccaaggagtataactagtgctgtcattatgaatgtgacaagtttattttcctttacaagtccagctgtgaagagacttcttgggtggaaacagggcgatgaagaagaaaaatgggcagagaaagctgttgatgctttggtgaaaaaactgaagaaaaagaaaggtgccatggaggaactggaaaaggccttgagctgcccagggcaaccgagtaactgtgtcaccattccccgctctctggatggcaggctgcaagtctcccaccggaagggactgcctcatgtcatttactgccgtgtgtggcgctggcccgatcttcagagccaccatgaactaaaaccactggaatgctgtgagtttccttttggttccaagcagaaggaggtctgcatcaatccctaccactataagagagtagaaagccctgtacttcctcctgtgctggttccaagacacagcgaatataatcctcagcacagcctcttagctcagttccgtaacttaggacaaaatgagcctcacatgccactcaacgccacttttccagattctttccagcaacccaacagccacccgtttcctcactctcccaatagcagttacccaaactctcctgggagcagcagcagcacctaccctcactctcccaccagctcagacccaggaagccctttccagatgccagctgatacgcccccacctgcttacctgcctcctgaagaccccatgacccaggatggctctcagccgatggacacaaacatgatggcgcctcccctgccctcagaaatcaacagaggagatgttcaggcggttgcttatgaggaaccaaaacactggtgctctattgtctactatgagctcaacaatcgtgtgggtgaagcgttccatgcctcctccacaagtgtgttggtggatggtttcactgatccttccaacaataagaaccgtttctgccttgggctgctctccaatgttaaccggaattccactattgaaaacaccaggcggcatattggaaaaggagttcatctttattatgttggaggggaggtgtatgccgaatgccttagtgacagtagcatctttgtgcaaagtcggaactgcaactaccatcatggatttcatcctactactgtttgcaagatccctagtgggtgtagtctgaaaatttttaacaaccaagaatttgctcagttattggcacagtctgtgaaccatggatttgagacagtctatgagcttacaaaaatgtgtactatacgtatgagctttgtgaagggctggggagcagaataccaccgccaggatgttactagcaccccctgctggattgagatacatctgcacggccccctccagtggctggataaagttcttactcaaatgggttcacctcataatcctatttcatctgtatcttaaatggccccaggcatctgcctctggaaaactattgagccttgcatgtacttgaaggatggatgagtcagacacgattgagaactgacaaaggagccttgataatacttgacctctgtgaccaactgttggattcagaaatttaaac

SEQ ID NO: 182100 - DNA, 847 bp, Homo sapiens
  Payload ID: 15863
  Gene Symbol: SMAD1
  Gene Name: SMAD family member 1
  ENST ID: ENST00000512019
  CDS Start-End: 448-847
ggagaaagcaggcgggcgggcggagaaaggagaggccgagcggctcaacccgggccgaggctcggggagcggagagtggcgcagcgcccggccgtccggacccgggccgcgagaccccgctcgcccggccactcgtgctcccacacggacgggcgcgccgccaacccgcatgcaatttttaaatacacggtgcaagataaccagtaaaggcgcgttccttctgaaaattgaggccggtctcagaaccatctcctgagaaagcatccttttcgtgctgactgggttacttttttaaacactaggaatggtaatttctactcttctggacttcaaactaagaagttaaagagacttctctgtaaataaacaaatctcttctgctgtccttttgcatttggagacagctttatttcaccatatccaaggagtataactagtgctgtcattatgaatgtgacaagtttattttcctttacaagtccagctgtgaagagacttcttgggtggaaacagggcgatgaagaagaaaaatgggcagagaaagctgttgatgctttggtgaaaaaactgaagaaaaagaaaggtgccatggaggaactggaaaaggccttgagctgcccagggcaaccgagtaactgtgtcaccattccccgctctctggatggcaggctgcaagtctcccaccggaagggactgcctcatgtcatttactgccgtgtgtggcgctggcccgatcttcagagccaccatgaactaaaaccactggaatgctgtgagtttccttttggttccaagcagaaggaggtctgcatcaatccctaccactataagagagtagaaagccctg

SEQ ID NO: 182101 - DNA, 32767 bp, Homo sapiens
  Payload ID: 15864
  Gene Symbol: SMAD2
  Gene Name: SMAD family member 2
  Uniprot ID: Q15796
  ENST ID: ENST00000262160
  CDS Start-End: 253-1656
ccgcgcgcccgggccgccggccgggcccgggcctgggggcggggcgggaagacggcggccgggagtgttttcagttccgcctccaatcgcccattcccctcttcccctcccagccccctccatcccatcggaagaggaaggaacaaaaggtcccggaccccccggatctgacggggcgggacctggcgccaccttgcaggttcgatacaagaggctgttttcctagcgtggcttgctgcctttggtaagaacatgtcgtccatcttgccattcacgccgccagttgtgaagagactgctgggatggaagaagtcagctggtgggtctggaggagcaggcggaggagagcagaatgggcaggaagaaaagtggtgtgagaaagcagtgaaaagtctggtgaagaagctaaagaaaacaggacgattagatgagcttgagaaagccatcaccactcaaaactgtaatactaaatgtgttaccataccaagcacttgctctgaaatttggggactgagtacaccaaatacgatagatcagtgggatacaacaggcctttacagcttctctgaacaaaccaggtctcttgatggtcgtctccaggtatcccatcgaaaaggattgccacatgttatatattgccgattatggcgctggcctgatcttcacagtcatcatgaactcaaggcaattgaaaactgcgaatatgcttttaatcttaaaaaggatgaagtatgtgtaaacccttaccactatcagagagttgagacaccagttttgcctccagtattagtgccccgacacaccgagatcctaacagaacttccgcctctggatgactatactcactccattccagaaaacactaacttcccagcaggaattgagccacagagtaattatattccagaaacgccacctcctggatatatcagtgaagatggagaaacaagtgaccaacagttgaatcaaagtatggacacaggctctccagcagaactatctcctactactctttcccctgttaatcatagcttggatttacagccagttacttactcagaacctgcattttggtgttcgatagcatattatgaattaaatcagagggttggagaaaccttccatgcatcacagccctcactcactgtagatggctttacagacccatcaaattcagagaggttctgcttaggtttactctccaatgttaaccgaaatgccacggtagaaatgacaagaaggcatataggaagaggagtgcgcttatactacataggtggggaagtttttgctgagtgcctaagtgatagtgcaatctttgtgcagagccccaattgtaatcagagatatggctggcaccctgcaacagtgtgtaaaattccaccaggctgtaatctgaagatcttcaacaaccaggaatttgctgctcttctggctcagtctgttaatcagggttttgaagccgtctatcagctaactagaatgtgcaccataagaatgagttttgtgaaagggtggggagcagaataccgaaggcagacggtaacaagtactccttgctggattgaacttcatctgaatggacctctacagtggttggacaaagtattaactcagatgggatccccttcagtgcgttgctcaagcatgtcataaagcttcaccaatcaagtcccatgaaaagacttaatgtaacaactcttctgtcatagcattgtgtgtggtccctatggactgtttactatccaaaagttcaagagagaaaacagcacttgaggtctcatcaattaaagcaccttgtggaatctgtttcctatatttgaatattagatgggaaaattagtgtctagaaatactctcccattaaagaggaagagaagattttaaagacttaatgatgtcttattgggcataaaactgagtgtcccaaaggtttattaataacagtagtagttatgtgtacaggtaatgtatcatgatccagtatcacagtattgtgctgtttatatacatttttagtttgcatagatgaggtgtgtgtgtgcgctgcttcttgatctaggcaaacctttataaagttgcagtacctaatctgttattcccacttctctgttatttttgtgtgtcttttttaatatataatatatatcaagattttcaaattatttagaagcagattttcctgtagaaaaactaatttttctgccttttaccaaaaataaactcttgggggaagaaaagtggattaacttttgaaatccttgaccttaatgtgttcagtggggcttaaacagtcattctttttgtggttttttgtttttttttgtttttttttttaactgctaaatcttattataaggaaaccatactgaaaacctttccaagcctcttttttccattcccatttttgtcctcataatcaaaacagcataacatgacatcatcaccagtaatagttgcattgatactgctggcaccagttaattctgggatacagtaagaattcatatggagaaagtccctttgtcttatgcccaaatttcaacaggaataattggcttgtataatctagcagtctgttgatttatccttccacctcataaaaaatgcataggtggcagtataattattttcagggatatgctagaattacttccacatatttatccctttttaaaaaagctaatctataaataccgtttttccaaaggtattttacaatatttcaacagcagaccttctgctcttcgagtagtttgatttggtttagtaaccagattgcattatgaaatgggccttttgtaaatgtaattgtttctgcaaaatacctagaaaagtgatgctgaggtaggatcagcagatatgggccatctgtttttaaagtatgttgtattcagtttataaattgattgttattctacacataattatgaattcagaattttaaaaattgggggaaaagccatttatttagcaagttttttagcttataagttacctgcagtctgagctgttcttaactgatcctggttttgtgattgacaatatttcatgctctgtagtgagaggagatttccgaaactctgttgctagttcattctgcagcaaataattattatgtctgatgttgactcattgcagtttaaacatttcttcttgtttgcatcttagtagaaatggaaaataaccactcctggtcgtcttttcataaattttcatatttttgaagctgtctttggtacttgttctttgaaatcatatccacctgtctctataggtatcattttcaatactttcaacatttggtggttttctattgggtactccccattttcctatatttgtgtgtatatgtatgtgttcatgtaaatttggtatagtaattttttattcattcaacaaatatttattgttcacctgtttgtaccaggaacttttcttagtctttgggtaaaggtgaacaagacaactacagttcctgcctttgctgagacagcagttacactaacccttaattatcttacttgtctatgaaggagataaacagggtactgtactggagaataacagatgggatgcttcaggtaggacatcaaggaaagcctctaaggaaaggatgcatgagctaacacctgacattaaagaagcaagccaagtgaggagccaggggagataagcattcctggcaaagagaatagcatcaaatgcaaaaaggttcacactaaaggaaactcctgattaggtattaatgctttatacagaaacctctatacaaatccaaacttgaagatcagaatggttctacagttcataacattttgaaggtggccttattttgtgatagtctgcttcatgtgattctcactaacatatctccttcctcaacctttgctgtaaaaatttcatttgcaccacatcagtactacttaatttaacaagcttttgttgtgtaagctctcactgttttagtgccctgctgcttgcttccagactttgtgctgtccagtaattatgtcttccactacccatcttgtgagcagagtaaatgtcctaggtaataccactatcaggcctgtaggagatactcagtggagcctctgcccttctttttcttacttgagaacttgtaatggtgttagggaacagttgtaggggcagaaaacaactctgaaagtggtagaaggtcctgatcttggtggttactcttgcattactgtgttaggtcaagcagtgcctactatgctgtttcagtagtggagcgcatctctacagttctgatgcgatttttctgtacagtatgaaattgggactcaactctttgaaaacacctattgagcagttatacctgttgagcagtttacttcctggttgtaattacatttgtgtgaatgtgtttgatgctttttaacgagatgatgttttttgtattttatctactgtggcctgattttttttttgttttctgcccctccccccatttataggtgtggttttcatttttctaagtgatagaatcccctctttgttgaatttttgtctttatttaaattagcaacattacttaggatttattcttcacaatactgttaattttctaggaatgatgacctgagaaccgaatggccatgctttctatcacatttctaagatgagtaatattttttccagtaggttccacagagacaccttgggggctggcttaggggaggctgttggagttctcactgacttagtggcatatttattctgtactgaagaactgcatggggtttcttttggaaagagtttcattgctttaaaaagaagctcagaaagtctttataaccactggtcaacgattagaaaaatataactggatttaggcctaccttctggaataccgctgattgtgctctttttatcctactttaaagaagctttcatgattagatttgagctatatcagttataccgattataccttataatacacattcagttagtaaacatttattgatgcctgttgtttgcccagccactgtgatggatattgaataataaaaagatgactaggacggggccctgacccttgagctgtgcttggtcttgtagaggttgtgttttttttcctcaggacctgtcactttggcagaaggaaatctgcctaatttttcttgaaagctaaattttctttgtaagtttttacaaattgtttaatacctagttgtattttttaccttaagccacattgagttttgcttgatttgtctgtcttttaaacactgtcaaatgctttcccttttgttaaaattattttaatttcactttttttgtgcccttgtcaatttaagactaagactttgaaggtaaaacaaacaaacaaacatcagtcttagtctcttgctagttgaaatcaaataaaagaaaatatatacccagttggtttctctacctcttaaaagcttcccatatatacctttaagatccttctcttttttctttaactactaaataggttcagcatttattcagtgttagataccctcttcgtctgagggtggcgtaggtttatgttgggatataaagtaacacaagacaatcttcactgtacataaaatatgtcttcatgtacagtctttactttaaaagctgaacattccaatttgcgccttccctcccaagcccctgcccaccaagtatctctttagatatctagtctgtggacatgaacaatgaatacttttttcttactctgatcgaaggcattgatacttagacatatcaaacatttcttcctttcatatgctttactttgctaaatctattatattcattgcctgaattttattcttcctttctacctgacaacacacatccaggtggtacttgctggttatcctctttcttgttagccttgttttttgttttttttttttttttttgagagggagtctcgctctgttgcccaacctggagtgcagtggtgcgatcttggttcactgcaagctccgcctcccgggttcacgccatgcttctgcctcagcctcccaagtagctgggactacaggcgcccaccaccacactcggctaattttttgtatttttagtagagacggggtttcaccgtgttggccaggatggtctcgatctcctgacctcgtgatctgtccacctcggcttcccaaagtgctgggattacaggcatgagccaccgcgcccagcctagccatatttttatctgcatatatcagaatgtttctctcctttgaacttattaacaaaaaaggaacatgcttttcatacctagagtcctaatttcttcatcatgaaggttgctattcaaattgatcaatcattttaattttacaaatggctcaaaaattctgttcagtaaatgtctttgtgactggcaaatggcataaattatgtttaagattatgaacttttctgacagttgcagccaatgttttccctacgataccagatttccatcttggggcatattggattgttgtatttaagacagtcagaataatgatagtgtgtggtctccagaggtagtcagaatcctgctattgagttctttttatatcttccttttcaattttttattaccattttgtttgtttagactacactttgtagggattgaggggcaaattatctcttggagtggaattcctgtgttttgagccttacaaccaggaaatatgagctatactagatagcctcatgatagcatttacgataagaacttatctcgtgtgttcatgtaattttttgagtaggaactgttttatcttgaatattgtagctaactatatatagcagaactgcctcagtctttttaagaaggaaataaataatatatgtgtatgaatttatatatacatatacactcatagacaaacttaacagttggggtcattctaacagttaaaacaattgttccattgtttaaatctcagatcctggtaaaatgttcttaatttgtctgtgtacattttcctttcatggacagaccattggagtacattaattttcttaatctgccatttggcagttcatttaatataccattttttggcaacttggtaactaagaatcacagccaaaatttgttaacatcaaagaaagctctgccatataccccgttactaaattattatacatccagcagattctgggatgtactaacttagggttaactttgttgttgttgataatactagattgctccctctttaattcttcttctggtgcaaggttgctgcttaagttaccctgggaaatactactacaaggtcaaattttctagtatcttacagcctgattgaaggtgattcagatctttgctcaatataaatggattttccaagattctctgggccatccttgacccacaggtgatctcgctggagtatattaacttaacttcagtgccagttggtttggtgccatgagatccataatgaatccagaacttcaccattgcttagatataagagtcccttggaagaataatgccactgatgatgggggtcagaaggtgtattaactcaacatagagggcttttagatttttcttcaaaaaaatttcgagaaaagtattcttttaccctccaaacagttaacagctcttagtttctccaaatatgctctttgatttacttatttttaattaaagatggtaatttattgaacaatgaaatccgtaatatattgatttaaggacaaaagtgaagttttagaattataaaagtacttaaatattatatattttccatttcataattgttttcctttctctgtggctttaaagtttttgactattttacaatgttaatcactaggtaacttgccatatttctggttctatattaagttctatcctttataatgctgttattataaagctggtttttagcatttgtctgtagcaatagaaattttactaagtctctgttctcccagtaagttttttcttttctcagtaagtccctaagaaaacatttgtttgccactcttactattcccaatcttggattgttcgagctgaaaaaaaatttgatgagaaacaggaggatccttttctggtgaatataggttcctgctttaagaatgtggaaatccattgctttatataactaatatacacacagattaattaaaattgtgagaaataattcacacatgacaagtaggtaacatgcatgagttttgaatttttttaaaaacccaactgtttgacaaaatatagaacccaaattggtactttcttagaccagtgtaacctcacacctcagttttgcttttccaaccctgacttgaaaggcatatttgtatctttttattagtgatagtgaagctgtgacactaaccttttatacaaaagagtaaagaaagaaaaactacagcgattaagatgagaacagttctgcagttgttgaactagatcacagcattgtaggcagaataaaaaatgttcatatctgagaatattcctttcgccatcttttcccaaggccagacctcctggtggagcacagttaaaagtaacattctgggcctttgtaatcggagggctgtgtctccagctggcagcctttgttttaatatataatgcaggactgtggaaaacagttggcatagaatattttcacctaaaaaagaaagaaaagacatacaaaactggattaattgcaaaaagagaatacagtaaaataccatataactggacaaagctagaagaacctttagaagatttgtctgaaaacagatttcaagagtgagcttttatacactgctcactaatttgcttgattactaccaactcttcttaaagttaacacgtttaaggtatttctggacttcctagccttttagcaagcttagaggaactagccattagctagtgatgtaaaaatattttggggactgatgcccttaaaggttatgcccttgaaagttcttaccttttctctagtgatattaaggaacgagtgggtagtgttctcagggtgaccagctgccctaaagtgcctgggattgagggtttccctggatgcgggactttccctggatacaaaacttttagcagagttttgtatatatgtggatttttctgataagtagcacatcagaggccttaaccactgcccaaaagcgattctccattgagagtacatatcttgaacttaagaaattcatttgctctgatttttaatcttgtaaagtttttgctaaactcaaaacaagtcccaggcacaccagaaggagctgaccaccttaggtgttcttgtgatttatccttacttccctatgttgtcatagttgcttctaaactcagctgcactatggctgtcaacatttctgatacttattgggatatgtgccatccagtcatttagtactttgaatggaacatgagatttataacacaggtaatagctgaaggtaccagtatggtggtgagactcacacttagtgatccagctaaggtaactgatgttataatggaacagagaagaggccaactagatagctaagttcttctgaacctatgtgtatatgtaagtacaaatcatgcgtccttatggggttaaacttaatctgaaatttacatttttcatagtaaaaggaaaccaattgttgcagatttcttttcttgtgaggaaatacatggcctttgatgctctggcgtctactgcatttcccagtctgttctgctcgagaagccagaatgtgttgttaacatttttccgtgaatgttgtgttaaaatgattaaatgcatcagccaatggcaagtgaaggaattgggtgtcctgatgcagactgagcagtttctctcaattgtagcctcatactcataaggtgcttaccagctagaacattgagcacgtgaggtgagattttttttctctgatggcattaactttgtaatgcaatatgatggatgcagaccctgttcttgtttccctctggaagtccttagtggctgcatccttggtgcactgtgatggagatattaaatgtgttctttgtgagctttcgttctatgattgtcaaaagtacgatgtggttccttttttatttttattaaacaatgagctgaggctttattacagctggttttcaagttaaaattgttgaatactgatgtctttctcccacctacaccaaatattttagtctatttaaagtacaaaaaaagttctgcttaagaaaacattgcttacatgtcctgtgatttctggtcaatttttatatatatttgtgtgcatcatctgtatgtgctttcactttttaccttgtttgctcttacctgtgttaacagccctgtcaccgttgaaaggtggacagttttcctagcattaaaagaaagccatttgagttgtttaccatgttactatgggactaatttttaattgttttaatttttatttaaactgatctttttttatatgggattacattttggtgttcactccctaaattatatggaaaccaaaaaaagtgattgtatttcacatatggacatatgattttaagagtacatgtttttgtttttttaatttggtgttacataaaagattatcctatccccccgggagataaatttatactacttaatataaccccacaacaggcgcacaccacacactgcacagtgctatttatacatttttatttatttcagagtttgcctatgctacattagcgctctaatacataagatctatgctgtaaacaaaaacatcttcaaagttgaaatttgctgaaatatacttttaacaaaataacatttttaaggctccattgaaaaatactagataagatataatctcatataatcagtatgaataattttaaaaatgagaaatatttaggtcagccacacttcctttgtgccttgcaagaattcagttctgtggatgaatcagtactggttagcagactgttttctgcaaaccattttaaacatgctttagtatgcaacaaaaagggacctcaaatgctaaaatacactattttacgtggcattgaatagccttgggactggtgtagttttatcaacacttttttattaggaagaaacccaagaaaatttactgtaattgctaccacctgccactgtataaataatctaaaagggacttcccaacattgaacaacaacattgagggctgactcgagatccttctacattgtcacctcagcctggctttgcctgtcactgcttagcttgaagtagtgacactgttctgtatcaggagatttttataatggccctagcatccataattccacatgttcatcaaatggctgaagagtatgagagaagtattaaggtctatgtttgggctgtctccccacttggcatattctgtttttccctcttcaaaatagattgaaagcctcttagtgcaggaagcaggcatcagtatcaaactgatgtcatccaatgtaattattttaagctccaggtttgtctaagtttgggtgaagaatgttcaggaacatgtttgcaacatacagttatccagcttaccctttgacagattcacccttctcatcaaaatagtaagcccaacctaaaaattataagtttacaaataaaggaatagaaaaacccaaaaagctaatttacacataaaaattatcttttgctgcaataaataggtatggaaatatttgtagaattggtttaactgattttgtaaaacaaatgtcatgctattttgccatagtgagacatgcagtaattcttaaaatcacattaatagaaggcaagaacattgaatcagacttagcagataacagattcagtgataaatgaacaatagactaagcatacttaggaagctacatgagaacagaatgtattactgtgctcccgtccaaactgcatgactttattggttatagaataaatggaatttgagatggggatttgccagtttttacagtctgtcttcaatagttttgttggctgcctctgcacctttctaaatgttatgtgaaaataaaattatttaagttctaaagtagtttaggaaagagatgtgatgacaggaaaaagaagttaacttctgaacagtttggtccaggaagaagatgggcagaatacagtaagcccagggttgaagaatacattcaatttggagagatggagaagacctttgaagaaggtcaaaatgagatcttggaacagaactctcacctgtgtgtctggatatacatgaaaactggacggtgttattgagctactgcttatatggtgagcagaaaattgataaccacaagcctggtaggttctgctatgaagcccacatataatcacaaggcctagatagcttggagttaaaagccaaggatagctgtatagtttgggttccatagtttgcagtgagattgtgcttctgagcagtcatttgggggcagtggttctgagattacaagccataacccagccaagaacgggctacctgtggaatgaggatgaggaagttgctacatataaaccctagtgtgtgtgtgtgtattaagtgaaacttagttaacttttttgctcacagccaaagatgattcatctagagaagccattggaattttagcagagttttgtatatatgtggatttttctaataagtagcaaatcagaggccttaaccactgcccaacagcgattctccattgagagtacgtatcttgaacttaagaaattcatttgctctgattttaaatcttgtaaagtttttcttcatgagaggtcttgcctctaaactatattgtggcagtatttgatcaaactacataagtaccatgtaaataagattttaatacaaatgatgactcacttctaaatggtttgccatttagaaatgtgctgctgtgagaaaaacgaattttttttttttttttttggagacagagtcttgctctgttgcccaggctggggtgcagtggggcgatctcggctcactgcagcctcgcctcctgggttcaagtgattctcctgccttagcctcctgagtagctgggattacaggcacacaccaccacgcccaactactttttgtatttttagtggagacagggtttcaccatgtttgccaggctggtcttgaactcctgacctcagatgatttgcctgcctcggcctcccaaagtgctggaattacaggcgtgagccatcatgcctggctgaaaagtgaaaatttaagccagcttaccacctggaataaaaatgttttataggaatgtctaggttgctcttttatattgaaaaaaaacttattagtgtctgttttacccaagaaccacaagctacttcatttcaacttttaaatcatgaataataacgtgttatcaccacatttaaaaatgtacatcgtcaatcacaaacacatattctaaggaattgaattttatagagataattgaatgctttcatctgtaaaagaattagtggcctgcaaaccactgtggattcttgctatgctttgaagttgtcagtgggggaatttgctgctgcaagttacttagacttgtaggcaaagggaaattcaaatttttaattctaaaatgaaaaccactgacaaaattttatactctgaaagtttggttgttagcttagtcattattttcctgttctttatcatttcggaattcagatgcttaaatttaacatacaaattatttgttggtaaaacataaaacataaaaagctacatttggtaaactaaattttaggattcaaagtctctaacaatttctatgtgacatgtcatacggtgcagtttttatttgccaaagtgtctacttcatactgcctatgcactgcttcccgtttttaatctctctaccccaacccccctataattaaataaacccctagaaaactgccttcttttagaatacctaattgattactttaaatattttttcagaatcaaaattacaaaagggagagatacctaagaatctggcttgtttatattctttaaaagatcgcatttgattgaaggtgggtgcatattttttatatccactctttccccatttgtatgtgaccattgtaaaagtggatgtgcttttttttttttgctgaggtctagagacaatgttttagagatacagaatgaaacatttatgggtaaaatacaatgggtaagacttgcttcaaaatagtatgtgacagaggaagtagatggaggtatgaatgaataggacattgatggttgtttgttgggattgggtaagggagctttgttgtattctatttccttttagataagtttgaaattccttgtagtgaagaaattaaacgtctccatcaggtgcattgccacgtcttctctaggaagcctccttaacatcctctggtggctcctgaactttttctgttctcattcacagggaagctcatggggctgcctggagacttgaggttacatcttgcctagtattaccaaaattgtgatacttttctccaccccataatagcacagtctttggtctcaacttgaactaaagtctttttttttttttttttttttttttttagtatttattgatcattcttgggtgtttctcggagagggggatgtggcagggtcataggacaatagtggagggaaggtcagcagataaacatgtgaacaagggtctctggttttcctaggcagaggaccctgcggccttctgcagtgtttgtgtccctgggtacttgagattaaggagtggtgatgactcttaacgagcatgctgccttcaagcatctgtttaacaaagcacatcttgcaccgcccttaatccatttaaccctgagtggacacagcacatgtttcagagagcacggggttgggggtaaggttatagattaacagcatcccaaggcagaagaatttttcctagtacagaacaaaatggagtctcctatgtctacttctttctacacagacacagcaacaatctgatctctctttcctttccccacatttcccccttttctattcgacaaaaccgccatcgtcatcatggcccgctctcaatgagctgttgggtacacctcccagacagggtggcggccgggcagaggggctcctcacttcccagacggggcggctgggcagaggcgcccccccacctcccggacggggtggatgctggccgggggctgccccccacctcccgaacggggcagctggccgggcgggggttgccccccacctcccggacggggcggctggccgagcaggggctgccccccacctccctcccagacggggcggctgctgggcggagacgctccttacttcccggacggggtggttgctgggcggaggggctcctcacttctcagacggggcggccgggcagagacgctcctcacctcccagacggggtggcggtcgggcagagacactcctcacatcccagacggggcggcggggcagaggcgctccccacatctcagacgatgggcggccgggaagaggcgctcctcacttcccagactgggcggccgggctgaggggctcctcacatcccagacgatgggcagccaggcagagatgctcctcacttcccagacggggtggcggccgggcagaggctgcaatctccgcactttgggaggccaaggcaggcggctgggaggtggaggttgtagcgagccgagatcgtgccactgcactccagcctgggcaacattgagcactgagtgagcgagactccatctgcaatcccagcacctcgggaggcccaggcgggcagatcatgcgcggtcaggagctggagaccagcctggccaacacggcgaaaccccgtctccaccaaaaaatacaaaaaccagtcaggcgtggcggcgcgcgtctgcaatcccaggcactcggcaggctgaggcaggagaatcaggcagggaggttgcagtgagccgagatggcggcagtacagtccagccttggctcggcatcagagggagacggtggaaagtgggagaccgtagaaagtgggagacggggggagacgggagagggagagggatgtgctttttttctaaccgttattgccaccaagtaataatgtcttaattcacaatttacatagtgattggctggagagaggtattgagcataaatttttttttaagattcaactgggaaatggatgatttacatgattttagtctctttagttgtctgggtatttcttgactgggaatagcaatatcttaaaggccatttttaacaagaatgctaaggatggaacacttgaaggaagcagtcctgtacagtcaaatacttcagttaccttggataatagaatgaaaactcaattgcctactttgaacaaattttttttttggattttaatggctggacagaataacattctgctaattttaatccttggtcatttccgatgtaatggaaaatgcagtttgactcagaatcggaggcctggggtttggaccctgattgtgccaatttatgtgactttagataaatcttttcatcagtctaccttaaagttcttcatttcctccagttccctaaaatgaggaagttagtttttagggtggttatgagaactaaatgagagcacttgagagatcattcagcctgaagtgggtactcagtattagatggctaaatctgcacagtctagaataccaggcaaaggttactctgaaggtctttgctaataacaaatctttctctaagaaagtttgtaaatgtgatgttaaactcagaaatgtcacatagaacatattggagcaattattgccgcaaaagtaactcgtagcaaccacaaaaacccagtggtgtgcagcaataaacagtttatgaattagataagtgatttcggctagatgtctctggagcagttgtagtctttcctcgttcatgagggagttggcctcacctggaaggacttggcatttttccacatgcctcctatcctccattaaacaagcatgtttttgtggaggttgtagaaggcaacaacagccaagcccaatcccataactccctttcatgtctgcatgcttcatgctaactagcattcaccagaaacaagccacatggctaaacccagtgtggaaaggcactacagagttattagaccaagggagagaacataggaggggtgaagaattggagccttaaatgcagtcaatctaccacacccttgctttgtatttaacaggttactgtactggtttgccagcaaacaatggaaaatgtggagaagctgaagaatgctcaagctgggacttaatagagtggcctatttggtttgaaatgttttaacttacagagcattgagtagaagcctaatctaatatacataaggaagacaaaagcaaaggattgtgttttctatctaaaggttaatcattgtggttgctcctggccattatcacatgactggaagttaacactctccaaacgctgagcctatcctgtacagcactagaaagtagaaagaatcactcaattcagggaaaccgttttctcttaatgtgaacatttacattaatgccatttccaaaacctttctgggacttcttaaatgcaaagatgctatctgctttacttcatgctgcctgtttttaggagcttggagtgctttaggaagcttcccaatactggtttagcagtaatttggttgactgatcaaggcatgttttaactttgacactgaaattttaaaaagacaacagttatcttgcccggagagtcaagtttctgcttccaaggaggtcaggaattgttctctttggtgatgtggctgtgcttggtagcccttgaaagtggagtcgacagcagtcctcagcttttgtgtgcctgtcttagtctgttttgtgttactataacaggatagctgaggcagggtcacttatgaaggatgctcacagttctacaggctgggaagttcaagggcatggccctggcttttggcaagggctttgctgctgcttcatagcttgatggagaaggtcagaggggaagcagacgtgcaaacaacccacttgttcacaacaaccaaacaagtctctttttaacaacccactcctggggactaatctagtcttgagagagtgagaactcattgcaagagcagcaccaagccattcatgaagcatctgcctcagtgaaccaaacatctcccactaggccccagctctcaacaccaccacaatgaagataaaatctcatcatacatttgagggacagtttgggagacagaccatagcagtgctcagtatttctacccaaatgttcaggtaacttaatatatttttccttgaatatatgtttaaatgggcttcccttccccacgctcatcttgaatggtcccacaacaacttttgattatcacgttcctgtaaatacacaaaaatattttgtggtcttttactggcagcccagtggatgggactttaaaaaatcacccagattccaacaaccagagaaaacgactggtgtatattttttccagtctttatttgtatgtctgtgtatattcaatggaaaatgtttgaagcttcactcacagcacattccattagagaaagctactaaaatcataaggaaaatctaaaatgcagtaagccagtcagcaagccataatgggcatatgaaaacaaagttttttgccatgatttgtggaccacagaagatctgtgttattagtctatttaagtttggtgtttgaaattaaaaatgttcgacatactttttatgttttttttaaatatactgtctatatttaaaattgagtatactgtactttagtgtgtttggaagcagatatccccaaataaaagtatacagtagaaccaaagaattttattgatcagctagaatttagttttcaggtgtaataactgtcaacctaaataacagaggctttctaaaagaaaatgatgtttatttgggaatagggcattgtgaaggcaatatgcatgccatagtaaactgtgtgtattcaggaaggtaaaggaagacaggtttttaaaggacagataaagattatataattgtcttgaaataattattcttggctacaaggattaataacaaggatgctgccagttcgggtttggacaatcggcttctaggcagatgtcccaaaagtattttctgtgtaaggttgcgaatagtgtttgtgcaagctggcgtggtttcttctgggtctttgaggtagtgcgtaaaatccctctcttcatggacttccctggctccatttgtcagggcttttggaaacatgactcttgattctgacagctttcacctttccctctcttgatgaagatgtttttccgaaagtatctatgatgaatcatcttgtagttaggctttgattgtcccttggtgacagaatagacctttcccgggttattggtctggtcctgcatcctgcattggcaggagtgattggcaactaaaagtcagtgttaaaacccttttagccacctttgagggcagggaggctttaagggagtggcacttaggctaagtccacctggagtctattattaagtccaattttttttccttagtcctttgttgtcccctcaaagtgctgggctagcattattctgttaggaattgtacttctttctgcagaaaatttggcaaataacagatacaaagtttaaaaaggaaatacacaaaattaatagtaatgtgacaatcccagtttgcataatggttttgagccctgaacctaggcttacaggcaaccaattgaataaatcaaattgtaatacaattcttgctctgatgtcttaggaaaaatgtctacagcctgaaatcatcaactttttgtcctggtttgcagtttgaatgtctctagctatggcattggttggtatggtgaacttttgtgtgacccatacatcagcatgagacttgctcctttaaaaattaatcacatcttagcttataggcctcagagcatgggagtagttttttttcttagagagtcatagccaaatattgaaggaaattaggaggattcaggagcaaatccagtctgcaggtggataacaggagtttcaaaacggtacagagctgtgatctaataacaggtacatatagctttcttcagaaacttaaagttaccctgatttttaccaaagatgttcagaataaaacagatttgtaaactttatcagattttgtctgcaagaatagtagtatggtcacagtaatctcagatttaaaaacctccttgaggctaagaagctaagtcaaggtagactttagattttacctatagttttaaggttcctgggcctgccaggaaatgataatttttaattcagtgtaatgctgagaaccattgaagccaggcattctacacattctcaaatatgacattttaatcaaagccttggtaatacaaccagtgtttccaattgtatcctgttataacgagagccgatttttattgaacttaggcaaatcatattgccttaagagtactcacaaataggctgggcacagtggctcatgcctgtaatcccagctctttgggaggccaagacaggtggaacacctgaggtcaggagtttgaaaccagcctggccaacatagtgaaacctccccccggccaccgtctctactaaaaaatacaaaaattagctgggtgtggtggtgcatgcctgtagtcccagctacttgggaggctgagacagaattgcttgaaccctggaggcagaagttgcactgaaacaagatcgtgccactgcattccagctggggcaacagagcgagactccgtctcaaaaacaaaaacaaatgaatactcaaaatagtttccaaattggagggatcaagaagaaaggaaaagcaaatatttctacctttgttcacaaaagtattccaaattgctgtaaactatagatagcatgagagaatttctttaaatatggaaaacaaaacatttaagtaaaaaaacaataatgcttcaaataaaagtcacagacacatcttcagttacttagtctcatgtaactttttttgttgtggttgatcttaattagtagttacatggactcatcagtttcttgaagttctgaaaaaatatttagtccattggtattaaagtgattagtaacctgtatttaaaagtgtgttagcatcttttccatgaatctgattgcaaatgcttttagagaaaaagcaataactgggaattacaaaaacttagaataaccatgattaaaaatctgatgagagtttaccataaccagaaatagacaaagagttttggttatttttgtggcaaacagcataatcagaattatgactgatgacatatttctaacggcatcgtacaattttggaacactcatatcaataacatactcataaatgtaactgtgtctagtattacatcattagacaatgcttttcatacaatttaatacatcaaagaagcctaattagctaacatctctaccagatggcatacacatgctctgaggctttccagaggcccaagtggaaaactcaaaggtaattttaagtcaaaaacacttaatttagaacttgagcctagagaagcctgtcaaagatgtcaaaagttcgaaacaggatcacaggtcactataaaatatttaacaagaatgataatcaaaagacttaagaagcaatgcagaaagttacatacatttaaaaaccatcttttcaaagcttcatttttcccaagcaaaaaaaaaacttaaacacaagaatttatcttgatagaacataaaatttttcttaggccagttgccaaaatggtaaagaaaaatctcttgcagtgtgactgcctttacttatgggaagcctatttggatatactgaaagttgaatctgatgaaaaggtacttgaatttaatcagacacaggaagagtatttccaaggttatgagtgtacgccttatagaggaatgtaaataagaaagctagtatgttgaacagaatacatggctcttggaaaaattacgagaaatttcctgcttgcgtggaacaattcaaacatgagaagagccaagaattcagaatcaagttatactggaggaaaacattgcttttctaggccttctacagaacatttcagtatcaagttataacagcaagagttagaaccagaggaaaaaagttacaggagctaatgaaaaagttaagagttatcacccctgccaaacaaaaagatgtaccttcttaaggggagaaagagctaaaggcaatgatgtgtgacctacaaataaggtgcagcaagatacagcaaaggttgaacttgtgagatataaatcaggatcttcaagaagaaaactctacctcaagaaatgaaatgaccatcttaaatgaaaaaagacagcctttctaacctgaatctaggggaaattaaacggatctcagaaggaaatatggcagaaatttaaactgtggtttagaagatggctgattttagaattaaaaattaaaacctctttcaattttattaagaccagatccttaaaaagaaccttgttctaacattggggaccaaattttgtgtgtgtgtgtgtgtgtgtgtgtgtgtgtgtgtgtgtgtgtgtatagtgcatgtatagcatttacactatcgtgtatatacaaatatatagcatatgtatagaatatactgtattattgtacatatacatatgtacaagtatatatgtaagctcaatgtcttatgatttcattctgacctattgccaacttcattacacacaactcctttcataaatgtatccttcatgaacatttcatgatctgcacagaccttcagtgacatgcttaaactttctgctttgttttatacttccccttaaacaactggtcatcctgctttaggataaaaagttactatgcaagactcatacagaattattctgttaattttgtaaccttccttaccaaaggtacattctcacacccattaacttccttcatatttctctcctcctcctacttagtggttcctttctgtcttgtttccatatttgaaacaacctctaataaactctgaatttaaacaacttttttcccaataaaaagcaatttttatgccttataacttttctcatcaaaacatctttttttgggtacactttgtatatggaattgtgtattttcaaattttaacttattaaccttaatttttagtgaaaacctaggaagcaaaattttgaagtgttatatcagcattttataaatgagaaccatattataatttttagaaacatgtttccttataactttgtatattaataggcccaaatatatttagtctttctataatttaggaagccaagaacaaactaatattttcagcagtttattgtttttttttggaaatgatccagacatttactgaagattaatttataagatttcaaattacatgaaaagttcattaacatcctatttttaaaaacattcttttggtttattttttagagacaatgtcttgctgtgttacccaggctggagttcagtggctgttcacaggcacaattgtagcacactgcagcctcaaactccaactcacacaatcctcctgcctccgtttcctgagtagctggaactatagatgcatacctgcataccaccatgtctcacccttgcttatcccgtttataatccatccaattcttttttttttttttttttttgagacggagtctcgctctgtcacccaggctggagtgcagtggcgtgatctcggctcactgcaagctccgccttctgggttcatgccattctcctgcctcagcctcccgagtagctgggactacaggcgcccgccaccgcgcccagccaattttttgtatttttagtagagacgaggtttcaccgtgatctcgatctcctgacctcgtgatctgcccgccttggcctcccaaagtgctaggattacaggcgtgagccactgcacctggcccccaattcatttttaacaattattcctagattacttataaaaactgagatattagacatagctagtcatttcaagttattttcctgttaaccatttttattacctgtgagtatcatgtgttcaattaagaaccataaaaatgaaatatgtaggtattttgccagtaactcagaggacacagctgaagtcaataatacaaaattagttcaacttacagttatacaaagatcattctgtttttaagttgagtttatagttttatgaccttaaaaagtctaacagagacaaatataaaactgagtagtaaattcaggcaaaaattttaaagacacttatttttgatttaccaattattttaaaaccagcttatcagatgtttaagttatattaactaaaaggcacttgtgttaattactatatattttgtattagcactcatttatttgatgaatagaattccttaagggatttgtggccaactgccagattttaccacgtagacacaacatacaacatatatatacatatgtgtaaacacacctaaacatacacatacacaaacatagctttcattttagaattttagtcatacgatagtaatacaggcttgctggtttataaaagacagttattggattcaaattatatttctgagaaagtgggacctgctcagctgggtaaacatgcagaataggtaatcttatgaaagctgtgaaccaaaagttttggtaaatagcagtttggatttttaaaaaacctcttaccccacctccccaaccccttttttcccttttttcagtttcaaatgagtttaatgttaatatttaaatgcttacatttttagctaggactggctgaattgtataagaaaaaacaatctccaggtggccttgaatttttagtaacaaatcttttgtttgccattctggtttttttgactagtcagtgcaggcagggaagcattttagcagttgtggatgaggggtttttgttttgttcttttagcctttgcatagcaggcaagcaatttttatgctataccagagataccttatattattgccctgagctcaagattttgacctgtttgagagcctaatttttatacgtatttatctagttcttttaggctattaatcctttaattaactgttccatcaccctaagcagttattaggcaaacctaaatttacattaaaagggatacttcttaattctaggtgttggttgccagggaactattataatttataaagccattaatttaaggccctttaagacctttttttttctttttgttcttggctggaatgccgtaaggagtgagtttcatctcaacactggcagaaacagcagatttaaagtaggcagaaaaaaaattagagagcttagaagactctacatatcaactctatagctgcagtctcttggtactaagaataaaaaagcttggggagtttagacaaagcatagacaatctctatgatggtcattgatccaaaaacatgcatgaggaaaagccacatagctgacctgaagtcccagaaaagcaggcatgccttaatgtttgagaatttccattttgtttcttctcaatctcttaagagcaaagaaaattctgtaaatcctgacagataagtcaggtgtttggaccagtgttttaactggtggcgattgccctagtggctttaaaagagccatcctgtgcccaaaatttagaatgtttatttttgctcttgggagatgttcagaaacaggggaaaagagccaaatcatttacagatgcatgtaaccatatcgaaacgaaaccaaaatcagtgttcccaaaagtgttaacccagtcatgcagattaaaaaataatataaacacagaagaacccaaagtaaatttaccagaaaaggcatgcctcagaatccagagtactcagccaggcgcagtggcccatgcctgtaatcccagcactttgggaggccaaggcaggaggatcgcttgagcccatgagttcaagaccagcctcagcagtatagtgagacactgtctctaaaaaaaaattgtttttaaatccagagtactcaaaccagagggacacttgtctttatatcaaaaaggacttgccaggaaagacaaaaagtcttttgtcatcccaggagggatgtaaagtcctttattaaagtggtcttagaaccaagacaaatccaaagtcaagtcaaaaagcctctgccaaaagtgggaggctctgcctgagaaaagactcactggggcagaacagacaagctatgtaagcggagagcccaaagggctcctgtgagtactgcatactgattctgagatcaccacttctctctgaaatgtgtcctacttcaggttctactgctgaacaccatttatgtcaacacagagagaggctctctaaaagaaaactctatttgggaatacagcattgctgtagaaatacgcatgtcatgggccgtgcgcggtggcttatgcctgtaatcccagcactttgggaggctgaggtgggccgatcacgaggtcaggagtttgagaccagcctggccaacatagtgaaaccccctctctactaaaaatacaaaaaattagatgggtgtattggtgggtgcctatgatcccgctacttgggaggctgaggcagaagattggcttgaacctgagaagtggaggttgcagtgagcctagatgtgccactgcactccagcctgggcgacagtgcaaaactacgtctccaaaaaaaaaaaaaaaagacccatgtcatggtaaactacgtgtgtattcagggaagtaaaggaagacaaagattttaaagaaaaatgagggttgtataattgttttgaaataattgtcgttggttacaaagatcaatagcaagggtggtgccactctgaagttggacaggcagtggctaggcaaaagtattttgtgggtaacctttgtgaaaggttgcagtttttgtaacacaagctgctttattttcccaaaagctttcacagtacatagaaaatatattggacgtgtattaaatgtgccaaattagtcagcaatattacattaaaatatgtgttattacttgttaatgttcttaataagttgttcaggcagttataccagactatcttttctcattttccaatttataagtgtattatccaaaaatgttagttttagggtgaccactgtatattttggtattttttaaagctacccaattgtgtataatttataaaaatctttttttcataagacctaaaacttctgaacaatacataggtgcaaataaataaattcctttttatctcaaactcacttccactgccctccctgaagaaagccttttgttattgttgtcttgactaaatgtggcatgggagctaacattttcaagggaagctgatcttatctccgggctctagaagccaagacatgaggtatgtgtttaccgtctcttaggtgactctccagaactttcattctcaacctcctccctcactgccagttcctcctcagcttcttagccaagtggtagaggaaaaatggtattttatgtcaggactaagccatgtgctctgagccctgggtaagtctgcaaggcttctctagaactcatacataggtcaattattcctcctctgaaaacttaaactctggcaccactagctttttcctacagcatacatgggctcagtaaatcctctgttaagacaacaggaaaattaagacaatgtccttgcaagccccataactactttctatccctgctattcacagccaagtgtgtcgagaccagttcacacaaaccttgttgattttcggtttcaccccctccttactaaatcacccctccatttgctgcagttgcccttgcgtgctgtactcagacttggaggaagtgatgtcttattcaaggccagtttttgtactagtggttaaataaatggtttccaaattggagtcagaaggagagcttctaaaatgtaggttccctggcctcaattgtgagattctgctttagcaggtctggaattggagcactgggatctgcattttcagaaaacccaaaatgattatcagccaggacttaaacctctgctttagaccacattccctgtgggctttcagattttctatcaatgttcttccctcttcccagctcccacacattaaaactcagatcatgcagaaaagaagttacagttccttcatttcacatcaatttctcatgcatcccatctggttttgggaaggtgtgggacgaggtggatggccttaaacttgccaatcaaagataacgttctctttcgattcaaatagcctatctcaggcttaaaaccatctctttggataaatgctcagcttttcaaaggttcttcctagcttcttcctcatgatggcatctagtgggtgagaacagtcatctccaggtgacacaggaaagagtttctctaatgtatgtgctgaggtccttgacggtcctgctgctggtgctcatcctgccatctttgctggatgtcactgagtctactgggtaatgtaagtgggtccctggcttttgttcactgctgtcatgccctgctcctgaccacaactctgtcattgcctttggtctcaaggtctctaccttaatagcttccatgtcccaactatgggactgttaatctgctgggctttggagtgggtgggaagggatgatgttggaactttgggatgtactgaacatcttgctcaagctttgggaagccaacattttctcagactgactagacacctccttccaccaatgctgagctagtgctcctgtgccatactgggtaagcctctaagtcatgagtaggacttttttgagtggcttgcagtcttccccaggctatgccaggaaagtagttgactaaccctgctgctccaagactcgcatacccatcctgaagtttccgtttatttcccaacagggcaattgcaatctcaatcaatctctccctgccctgggagtcattccactcctgcctaatgaagagactcttctcacatcgtattctcagtttctcttatccatggttaggagtaaaactcatgttcagttgtccaagctttgcttttagtatgtgaatggagctcttagcatgtagaactcccttctcattctcagtaaagtctgactttgaagactacttatcatcttcctagagatgccaaagaataatcaagataataaaggcaggctctgagattcacagctgagtagcaactgtgctgttactctagtacacaccctctcctttcctgtgactgtcaggcttcagggcttacctttattggaaagacagcaggggggcatatatgaagaaaatggaatctttaatattgtcaaagtcttgacccaatagagacattcttgccccagactctcttgcttcagtgcctttgcctgttctggtcctaagtaccttgaatatccttctcttgatgccctgatataaaactctttattcctcaaagccaagttcaggttatcacctccaccacagacttttctttccctccccaaacttcattgcctcttctcatcactccctttgtaatttgtttatactggtaagagagcattcatcataattaggcctatctatgcctacctttcttgttaaattatgagctttgttctgccttggatatctctctggcttggatatctctctggcctttgctctgcacttccaaatgtatccattattcaagacccaggtttccagcctgatcaacatagcaagatcccatctctccaaaaaaaaaaaaaaaaaaaaattgtggggccgggtacagtggctcatgcctgtaatcccagcactttgggaggccgaggcaggtggatcatgaggtcacgagtttgagaccagtctggccaacatagtgaaaccccatctgtactaaaaatgcagaaaattagccgggtgtggtggtgtgtgcctgtaatcccagctactcgggaggctgaggcaggagaatcgcatgaacccgggaggcagaggttgcagtgagccgagattgcgccactgcactccagcctgggtgacattgcaagactccatctcaaaaaaaaaaaaaaaaaaaattagctgggcatggtggcaggcacctgtagtcccagctacttgagaggctgaggtgggaggattgcttgagcccaggaagtcgaggcttcatgagccatgtttgtgctactgcactctagcctggatgacaaagtgagatccttttctaaaaataaggacccagtttattttatttagttatttagttatttttgagaccaagtttcatcactcaggctggagtgcaatggcacagtcttgactcactgcaacctctgcctcctggattcaagcaattcttctgcctcagcctcttgagtagctgggattgcaggtgcccgccaccacacctggctaatttttgtatttttggtagagacagggtttcactatgttggccaggctggtctcaaactcctgacctcaggtgatccacctgccttggtctcccaaactgctgggattacaggtgtgagtcaccctgcctggccagaacccagtttaaattccatcctctctgcagagtcttccttaaccacccctattgaaagttacccctgcttcctacaagaagtggtacttggatgttcatgagatacctgtgcaaggctcctgtgggggtcctggggagacagtgacatggacactcatgaaaggaaccttggaatagcgagtgtgtgtgctataaaatgtgctttagatttgattaccaccacttaagttatgagctctgatatggtttgggtctccatccccacccaaatctcatcttgaattgtaatccctacatgttgagggaaggaagtaattgtattatgggggtggttctcccatgctgttctcatgatagtgaattctcacaggatctgatggttttataaatggtagtttttcctgtactttcacacactcacactctcttctgccaccttgtgaagaaggtgcctgcttccccttctgccataattgtaagtttcctgaggcctccccagctgtattagtctgatctcacgcggctaataaagagataccggagactgggtaatttataaaagaggtttaattgactcacagttttacatggctggggaggcctcacaattatggcagaaggtgaagggggagcaagacacatcttacatggcatcaggcgagagagcttgtgtaggggaactcccctttataaaaccatcagatctcgtgagacttattcactattacaagagcagcacgggaaagacccacccccatgattcagttacctctcactgggtccctcacataatatggggaattatgggagctccaattcaagatgagatttgggtggggacacagccaaactatatcaccagccatgtggaactgttgagtcaattaaacctctttcctttataaattacccagtctcaggtatttctttatagcagtgtgagaacagactaatacaagcaccttgaggtcagaggctaaaatcactttttcccaaacatttcctttttatatatgctacatctttgtgtctgcttcaacatttccagcagtgctttatatatggtaggcatgcaataaatgcttcttgatcgactgacaggtgctcagaagatctaggttggttgattctcttgtgatgccatcttttcctgagagctcattaatttttaagttgttttccttgaaatgcatggtatgtttcctccaccctgctctttgcctttcatagggttccattttgatcagctgctctcattgtctgttttgtgatcaaaggttctgatgaactttggaatatgtgtatgtttggagtgaggatggggtctggaggagatgcatggttgaggaccaattcacccaacccagcttacagaagtaaagcggccccttaggagcactgaagcattgctgtggatttcagaattaccttatttctttttcttttttttttttttttttttgagacgaggtctcgctctgtcgcccaggctggagtgcagtggcacaatctcagctcactgcaagctccgcctcctgggttcacaccattctcctccctcagcctccccagcagctgggactataggtgcacgccgccacgcctggctaatttttgtatttttagtggagacagggtttcaccgtgttagccaggatggtctcaatctcctgaccttgtgatccacccgcctcagcctcccaaagtgctgggattacaggcgtgagccaccgtgcccagccagcttctttcaaatcagagtaggccttccagtgtggcaggccataagatctgaagttttcaccctgttcctggaagccaagtggacagcaactaatttttactttctttattgcacatttggggcttgggggatagagtcagatgtgtgtcagttgaaactgtagctactgcattccactccttgggggatcgtagtgctcatgccaacagaaaacttcgaggctaataattactgtcttcagagtacaagacaggcacggaagttgttttggcataagaaaaccacgatttgcatcccacagtctaaggaagacgatgctgaattcagaagatggtgcaaaagtgtgacagttcagctgtggcggctgttgctgatgcatgggactattttatttacatttcctttcttcttttttaacagagacaggatcttgctgtgttgcccagcctggtcttaaactcctgggcccaag

SEQ ID NO: 182102 - DNA, 10445 bp, Homo sapiens
  Payload ID: 15864
  Gene Symbol: SMAD2
  Gene Name: SMAD family member 2
  Uniprot ID: Q15796
  ENST ID: ENST00000356825
  CDS Start-End: 401-1714
cggccgggaggcggggcgggccgtaggcaaagggaggtggggaggcggtggccggcgactccccgcgccccgctcgccccccggcccttcccgcggtgctcggcctcgttcctttcctcctccgctccctccgtcttccatacccgccccgcgcggctttcggccggcgtgcctcgcgccctaacgggcggctggaggcgccaatcagcgggcggcagggtgccagccccggggctgcgccggcgaatcggcggggcccgcggcccagggtggcaggcgggtctacccgcgcggccgcggcggcggagaagcagctcgccagccagcagcccgccagccgccgggaggttcgatacaagaggctgttttcctagcgtggcttgctgcctttggtaagaacatgtcgtccatcttgccattcacgccgccagttgtgaagagactgctgggatggaagaagtcagctggtgggtctggaggagcaggcggaggagagcagaatgggcaggaagaaaagtggtgtgagaaagcagtgaaaagtctggtgaagaagctaaagaaaacaggacgattagatgagcttgagaaagccatcaccactcaaaactgtaatactaaatgtgttaccataccaaggtctcttgatggtcgtctccaggtatcccatcgaaaaggattgccacatgttatatattgccgattatggcgctggcctgatcttcacagtcatcatgaactcaaggcaattgaaaactgcgaatatgcttttaatcttaaaaaggatgaagtatgtgtaaacccttaccactatcagagagttgagacaccagttttgcctccagtattagtgccccgacacaccgagatcctaacagaacttccgcctctggatgactatactcactccattccagaaaacactaacttcccagcaggaattgagccacagagtaattatattccagaaacgccacctcctggatatatcagtgaagatggagaaacaagtgaccaacagttgaatcaaagtatggacacaggctctccagcagaactatctcctactactctttcccctgttaatcatagcttggatttacagccagttacttactcagaacctgcattttggtgttcgatagcatattatgaattaaatcagagggttggagaaaccttccatgcatcacagccctcactcactgtagatggctttacagacccatcaaattcagagaggttctgcttaggtttactctccaatgttaaccgaaatgccacggtagaaatgacaagaaggcatataggaagaggagtgcgcttatactacataggtggggaagtttttgctgagtgcctaagtgatagtgcaatctttgtgcagagccccaattgtaatcagagatatggctggcaccctgcaacagtgtgtaaaattccaccaggctgtaatctgaagatcttcaacaaccaggaatttgctgctcttctggctcagtctgttaatcagggttttgaagccgtctatcagctaactagaatgtgcaccataagaatgagttttgtgaaagggtggggagcagaataccgaaggcagacggtaacaagtactccttgctggattgaacttcatctgaatggacctctacagtggttggacaaagtattaactcagatgggatccccttcagtgcgttgctcaagcatgtcataaagcttcaccaatcaagtcccatgaaaagacttaatgtaacaactcttctgtcatagcattgtgtgtggtccctatggactgtttactatccaaaagttcaagagagaaaacagcacttgaggtctcatcaattaaagcaccttgtggaatctgtttcctatatttgaatattagatgggaaaattagtgtctagaaatactctcccattaaagaggaagagaagattttaaagacttaatgatgtcttattgggcataaaactgagtgtcccaaaggtttattaataacagtagtagttatgtgtacaggtaatgtatcatgatccagtatcacagtattgtgctgtttatatacatttttagtttgcatagatgaggtgtgtgtgtgcgctgcttcttgatctaggcaaacctttataaagttgcagtacctaatctgttattcccacttctctgttatttttgtgtgtcttttttaatatataatatatatcaagattttcaaattatttagaagcagattttcctgtagaaaaactaatttttctgccttttaccaaaaataaactcttgggggaagaaaagtggattaacttttgaaatccttgaccttaatgtgttcagtggggcttaaacagtcattctttttgtggttttttgtttttttttgtttttttttttaactgctaaatcttattataaggaaaccatactgaaaacctttccaagcctcttttttccattcccatttttgtcctcataatcaaaacagcataacatgacatcatcaccagtaatagttgcattgatactgctggcaccagttaattctgggatacagtaagaattcatatggagaaagtccctttgtcttatgcccaaatttcaacaggaataattggcttgtataatctagcagtctgttgatttatccttccacctcataaaaaatgcataggtggcagtataattattttcagggatatgctagaattacttccacatatttatccctttttaaaaaagctaatctataaataccgtttttccaaaggtattttacaatatttcaacagcagaccttctgctcttcgagtagtttgatttggtttagtaaccagattgcattatgaaatgggccttttgtaaatgtaattgtttctgcaaaatacctagaaaagtgatgctgaggtaggatcagcagatatgggccatctgtttttaaagtatgttgtattcagtttataaattgattgttattctacacataattatgaattcagaattttaaaaattgggggaaaagccatttatttagcaagttttttagcttataagttacctgcagtctgagctgttcttaactgatcctggttttgtgattgacaatatttcatgctctgtagtgagaggagatttccgaaactctgttgctagttcattctgcagcaaataattattatgtctgatgttgactcattgcagtttaaacatttcttcttgtttgcatcttagtagaaatggaaaataaccactcctggtcgtcttttcataaattttcatatttttgaagctgtctttggtacttgttctttgaaatcatatccacctgtctctataggtatcattttcaatactttcaacatttggtggttttctattgggtactccccattttcctatatttgtgtgtatatgtatgtgttcatgtaaatttggtatagtaattttttattcattcaacaaatatttattgttcacctgtttgtaccaggaacttttcttagtctttgggtaaaggtgaacaagacaactacagttcctgcctttgctgagacagcagttacactaacccttaattatcttacttgtctatgaaggagataaacagggtactgtactggagaataacagatgggatgcttcaggtaggacatcaaggaaagcctctaaggaaaggatgcatgagctaacacctgacattaaagaagcaagccaagtgaggagccaggggagataagcattcctggcaaagagaatagcatcaaatgcaaaaaggttcacactaaaggaaactcctgattaggtattaatgctttatacagaaacctctatacaaatccaaacttgaagatcagaatggttctacagttcataacattttgaaggtggccttattttgtgatagtctgcttcatgtgattctcactaacatatctccttcctcaacctttgctgtaaaaatttcatttgcaccacatcagtactacttaatttaacaagcttttgttgtgtaagctctcactgttttagtgccctgctgcttgcttccagactttgtgctgtccagtaattatgtcttccactacccatcttgtgagcagagtaaatgtcctaggtaataccactatcaggcctgtaggagatactcagtggagcctctgcccttctttttcttacttgagaacttgtaatggtgttagggaacagttgtaggggcagaaaacaactctgaaagtggtagaaggtcctgatcttggtggttactcttgcattactgtgttaggtcaagcagtgcctactatgctgtttcagtagtggagcgcatctctacagttctgatgcgatttttctgtacagtatgaaattgggactcaactctttgaaaacacctattgagcagttatacctgttgagcagtttacttcctggttgtaattacatttgtgtgaatgtgtttgatgctttttaacgagatgatgttttttgtattttatctactgtggcctgattttttttttgttttctgcccctccccccatttataggtgtggttttcatttttctaagtgatagaatcccctctttgttgaatttttgtctttatttaaattagcaacattacttaggatttattcttcacaatactgttaattttctaggaatgatgacctgagaaccgaatggccatgctttctatcacatttctaagatgagtaatattttttccagtaggttccacagagacaccttgggggctggcttaggggaggctgttggagttctcactgacttagtggcatatttattctgtactgaagaactgcatggggtttcttttggaaagagtttcattgctttaaaaagaagctcagaaagtctttataaccactggtcaacgattagaaaaatataactggatttaggcctaccttctggaataccgctgattgtgctctttttatcctactttaaagaagctttcatgattagatttgagctatatcagttataccgattataccttataatacacattcagttagtaaacatttattgatgcctgttgtttgcccagccactgtgatggatattgaataataaaaagatgactaggacggggccctgacccttgagctgtgcttggtcttgtagaggttgtgttttttttcctcaggacctgtcactttggcagaaggaaatctgcctaatttttcttgaaagctaaattttctttgtaagtttttacaaattgtttaatacctagttgtattttttaccttaagccacattgagttttgcttgatttgtctgtcttttaaacactgtcaaatgctttcccttttgttaaaattattttaatttcactttttttgtgcccttgtcaatttaagactaagactttgaaggtaaaacaaacaaacaaacatcagtcttagtctcttgctagttgaaatcaaataaaagaaaatatatacccagttggtttctctacctcttaaaagcttcccatatatacctttaagatccttctcttttttctttaactactaaataggttcagcatttattcagtgttagataccctcttcgtctgagggtggcgtaggtttatgttgggatataaagtaacacaagacaatcttcactgtacataaaatatgtcttcatgtacagtctttactttaaaagctgaacattccaatttgcgccttccctcccaagcccctgcccaccaagtatctctttagatatctagtctgtggacatgaacaatgaatacttttttcttactctgatcgaaggcattgatacttagacatatcaaacatttcttcctttcatatgctttactttgctaaatctattatattcattgcctgaattttattcttcctttctacctgacaacacacatccaggtggtacttgctggttatcctctttcttgttagccttgttttttgttttttttttttttttttgagagggagtctcgctctgttgcccaacctggagtgcagtggtgcgatcttggttcactgcaagctccgcctcccgggttcacgccatgcttctgcctcagcctcccaagtagctgggactacaggcgcccaccaccacactcggctaattttttgtatttttagtagagacggggtttcaccgtgttggccaggatggtctcgatctcctgacctcgtgatctgtccacctcggcttcccaaagtgctgggattacaggcatgagccaccgcgcccagcctagccatatttttatctgcatatatcagaatgtttctctcctttgaacttattaacaaaaaaggaacatgcttttcatacctagagtcctaatttcttcatcatgaaggttgctattcaaattgatcaatcattttaattttacaaatggctcaaaaattctgttcagtaaatgtctttgtgactggcaaatggcataaattatgtttaagattatgaacttttctgacagttgcagccaatgttttccctacgataccagatttccatcttggggcatattggattgttgtatttaagacagtcagaataatgatagtgtgtggtctccagaggtagtcagaatcctgctattgagttctttttatatcttccttttcaattttttattaccattttgtttgtttagactacactttgtagggattgaggggcaaattatctcttggagtggaattcctgtgttttgagccttacaaccaggaaatatgagctatactagatagcctcatgatagcatttacgataagaacttatctcgtgtgttcatgtaattttttgagtaggaactgttttatcttgaatattgtagctaactatatatagcagaactgcctcagtctttttaagaaggaaataaataatatatgtgtatgaatttatatatacatatacactcatagacaaacttaacagttggggtcattctaacagttaaaacaattgttccattgtttaaatctcagatcctggtaaaatgttcttaatttgtctgtgtacattttcctttcatggacagaccattggagtacattaattttcttaatctgccatttggcagttcatttaatataccattttttggcaacttggtaactaagaatcacagccaaaatttgttaacatcaaagaaagctctgccatataccccgttactaaattattatacatccagcagattctgggatgtactaacttagggttaactttgttgttgttgataatactagattgctccctctttaattcttcttctggtgcaaggttgctgcttaagttaccctgggaaatactactacaaggtcaaattttctagtatcttacagcctgattgaaggtgattcagatctttgctcaatataaatggattttccaagattctctgggccatccttgacccacaggtgatctcgctggagtatattaacttaacttcagtgccagttggtttggtgccatgagatccataatgaatccagaacttcaccattgcttagatataagagtcccttggaagaataatgccactgatgatgggggtcagaaggtgtattaactcaacatagagggcttttagatttttcttcaaaaaaatttcgagaaaagtattcttttaccctccaaacagttaacagctcttagtttctccaaatatgctctttgatttacttatttttaattaaagatggtaatttattgaacaatgaaatccgtaatatattgatttaaggacaaaagtgaagttttagaattataaaagtacttaaatattatatattttccatttcataattgttttcctttctctgtggctttaaagtttttgactattttacaatgttaatcactaggtaacttgccatatttctggttctatattaagttctatcctttataatgctgttattataaagctggtttttagcatttgtctgtagcaatagaaattttactaagtctctgttctcccagtaagttttttcttttctcagtaagtccctaagaaaacatttgtttgccactcttactattcccaatcttggattgttcgagctgaaaaaaaatttgatgagaaacaggaggatccttttctggtgaatataggttcctgctttaagaatgtggaaatccattgctttatataactaatatacacacagattaattaaaattgtgagaaataattcacacatgacaagtaggtaacatgcatgagttttgaatttttttaaaaacccaactgtttgacaaaatatagaacccaaattggtactttcttagaccagtgtaacctcacacctcagttttgcttttccaaccctgacttgaaaggcatatttgtatctttttattagtgatagtgaagctgtgacactaaccttttatacaaaagagtaaagaaagaaaaactacagcgattaagatgagaacagttctgcagttgttgaactagatcacagcattgtaggcagaataaaaaatgttcatatctgagaatattcctttcgccatcttttcccaaggccagacctcctggtggagcacagttaaaagtaacattctgggcctttgtaatcggagggctgtgtctccagctggcagcctttgttttaatatataatgcaggactgtggaaaacagttggcatagaatattttcacctaaaaaagaaagaaaagacatacaaaactggattaattgcaaaaagagaatacagtaaaataccatataactggacaaagctagaagaacctttagaagatttgtctgaaaacagatttcaagagtgagcttttatacactgctcactaatttgcttgattactaccaactcttcttaaagttaacacgtttaaggtatttctggacttcctagccttttagcaagcttagaggaactagccattagctagtgatgtaaaaatattttggggactgatgcccttaaaggttatgcccttgaaagttcttaccttttctctagtgatattaaggaacgagtgggtagtgttctcagggtgaccagctgccctaaagtgcctgggattgagggtttccctggatgcgggactttccctggatacaaaacttttagcagagttttgtatatatgtggatttttctgataagtagcacatcagaggccttaaccactgcccaaaagcgattctccattgagagtacatatcttgaacttaagaaattcatttgctctgatttttaatcttgtaaagtttttgctaaactcaaaacaagtcccaggcacaccagaaggagctgaccaccttaggtgttcttgtgatttatccttacttccctatgttgtcatagttgcttctaaactcagctgcactatggctgtcaacatttctgatacttattgggatatgtgccatccagtcatttagtactttgaatggaacatgagatttataacacaggtaatagctgaaggtaccagtatggtggtgagactcacacttagtgatccagctaaggtaactgatgttataatggaacagagaagaggccaactagatagctaagttcttctgaacctatgtgtatatgtaagtacaaatcatgcgtccttatggggttaaacttaatctgaaatttacatttttcatagtaaaaggaaaccaattgttgcagatttcttttcttgtgaggaaatacatggcctttgatgctctggcgtctactgcatttcccagtctgttctgctcgagaagccagaatgtgttgttaacatttttccgtgaatgttgtgttaaaatgattaaatgcatcagccaatggcaagtgaaggaattgggtgtcctgatgcagactgagcagtttctctcaattgtagcctcatactcataaggtgcttaccagctagaacattgagcacgtgaggtgagattttttttctctgatggcattaactttgtaatgcaatatgatggatgcagaccctgttcttgtttccctctggaagtccttagtggctgcatccttggtgcactgtgatggagatattaaatgtgttctttgtgagctttcgttctatgattgtcaaaagtacgatgtggttccttttttatttttattaaacaatgagctgaggctttattacagctggttttcaagttaaaattgttgaatactgatgtctttctcccacctacaccaaatattttagtctatttaaagtacaaaaaaagttctgcttaagaaaacattgcttacatgtcctgtgatttctggtcaatttttatatatatttgtgtgcatcatctgtatgtgctttcactttttaccttgtttgctcttacctgtgttaacagccctgtcaccgttgaaaggtggacagttttcctagcattaaaagaaagccatttgagttgtttaccatgtt

SEQ ID NO: 182103 - DNA, 12075 bp, Homo sapiens
  Payload ID: 15864
  Gene Symbol: SMAD2
  Gene Name: SMAD family member 2
  Uniprot ID: Q15796
  ENST ID: ENST00000402690
  CDS Start-End: 396-1799
gggaggcggggcgggccgtaggcaaagggaggtggggaggcggtggccggcgactccccgcgccccgctcgccccccggcccttcccgcggtgctcggcctcgttcctttcctcctccgctccctccgtcttccatacccgccccgcgcggctttcggccggcgtgcctcgcgccctaacgggcggctggaggcgccaatcagcgggcggcagggtgccagccccggggctgcgccggcgaatcggcggggcccgcggcccagggtggcaggcgggtctacccgcgcggccgcggcggcggagaagcagctcgccagccagcagcccgccagccgccgggaggttcgatacaagaggctgttttcctagcgtggcttgctgcctttggtaagaacatgtcgtccatcttgccattcacgccgccagttgtgaagagactgctgggatggaagaagtcagctggtgggtctggaggagcaggcggaggagagcagaatgggcaggaagaaaagtggtgtgagaaagcagtgaaaagtctggtgaagaagctaaagaaaacaggacgattagatgagcttgagaaagccatcaccactcaaaactgtaatactaaatgtgttaccataccaagcacttgctctgaaatttggggactgagtacaccaaatacgatagatcagtgggatacaacaggcctttacagcttctctgaacaaaccaggtctcttgatggtcgtctccaggtatcccatcgaaaaggattgccacatgttatatattgccgattatggcgctggcctgatcttcacagtcatcatgaactcaaggcaattgaaaactgcgaatatgcttttaatcttaaaaaggatgaagtatgtgtaaacccttaccactatcagagagttgagacaccagttttgcctccagtattagtgccccgacacaccgagatcctaacagaacttccgcctctggatgactatactcactccattccagaaaacactaacttcccagcaggaattgagccacagagtaattatattccagaaacgccacctcctggatatatcagtgaagatggagaaacaagtgaccaacagttgaatcaaagtatggacacaggctctccagcagaactatctcctactactctttcccctgttaatcatagcttggatttacagccagttacttactcagaacctgcattttggtgttcgatagcatattatgaattaaatcagagggttggagaaaccttccatgcatcacagccctcactcactgtagatggctttacagacccatcaaattcagagaggttctgcttaggtttactctccaatgttaaccgaaatgccacggtagaaatgacaagaaggcatataggaagaggagtgcgcttatactacataggtggggaagtttttgctgagtgcctaagtgatagtgcaatctttgtgcagagccccaattgtaatcagagatatggctggcaccctgcaacagtgtgtaaaattccaccaggctgtaatctgaagatcttcaacaaccaggaatttgctgctcttctggctcagtctgttaatcagggttttgaagccgtctatcagctaactagaatgtgcaccataagaatgagttttgtgaaagggtggggagcagaataccgaaggcagacggtaacaagtactccttgctggattgaacttcatctgaatggacctctacagtggttggacaaagtattaactcagatgggatccccttcagtgcgttgctcaagcatgtcataaagcttcaccaatcaagtcccatgaaaagacttaatgtaacaactcttctgtcatagcattgtgtgtggtccctatggactgtttactatccaaaagttcaagagagaaaacagcacttgaggtctcatcaattaaagcaccttgtggaatctgtttcctatatttgaatattagatgggaaaattagtgtctagaaatactctcccattaaagaggaagagaagattttaaagacttaatgatgtcttattgggcataaaactgagtgtcccaaaggtttattaataacagtagtagttatgtgtacaggtaatgtatcatgatccagtatcacagtattgtgctgtttatatacatttttagtttgcatagatgaggtgtgtgtgtgcgctgcttcttgatctaggcaaacctttataaagttgcagtacctaatctgttattcccacttctctgttatttttgtgtgtcttttttaatatataatatatatcaagattttcaaattatttagaagcagattttcctgtagaaaaactaatttttctgccttttaccaaaaataaactcttgggggaagaaaagtggattaacttttgaaatccttgaccttaatgtgttcagtggggcttaaacagtcattctttttgtggttttttgtttttttttgtttttttttttaactgctaaatcttattataaggaaaccatactgaaaacctttccaagcctcttttttccattcccatttttgtcctcataatcaaaacagcataacatgacatcatcaccagtaatagttgcattgatactgctggcaccagttaattctgggatacagtaagaattcatatggagaaagtccctttgtcttatgcccaaatttcaacaggaataattggcttgtataatctagcagtctgttgatttatccttccacctcataaaaaatgcataggtggcagtataattattttcagggatatgctagaattacttccacatatttatccctttttaaaaaagctaatctataaataccgtttttccaaaggtattttacaatatttcaacagcagaccttctgctcttcgagtagtttgatttggtttagtaaccagattgcattatgaaatgggccttttgtaaatgtaattgtttctgcaaaatacctagaaaagtgatgctgaggtaggatcagcagatatgggccatctgtttttaaagtatgttgtattcagtttataaattgattgttattctacacataattatgaattcagaattttaaaaattgggggaaaagccatttatttagcaagttttttagcttataagttacctgcagtctgagctgttcttaactgatcctggttttgtgattgacaatatttcatgctctgtagtgagaggagatttccgaaactctgttgctagttcattctgcagcaaataattattatgtctgatgttgactcattgcagtttaaacatttcttcttgtttgcatcttagtagaaatggaaaataaccactcctggtcgtcttttcataaattttcatatttttgaagctgtctttggtacttgttctttgaaatcatatccacctgtctctataggtatcattttcaatactttcaacatttggtggttttctattgggtactccccattttcctatatttgtgtgtatatgtatgtgttcatgtaaatttggtatagtaattttttattcattcaacaaatatttattgttcacctgtttgtaccaggaacttttcttagtctttgggtaaaggtgaacaagacaactacagttcctgcctttgctgagacagcagttacactaacccttaattatcttacttgtctatgaaggagataaacagggtactgtactggagaataacagatgggatgcttcaggtaggacatcaaggaaagcctctaaggaaaggatgcatgagctaacacctgacattaaagaagcaagccaagtgaggagccaggggagataagcattcctggcaaagagaatagcatcaaatgcaaaaaggttcacactaaaggaaactcctgattaggtattaatgctttatacagaaacctctatacaaatccaaacttgaagatcagaatggttctacagttcataacattttgaaggtggccttattttgtgatagtctgcttcatgtgattctcactaacatatctccttcctcaacctttgctgtaaaaatttcatttgcaccacatcagtactacttaatttaacaagcttttgttgtgtaagctctcactgttttagtgccctgctgcttgcttccagactttgtgctgtccagtaattatgtcttccactacccatcttgtgagcagagtaaatgtcctaggtaataccactatcaggcctgtaggagatactcagtggagcctctgcccttctttttcttacttgagaacttgtaatggtgttagggaacagttgtaggggcagaaaacaactctgaaagtggtagaaggtcctgatcttggtggttactcttgcattactgtgttaggtcaagcagtgcctactatgctgtttcagtagtggagcgcatctctacagttctgatgcgatttttctgtacagtatgaaattgggactcaactctttgaaaacacctattgagcagttatacctgttgagcagtttacttcctggttgtaattacatttgtgtgaatgtgtttgatgctttttaacgagatgatgttttttgtattttatctactgtggcctgattttttttttgttttctgcccctccccccatttataggtgtggttttcatttttctaagtgatagaatcccctctttgttgaatttttgtctttatttaaattagcaacattacttaggatttattcttcacaatactgttaattttctaggaatgatgacctgagaaccgaatggccatgctttctatcacatttctaagatgagtaatattttttccagtaggttccacagagacaccttgggggctggcttaggggaggctgttggagttctcactgacttagtggcatatttattctgtactgaagaactgcatggggtttcttttggaaagagtttcattgctttaaaaagaagctcagaaagtctttataaccactggtcaacgattagaaaaatataactggatttaggcctaccttctggaataccgctgattgtgctctttttatcctactttaaagaagctttcatgattagatttgagctatatcagttataccgattataccttataatacacattcagttagtaaacatttattgatgcctgttgtttgcccagccactgtgatggatattgaataataaaaagatgactaggacggggccctgacccttgagctgtgcttggtcttgtagaggttgtgttttttttcctcaggacctgtcactttggcagaaggaaatctgcctaatttttcttgaaagctaaattttctttgtaagtttttacaaattgtttaatacctagttgtattttttaccttaagccacattgagttttgcttgatttgtctgtcttttaaacactgtcaaatgctttcccttttgttaaaattattttaatttcactttttttgtgcccttgtcaatttaagactaagactttgaaggtaaaacaaacaaacaaacatcagtcttagtctcttgctagttgaaatcaaataaaagaaaatatatacccagttggtttctctacctcttaaaagcttcccatatatacctttaagatccttctcttttttctttaactactaaataggttcagcatttattcagtgttagataccctcttcgtctgagggtggcgtaggtttatgttgggatataaagtaacacaagacaatcttcactgtacataaaatatgtcttcatgtacagtctttactttaaaagctgaacattccaatttgcgccttccctcccaagcccctgcccaccaagtatctctttagatatctagtctgtggacatgaacaatgaatacttttttcttactctgatcgaaggcattgatacttagacatatcaaacatttcttcctttcatatgctttactttgctaaatctattatattcattgcctgaattttattcttcctttctacctgacaacacacatccaggtggtacttgctggttatcctctttcttgttagccttgttttttgttttttttttttttttttgagagggagtctcgctctgttgcccaacctggagtgcagtggtgcgatcttggttcactgcaagctccgcctcccgggttcacgccatgcttctgcctcagcctcccaagtagctgggactacaggcgcccaccaccacactcggctaattttttgtatttttagtagagacggggtttcaccgtgttggccaggatggtctcgatctcctgacctcgtgatctgtccacctcggcttcccaaagtgctgggattacaggcatgagccaccgcgcccagcctagccatatttttatctgcatatatcagaatgtttctctcctttgaacttattaacaaaaaaggaacatgcttttcatacctagagtcctaatttcttcatcatgaaggttgctattcaaattgatcaatcattttaattttacaaatggctcaaaaattctgttcagtaaatgtctttgtgactggcaaatggcataaattatgtttaagattatgaacttttctgacagttgcagccaatgttttccctacgataccagatttccatcttggggcatattggattgttgtatttaagacagtcagaataatgatagtgtgtggtctccagaggtagtcagaatcctgctattgagttctttttatatcttccttttcaattttttattaccattttgtttgtttagactacactttgtagggattgaggggcaaattatctcttggagtggaattcctgtgttttgagccttacaaccaggaaatatgagctatactagatagcctcatgatagcatttacgataagaacttatctcgtgtgttcatgtaattttttgagtaggaactgttttatcttgaatattgtagctaactatatatagcagaactgcctcagtctttttaagaaggaaataaataatatatgtgtatgaatttatatatacatatacactcatagacaaacttaacagttggggtcattctaacagttaaaacaattgttccattgtttaaatctcagatcctggtaaaatgttcttaatttgtctgtgtacattttcctttcatggacagaccattggagtacattaattttcttaatctgccatttggcagttcatttaatataccattttttggcaacttggtaactaagaatcacagccaaaatttgttaacatcaaagaaagctctgccatataccccgttactaaattattatacatccagcagattctgggatgtactaacttagggttaactttgttgttgttgataatactagattgctccctctttaattcttcttctggtgcaaggttgctgcttaagttaccctgggaaatactactacaaggtcaaattttctagtatcttacagcctgattgaaggtgattcagatctttgctcaatataaatggattttccaagattctctgggccatccttgacccacaggtgatctcgctggagtatattaacttaacttcagtgccagttggtttggtgccatgagatccataatgaatccagaacttcaccattgcttagatataagagtcccttggaagaataatgccactgatgatgggggtcagaaggtgtattaactcaacatagagggcttttagatttttcttcaaaaaaatttcgagaaaagtattcttttaccctccaaacagttaacagctcttagtttctccaaatatgctctttgatttacttatttttaattaaagatggtaatttattgaacaatgaaatccgtaatatattgatttaaggacaaaagtgaagttttagaattataaaagtacttaaatattatatattttccatttcataattgttttcctttctctgtggctttaaagtttttgactattttacaatgttaatcactaggtaacttgccatatttctggttctatattaagttctatcctttataatgctgttattataaagctggtttttagcatttgtctgtagcaatagaaattttactaagtctctgttctcccagtaagttttttcttttctcagtaagtccctaagaaaacatttgtttgccactcttactattcccaatcttggattgttcgagctgaaaaaaaatttgatgagaaacaggaggatccttttctggtgaatataggttcctgctttaagaatgtggaaatccattgctttatataactaatatacacacagattaattaaaattgtgagaaataattcacacatgacaagtaggtaacatgcatgagttttgaatttttttaaaaacccaactgtttgacaaaatatagaacccaaattggtactttcttagaccagtgtaacctcacacctcagttttgcttttccaaccctgacttgaaaggcatatttgtatctttttattagtgatagtgaagctgtgacactaaccttttatacaaaagagtaaagaaagaaaaactacagcgattaagatgagaacagttctgcagttgttgaactagatcacagcattgtaggcagaataaaaaatgttcatatctgagaatattcctttcgccatcttttcccaaggccagacctcctggtggagcacagttaaaagtaacattctgggcctttgtaatcggagggctgtgtctccagctggcagcctttgttttaatatataatgcaggactgtggaaaacagttggcatagaatattttcacctaaaaaagaaagaaaagacatacaaaactggattaattgcaaaaagagaatacagtaaaataccatataactggacaaagctagaagaacctttagaagatttgtctgaaaacagatttcaagagtgagcttttatacactgctcactaatttgcttgattactaccaactcttcttaaagttaacacgtttaaggtatttctggacttcctagccttttagcaagcttagaggaactagccattagctagtgatgtaaaaatattttggggactgatgcccttaaaggttatgcccttgaaagttcttaccttttctctagtgatattaaggaacgagtgggtagtgttctcagggtgaccagctgccctaaagtgcctgggattgagggtttccctggatgcgggactttccctggatacaaaacttttagcagagttttgtatatatgtggatttttctgataagtagcacatcagaggccttaaccactgcccaaaagcgattctccattgagagtacatatcttgaacttaagaaattcatttgctctgatttttaatcttgtaaagtttttgctaaactcaaaacaagtcccaggcacaccagaaggagctgaccaccttaggtgttcttgtgatttatccttacttccctatgttgtcatagttgcttctaaactcagctgcactatggctgtcaacatttctgatacttattgggatatgtgccatccagtcatttagtactttgaatggaacatgagatttataacacaggtaatagctgaaggtaccagtatggtggtgagactcacacttagtgatccagctaaggtaactgatgttataatggaacagagaagaggccaactagatagctaagttcttctgaacctatgtgtatatgtaagtacaaatcatgcgtccttatggggttaaacttaatctgaaatttacatttttcatagtaaaaggaaaccaattgttgcagatttcttttcttgtgaggaaatacatggcctttgatgctctggcgtctactgcatttcccagtctgttctgctcgagaagccagaatgtgttgttaacatttttccgtgaatgttgtgttaaaatgattaaatgcatcagccaatggcaagtgaaggaattgggtgtcctgatgcagactgagcagtttctctcaattgtagcctcatactcataaggtgcttaccagctagaacattgagcacgtgaggtgagattttttttctctgatggcattaactttgtaatgcaatatgatggatgcagaccctgttcttgtttccctctggaagtccttagtggctgcatccttggtgcactgtgatggagatattaaatgtgttctttgtgagctttcgttctatgattgtcaaaagtacgatgtggttccttttttatttttattaaacaatgagctgaggctttattacagctggttttcaagttaaaattgttgaatactgatgtctttctcccacctacaccaaatattttagtctatttaaagtacaaaaaaagttctgcttaagaaaacattgcttacatgtcctgtgatttctggtcaatttttatatatatttgtgtgcatcatctgtatgtgctttcactttttaccttgtttgctcttacctgtgttaacagccctgtcaccgttgaaaggtggacagttttcctagcattaaaagaaagccatttgagttgtttaccatgttactatgggactaatttttaattgttttaatttttatttaaactgatctttttttatatgggattacattttggtgttcactccctaaattatatggaaaccaaaaaaagtgattgtatttcacatatggacatatgattttaagagtacatgtttttgtttttttaatttggtgttacataaaagattatcctatccccccgggagataaatttatactacttaatataaccccacaacaggcgcacaccacacactgcacagtgctatttatacatttttatttatttcagagtttgcctatgctacattagcgctctaatacataagatctatgctgtaaacaaaaacatcttcaaagttgaaatttgctgaaatatacttttaacaaaataacatttttaaggctccattgaaaaatactagataagatataatctcatataatcagtatgaataattttaaaaatgagaaatatttaggtcagccacacttcctttgtgccttgcaagaattcagttctgtggatgaatcagtactggttagcagactgttttctgcaaaccattttaaacatgctttagtatgcaacaaaaagggacctcaaatgctaaaatacactattttacgtggcattgaatagccttgggactggtgtagttttatcaacacttttttattaggaagaaacccaagaaaatttactgtaattgctaccacctgccactgtataaataatctaaaagggacttcccaacattgaacaacaacattgagggctgactcgagatccttctacattgtcacctcagcctggctttgcctgtcactgcttagcttgaagtagtgacactgttctgtatcaggagatttttataatggccctagcatccataattccacatgttcatcaaatggctgaagagtatgagagaagtattaaggtctatgtttgggctgtctccccacttggcatattctgtttttccctcttcaaaatagattgaaagcctcttagtgcaggaagcaggcatcagtatcaaactgatgtcatccaatgtaattattttaagctccaggtttgtctaagtttgggtgaagaatgttcaggaacatgtttgcaacatacagttatccagcttaccctttgacagattcacccttctcatcaaaatagtaagcccaacctaaaaattataagtttacaaataaaggaatagaaaaacccaaaaagctaatttacacataaaaattatcttttgctgcaataaataggtatggaaatatttgtagaattggtttaactgattttgtaaaacaaatgtcatgctattttgccatagtgagacatgcagtaattcttaaaatcacattaatagaaggcaagaacattgaatcagacttagcagataacagattcagtgataaatgaacaatagactaagcatacttaggaagctacatgagaacagaatgtattactgtgctcccgtccaaactgcatgactttattggttatagaataaatggaatttgagatgggga

SEQ ID NO: 182104 - DNA, 828 bp, Homo sapiens
  Payload ID: 15864
  Gene Symbol: SMAD2
  Gene Name: SMAD family member 2
  ENST ID: ENST00000586514
  CDS Start-End: 178-828
agcagctcgccagccagcagcccgccagccgccgggagccccctccatcccatcggaagaggaaggaacaaaaggtcccggaccccccggatctgacggggcgggacctggcgccaccttgcaggttcgatacaagaggctgttttcctagcgtggcttgctgcctttggtaagaacatgtcgtccatcttgccattcacgccgccagttgtgaagagactgctgggatggaagaagtcagctggtgggtctggaggagcaggcggaggagagcagaatgggcaggaagaaaagtggtgtgagaaagcagtgaaaagtctggtgaagaagctaaagaaaacaggacgattagatgagcttgagaaagccatcaccactcaaaactgtaatactaaatgtgttaccataccaagcacttgctctgaaatttggggactgagtacaccaaatacgatagatcagtgggatacaacaggcctttacagcttctctgaacaaaccaggtctcttgatggtcgtctccaggtatcccatcgaaaaggattgccacatgttatatattgccgattatggcgctggcctgatcttcacagtcatcatgaactcaaggcaattgaaaactgcgaatatgcttttaatcttaaaaaggatgaagtatgtgtaaacccttaccactatcagagagttgagacaccagttttgcctccagtattagtgccccgacacaccgagatcctaacagaacttccgcctctggatgactatactcactccattccagaaaacactaacttcccagcaggaattgagccacagagtaattatatt

SEQ ID NO: 182105 - DNA, 527 bp, Homo sapiens
  Payload ID: 15864
  Gene Symbol: SMAD2
  Gene Name: SMAD family member 2
  ENST ID: ENST00000589877
  CDS Start-End: 200-527
cggccgcggcggcggagaagcagctcgccagccagcagcccgccagccgccgggaggtggccccctccatcccatcggaagaggaaggaacaaaaggtcccggaccccccggatctgacggggcgggacctggcgccaccttgcaggttcgatacaagaggctgttttcctagcgtggcttgctgcctttggtaagaacatgtcgtccatcttgccattcacgccgccagttgtgaagagactgctgggatggaagaagtcagctggtgggtctggaggagcaggcggaggagagcagaatgggcaggaagaaaagtggtgtgagaaagcagtgaaaagtctggtgaagaagctaaagaaaacaggacgattagatgagcttgagaaagccatcaccactcaaaactgtaatactaaatgtgttaccataccaagcacttgctctgaaatttggggactgagtacaccaaatacgatagatcagtgggatacaacaggcctttacagcttctctgaacaaaccaggt

SEQ ID NO: 182106 - DNA, 1971 bp, Homo sapiens
  Payload ID: 15864
  Gene Symbol: SMAD2
  Gene Name: SMAD family member 2
  Uniprot ID: Q15796
  ENST ID: ENST00000586040
  CDS Start-End: 56-1369
aggttcgatacaagaggctgttttcctagcgtggcttgctgcctttggtaagaacatgtcgtccatcttgccattcacgccgccagttgtgaagagactgctgggatggaagaagtcagctggtgggtctggaggagcaggcggaggagagcagaatgggcaggaagaaaagtggtgtgagaaagcagtgaaaagtctggtgaagaagctaaagaaaacaggacgattagatgagcttgagaaagccatcaccactcaaaactgtaatactaaatgtgttaccataccaaggtctcttgatggtcgtctccaggtatcccatcgaaaaggattgccacatgttatatattgccgattatggcgctggcctgatcttcacagtcatcatgaactcaaggcaattgaaaactgcgaatatgcttttaatcttaaaaaggatgaagtatgtgtaaacccttaccactatcagagagttgagacaccagttttgcctccagtattagtgccccgacacaccgagatcctaacagaacttccgcctctggatgactatactcactccattccagaaaacactaacttcccagcaggaattgagccacagagtaattatattccagaaacgccacctcctggatatatcagtgaagatggagaaacaagtgaccaacagttgaatcaaagtatggacacaggctctccagcagaactatctcctactactctttcccctgttaatcatagcttggatttacagccagttacttactcagaacctgcattttggtgttcgatagcatattatgaattaaatcagagggttggagaaaccttccatgcatcacagccctcactcactgtagatggctttacagacccatcaaattcagagaggttctgcttaggtttactctccaatgttaaccgaaatgccacggtagaaatgacaagaaggcatataggaagaggagtgcgcttatactacataggtggggaagtttttgctgagtgcctaagtgatagtgcaatctttgtgcagagccccaattgtaatcagagatatggctggcaccctgcaacagtgtgtaaaattccaccaggctgtaatctgaagatcttcaacaaccaggaatttgctgctcttctggctcagtctgttaatcagggttttgaagccgtctatcagctaactagaatgtgcaccataagaatgagttttgtgaaagggtggggagcagaataccgaaggcagacggtaacaagtactccttgctggattgaacttcatctgaatggacctctacagtggttggacaaagtattaactcagatgggatccccttcagtgcgttgctcaagcatgtcataaagcttcaccaatcaagtcccatgaaaagacttaatgtaacaactcttctgtcatagcattgtgtgtggtccctatggactgtttactatccaaaagttcaagagagaaaacagcacttgaggtctcatcaattaaagcaccttgtggaatctgtttcctatatttgaatattagatgggaaaattagtgtctagaaatactctcccattaaagaggaagagaagattttaaagacttaatgatgtcttattgggcataaaactgagtgtcccaaaggtttattaataacagtagtagttatgtgtacaggtaatgtatcatgatccagtatcacagtattgtgctgtttatatacatttttagtttgcatagatgaggtgtgtgtgtgcgctgcttcttgatctaggcaaacctttataaagttgcagtacctaatctgttattcccacttctctgttatttttgtgtgtcttttttaatatataatatatatcaagattttcaaattatttagaagcagattttcctgtagaaaaactaatttttctgccttttaccaaaaataaactcttgggggaagaaaagtggattaacttttgaaa

SEQ ID NO: 182107 - DNA, 1042 bp, Homo sapiens
  Payload ID: 15864
  Gene Symbol: SMAD2
  Gene Name: SMAD family member 2
  ENST ID: ENST00000587269
  CDS Start-End: 391-1042
ccctctcctcccctcccctcccctctcttcccctaccctcccgcgcgcccgggccgccggccgggcccgggcctgggggcggggcgggaagacggcggccgggagtgttttcagttccgcctccaatcgcccattcccctcttcccctcccagccccctccatcccatcggaagaggaaggaacaaaaggtcccggaccccccggatctgacggggcgggacctggcgccaccttgcagatacctgaaaaaagcggcagtctgcaacccagaagagggccttacttggaacctaaccatgctggtaccctgatctcggacttgcagcctccggaactgttcgatacaagaggctgttttcctagcgtggcttgctgcctttggtaagaacatgtcgtccatcttgccattcacgccgccagttgtgaagagactgctgggatggaagaagtcagctggtgggtctggaggagcaggcggaggagagcagaatgggcaggaagaaaagtggtgtgagaaagcagtgaaaagtctggtgaagaagctaaagaaaacaggacgattagatgagcttgagaaagccatcaccactcaaaactgtaatactaaatgtgttaccataccaagcacttgctctgaaatttggggactgagtacaccaaatacgatagatcagtgggatacaacaggcctttacagcttctctgaacaaaccaggtctcttgatggtcgtctccaggtatcccatcgaaaaggattgccacatgttatatattgccgattatggcgctggcctgatcttcacagtcatcatgaactcaaggcaattgaaaactgcgaatatgcttttaatcttaaaaaggatgaagtatgtgtaaacccttaccactatcagagagttgagacaccagttttgcctccagtattagtgccccgacacaccgagatcctaacagaacttccgcctctggatgactatactcactccattccagaaaacactaacttcccagcaggaattgagccacagagtaattatattc

SEQ ID NO: 182108 - DNA, 1714 bp, Homo sapiens
  Payload ID: 15864
  Gene Symbol: SMAD2
  Gene Name: SMAD family member 2
  ENST ID: ENST00000591214
  CDS Start-End: 97-1392
ggagaagcagctcgccagccagcagcccgccagccgccgggaggttcgatacaagaggctgttttcctagcgtggcttgctgcctttggtaagaacatgtcgtccatcttgccattcacgccgccagttgtgaagagactgctgggatggaagaagtcagctggtgggtctggaggagcaggcggaggagagcagaatgggcaggaagaaaagtggtgtgagaaagcagtgaaaagtctggtgaagaagctaaagaaaacaggacgattagatgagcttgagaaagccatcaccactcaaaactgtaatactaaatgtgttaccataccaaggtctcttgatggtcgtctccaggtatcccatcgaaaaggattgccacatgttatatattgccgattatggcgctggcctgatcttcacagtcatcatgaactcaaggcaattgaaaactgcgaatatgcttttaatcttaaaaaggatgaagtatgtgtaaacccttaccactatcagagagttgagacaccagttttgcctccagtattagtgccccgacacaccgagatcctaacagaacttccgcctctggatgactatactcactccattccagaaaacactaacttcccagcaggaattgagccacagagtaattatattccagaaacgccacctcctggatatatcagtgaagatggagaaacaagtgaccaacagttgaatcaaagtatggacacaggctctccagcagaactatctcctactactctttcccctgttaatcatagcttggatttacagccagttacttactcagaacctgcattttggtgttcgatagcatattatgaattaaatcagagggttggagaaaccttccatgcatcacagccctcactcactgtagatggctttacagacccatcaaattcagagaggttctgcttaggtttactctccaatgttaaccgaaatgccacggtagaaatgacaagaaggcatataggaagaggagtgcgcttatactacataggtggggaagtttttgctgagtgcctaagtgatagtgcaatctttgtgcagagccccaattgtaatcagagatatggctggcaccctgcaacagtgtgtaaaattccaccaggctgtaatctgaagatcttcaacaaccaggaatttgctgctcttctggctcagtctgttaatcagggttttgaagccgtctatcagctaactagaatgtgcaccataagaatgagttttgtgaaagggtggggagcagaataccggtatgaaatacatatttggttcttaaatttccacagtgtaattatgtttcattgcattcttgcatattctggagttcatttgtatctattttcaatgaggttatagagtcagctgatctttatgtaaaataaagttggaggcctccaaattcaaaactgttgcaaattactgagctgccattatggaagatattaaaacatgcacaggcgtgcattttaacgtaattcagagtgttaaatatcataaaaggggtgtatatgaagggttatgtcagtttatggaaggagagatgtttgcacacggtgctcaaggaaaacttgatggcacatgatctagttgtaaaaggtgcattggatttcaatagtcataaatggggtgggcagagttgggaagtgataatcttgacaatagcatagcaattcagttt

SEQ ID NO: 182109 - DNA, 575 bp, Homo sapiens
  Payload ID: 15864
  Gene Symbol: SMAD2
  Gene Name: SMAD family member 2
  ENST ID: ENST00000587421
  CDS Start-End: 165-575
aggtaaagcctgggcgcccgcgggcctccagctagggaagtgtttgcgtgcgtccgcggccggggcgatgggccgtgtcacatggccgctgcgggtgggggctggggtgtggttcgatacaagaggctgttttcctagcgtggcttgctgcctttggtaagaacatgtcgtccatcttgccattcacgccgccagttgtgaagagactgctgggatggaagaagtcagctggtgggtctggaggagcaggcggaggagagcagaatgggcaggaagaaaagtggtgtgagaaagcagtgaaaagtctggtgaagaagctaaagaaaacaggacgattagatgagcttgagaaagccatcaccactcaaaactgtaatactaaatgtgttaccataccaagcacttgctctgaaatttggggactgagtacaccaaatacgatagatcagtgggatacaacaggcctttacagcttctctgaacaaaccaggtctcttgatggtcgtctccaggtatcccatcgaaaaggattgccacatgttatatattgccgattatggcgctggcctgatctt

SEQ ID NO: 182110 - DNA, 663 bp, Homo sapiens
  Payload ID: 15864
  Gene Symbol: SMAD2
  Gene Name: SMAD family member 2
  ENST ID: ENST00000585978
  CDS Start-End: 338-663
aggaagcctttgaagcacagctgaagaacagtaggtcttggagaaatttttgctgtagacctgctctatcttaacagtatgtttgaacatagattgctaaaaatctcggtctccacagaggattggttccgggactctcctgcaagcaccagaatatgagaacgctgaagtcccttgtataaaatgatacctgaaaaaagcggcagtctgcaacccagaagagggccttacttggaacctaaccatgctggtaccctgatctcggacttgcagcctccggaactgttcgatacaagaggctgttttcctagcgtggcttgctgcctttggtaagaacatgtcgtccatcttgccattcacgccgccagttgtgaagagactgctgggatggaagaagtcagctggtgggtctggaggagcaggcggaggagagcagaatgggcaggaagaaaagtggtgtgagaaagcagtgaaaagtctggtgaagaagctaaagaaaacaggacgattagatgagcttgagaaagccatcaccactcaaaactgtaatactaaatgtgttaccataccaagcacttgctctgaaatttggggactgagtacaccaaatacgatagatcagtgggatacaacaggcctttacagcttctctgaacaaaccag

SEQ ID NO: 182111 - DNA, 6247 bp, Homo sapiens
  Payload ID: 15865
  Gene Symbol: SMAD3
  Gene Name: SMAD family member 3
  Uniprot ID: P84022
  ENST ID: ENST00000327367
  CDS Start-End: 311-1588
acttggagtctcgcggccgccgcctccgccccgcgttcggggccttcccgaccctgcactgctgccgtccgcccgcccggccgctcttctcttcgccgtgggagccgctccgggcgcagggccgcgcgccgagccccgcaggctgcagcgccgcggcccggcccggcgccccggcaacttcgccgagagttgaggcgaagtttgggcgaccgcggcaggccccggccgagctcccctctgcgcccccggcgtcccgtcgagcccagccccgccgggggcgctcctcgccgcccgcgcgccctccccagccatgtcgtccatcctgcctttcactcccccgatcgtgaagcgcctgctgggctggaagaagggcgagcagaacgggcaggaggagaaatggtgcgagaaggcggtcaagagcctggtcaagaaactcaagaagacggggcagctggacgagctggagaaggccatcaccacgcagaacgtcaacaccaagtgcatcaccatccccaggtccctggatggccggttgcaggtgtcccatcggaaggggctccctcatgtcatctactgccgcctgtggcgatggccagacctgcacagccaccacgagctacgggccatggagctgtgtgagttcgccttcaatatgaagaaggacgaggtctgcgtgaatccctaccactaccagagagtagagacaccagttctacctcctgtgttggtgccacgccacacagagatcccggccgagttccccccactggacgactacagccattccatccccgaaaacactaacttccccgcaggcatcgagccccagagcaatattccagagaccccaccccctggctacctgagtgaagatggagaaaccagtgaccaccagatgaaccacagcatggacgcaggttctccaaacctatccccgaatccgatgtccccagcacataataacttggacctgcagccagttacctactgcgagccggccttctggtgctccatctcctactacgagctgaaccagcgcgtcggggagacattccacgcctcgcagccatccatgactgtggatggcttcaccgacccctccaattcggagcgcttctgcctagggctgctctccaatgtcaacaggaatgcagcagtggagctgacacggagacacatcggaagaggcgtgcggctctactacatcggaggggaggtcttcgcagagtgcctcagtgacagcgctatttttgtccagtctcccaactgtaaccagcgctatggctggcacccggccaccgtctgcaagatcccaccaggatgcaacctgaagatcttcaacaaccaggagttcgctgccctcctggcccagtcggtcaaccagggctttgaggctgtctaccagttgacccgaatgtgcaccatccgcatgagcttcgtcaaaggctggggagcggagtacaggagacagactgtgaccagtaccccctgctggattgagctgcacctgaatgggcctttgcagtggcttgacaaggtcctcacccagatgggctccccaagcatccgctgttccagtgtgtcttagagacatcaagtatggtaggggagggcaggcttggggaaaatggccatgcaggaggtggagaaaattggaactctactcaacccattgttgtcaaggaagaagaaatctttctccctcaactgaaggggtgcacccacctgttttctgaaacacacgagcaaacccagaggtggatgttatgaacagctgtgtctgccaaacacatttaccctttggccccactttgaagggcaagaaatggcgtctgctctggtggcttaagtgagcagaacaggtagtattacaccaccggccccctccccccagactctttttttgagtgacagctttctgggatgtcacagtccaaccagaaacacccctctgtctaggactgcagtgtggagttcaccttggaagggcgttctaggtaggaagagcccgcagggccatgcagacctcatgcccagctctctgacgcttgtgacagtgcctcttccagtgaacattcccagcccagccccgccccgccccgccccaccactccagcagaccttgccccttgtgagctggatagacttgggatggggagggagggagttttgtctgtctccctcccctctcagaacatactgattgggaggtgcgtgttcagcagaacctgcacacaggacagcgggaaaaatcgatgagcgccacctctttaaaaactcacttacgtttgtcctttttcactttgaaaagttggaaggatctgctgaggcccagtgcatatgcaatgtatagtgtctattatcacattaatctcaaagagattcgaatgacggtaagtgttctcatgaagcaggaggcccttgtcgtgggatggcatttggtctcaggcagcaccacactgggtgcgtctccagtcatctgtaagagcttgctccagattctgatgcatacggctatattggtttatgtagtcagttgcattcattaaatcaactttatcatatgctcttttaaatgtttggtttatatattttctttaaaaatcctgggctggcacattgactgggaaacctgagtgagacccagcaactgcttctctcccttctctctcctgaggtgaagcttttccaggttttgttgaagagatacctgccagcacttctgcaagctgaaatttacagaagcaaattcaccagaagggaaacatctcaggccaacataggcaaatgaaaagggctattaaaatatttttacacctttgaaaattgcaggcttggtacaaagaggtctgtcatcttccccctgggatataagatgatctagctcccggtagaggatcaccggtgacaactatagcagttgtattgtgtaacaagtactgctcccagcagcaattagggagaaaactagtctaaattatttcaactggaaaaaagaaaaaagagtcctcttcttttcccagccttttgcagaacacagtagacagaactgccaccttcaattggtactttattctttgctgctgtttttgtataaaatgacctatcccacgtttttgcatgaatttatagcaggaaaaatcaagggatttcctatggaagtcctgctttattccaggtgaagggaaggaagtgtatatacttttggcaagtcatacagctcaaatgtgatgagatttctgatgttagagggagatggagaggcttcctgatgcctcatctgcagggtcctgtgcctctgaagttctagccatgaggtttccaggtaggacagctgctccccaagcctcctgaggacacaggaagagacggaaggagcaccttgacagacttgtgtgagtcttctcgaaggagggttgactcagaacccagagacaatacaaaacccctcacttcctctgagagggccaaatgctgtgagtctgaagtatgtgcctggtgtgaaatgatctatggcctgtttcttacacaggaagccccctgaacctcctgtacatgtgttcatgttcccagccagctctgagacccaggaaccaaatattccattttggcttctgctagagcagtcatggttcctctcctaaaagccatgggcagcagtttccgagggcctgcatgatccacctgctgcacgatcctatgagggcttcctgtggcacacagccctctgggtgcttgggaactagcttcaggcacagcctgattctggtgatccagtgatctatggaagtcgtgtcttactccaggtgaagggggaaaaaaaaagcctatactttggcaggttatgaactttgaatgtgatgaaatgacacgtttggctgcatttggatggtgtcttagaaccctcattgctcagacctgaaggctacttctaggagcatgaagtttgagttttgtgtttttccaaaggatacttccttggccctttttctttattgactagaccaccagaggaggatgtgtgggattgtaggcaaacccacctgtggcatcactgaaaataaatttgatcatacctaagaggttaggaaatggtgccattcccaccttagagtgctacataggtgctttgggcgtatgtaacattagtgtccttccttgaagccacaagctagttttcttagttttaaaatcctgttgtatgaatggcatttgtatattaaaacacttttttaaaggacagttgaaaagggcaagaggaaaccagggcagttctagaggagtgctggtgactggatagcagttttaagtggcgttcacctagtcaacacgaccgcgtgtgttgcccctgccctgggctccccgccatgacatcttcaccttgcagcttgtgctgagactgacccaagtgcagctagcactgggacacagatccttgtcttcagcaccttccaaggagccaacttttattccctttcctctctcccctccccacctcgcttcttcccaatttagtaacttagatgcttccagcacatacgtaggtagctaccccagccggtttggattacaggcctgtgctggaacatcatctcagttggccaccttcctggcaggctgtagacctgacattttgagacaagcctagaggagtcaggagcagggactttgactcttaggaagagcacacatgagggcaaggctgctggcagacgtctccattgtccttatgttgtctgtgttgtatttttttttttttattgaccatggtgattatttttttaaaccatcgttaatatactgaagtgagctatagcacatatcatgtgcttagtttgtttatttttctccatctccccttggcttcctagagtttggacatattccaggctaaatgcttttactcaagactacagaaaggtttgaagtagtgtgtgcatggcatgcacgtatgtaagtaatctggggaagaagcaaagatctgtttcattcttagcctcaggcctcatgagggtctccacagggccggagctcaggttacaccactccttcgtccttacaggagatgtagggagaagaatctgcaggctgcttgtaggactgttcaccaagggggataccagcagcaagagagtgcacccgtttagccctggaccctgtttcttactgtgtgacttggctagagttgggagttcccccaaaataaacgtgtccccattttaccagaaccaaacctcaacacagcgaagctgtactgtctttgtgtggcaaagatgttcccttgtaggcccctttcaggtaaccgtcttcacaatgtattttcatcacagtttaaggagcatcagccgcttctcaagtgggtagggaaagcagaaaaacgtacgcaagaggacatggatccaaaatgatgatgaagcatctcccatggggaggtgatggtggggagatgatgggctaaacaggcaacttttcaaaaacacagctatcatagaaaagaaacttgcctcatgtaaactggattgagaaattctcagtgattctgcaatggatttttttttaatgcagaagtaatgtatactctagtattctggtgtttttatatttatgtaataatttcttaaaaccattcagacagataactatttaattttttttaagaaagttggaaaggtctctcctcccaaggacagtggctggaagagttggggcacagccagttctgaatgttggtggagggtgtagtggctttttggctcagcatccagaaacaccaaaccaggctggctaaacaagtggccgcgtgtaaaaacagacagctctgagtcaaatctgggcccttccacaagggtcctctgaaccaagccccactcccttgctaggggtgaaagcattacagagagatggagccatctatccaagaagccttcactcaccttcactgctgctgttgcaactcggctgttctggactctgatgtgtgtggagggatggggaatagaacattgactgtgttgattaccttcactattcggccagcctgaccttttaataactttgtaaaaagcatgtatgtatttatagtgttttagatttttctaacttttatatcttaaaagcagagcacctgtttaagcattgtacccctattgttaaagatttgtgtcctctcattccctctcttcctcttgtaagtgcccttctaataaacttttcatggaaaagctcctgtgccaggagctcagtctga

SEQ ID NO: 182112 - DNA, 1530 bp, Homo sapiens
  Payload ID: 15865
  Gene Symbol: SMAD3
  Gene Name: SMAD family member 3
  Uniprot ID: P84022
  ENST ID: ENST00000439724
  CDS Start-End: 27-1172
ccctgtgacctcccaacttcacaaacatgtcttgcctgcaccctaggcaaacgtggaaaggcgcagctctggtacaccggaaagcatggtggatggggaggtccctggatggccggttgcaggtgtcccatcggaaggggctccctcatgtcatctactgccgcctgtggcgatggccagacctgcacagccaccacgagctacgggccatggagctgtgtgagttcgccttcaatatgaagaaggacgaggtctgcgtgaatccctaccactaccagagagtagagacaccagttctacctcctgtgttggtgccacgccacacagagatcccggccgagttccccccactggacgactacagccattccatccccgaaaacactaacttccccgcaggcatcgagccccagagcaatattccagagaccccaccccctggctacctgagtgaagatggagaaaccagtgaccaccagatgaaccacagcatggacgcaggttctccaaacctatccccgaatccgatgtccccagcacataataacttggacctgcagccagttacctactgcgagccggccttctggtgctccatctcctactacgagctgaaccagcgcgtcggggagacattccacgcctcgcagccatccatgactgtggatggcttcaccgacccctccaattcggagcgcttctgcctagggctgctctccaatgtcaacaggaatgcagcagtggagctgacacggagacacatcggaagaggcgtgcggctctactacatcggaggggaggtcttcgcagagtgcctcagtgacagcgctatttttgtccagtctcccaactgtaaccagcgctatggctggcacccggccaccgtctgcaagatcccaccaggatgcaacctgaagatcttcaacaaccaggagttcgctgccctcctggcccagtcggtcaaccagggctttgaggctgtctaccagttgacccgaatgtgcaccatccgcatgagcttcgtcaaaggctggggagcggagtacaggagacagactgtgaccagtaccccctgctggattgagctgcacctgaatgggcctttgcagtggcttgacaaggtcctcacccagatgggctccccaagcatccgctgttccagtgtgtcttagagacatcaagtatggtaggggagggcaggcttggggaaaatggccatgcaggaggtggagaaaattggaactctactcaacccattgttgtcaaggaagaagaaatctttctccctcaactgaaggggtgcacccacctgttttctgaaacacacgagcaaacccagaggtggatgttatgaacagctgtgtctgccaaacacatttaccctttggccccactttgaagggcaagaaatggcgtctgctctggtggcttaagtgagcagaacaggtagtattacaccaccggccccctccccccagactctttttttgagtgacagctttctgggatgtcacagtccaaccagaaaca

SEQ ID NO: 182113 - DNA, 1567 bp, Homo sapiens
  Payload ID: 15865
  Gene Symbol: SMAD3
  Gene Name: SMAD family member 3
  Uniprot ID: P84022
  ENST ID: ENST00000540846
  CDS Start-End: 379-1341
aaatatgagcttgtgcttgctggaggaggatgacagaggagcctgctgctgagttcactggtgctggggttaggtcactgctgggctgaagcgcactgaccataagagcaacatgtgggcaagagccgcggcactggggtaatttattgccgccgctcgcttcaccaggaaccccacacgctgggttcccacaggatgcgacattcccacaggatgggacaactgcatggaaacccacactcgggcctgtgttgagcaaccacgtttgagtccctggatggccggttgcaggtgtcccatcggaaggggctccctcatgtcatctactgccgcctgtggcgatggccagacctgcacagccaccacgagctacgggccatggagctgtgtgagttcgccttcaatatgaagaaggacgaggtctgcgtgaatccctaccactaccagagagtagagacaccagttctacctcctgtgttggtgccacgccacacagagatcccggccgagttccccccactggacgactacagccattccatccccgaaaacactaacttccccgcaggcatcgagccccagagcaatattccagagaccccaccccctggctacctgagtgaagatggagaaaccagtgaccaccagatgaaccacagcatggacgcaggttctccaaacctatccccgaatccgatgtccccagcacataataacttggacctgcagccagttacctactgcgagccggccttctggtgctccatctcctactacgagctgaaccagcgcgtcggggagacattccacgcctcgcagccatccatgactgtggatggcttcaccgacccctccaattcggagcgcttctgcctagggctgctctccaatgtcaacaggaatgcagcagtggagctgacacggagacacatcggaagaggcgtgcggctctactacatcggaggggaggtcttcgcagagtgcctcagtgacagcgctatttttgtccagtctcccaactgtaaccagcgctatggctggcacccggccaccgtctgcaagatcccaccaggatgcaacctgaagatcttcaacaaccaggagttcgctgccctcctggcccagtcggtcaaccagggctttgaggctgtctaccagttgacccgaatgtgcaccatccgcatgagcttcgtcaaaggctggggagcggagtacaggagacagactgtgaccagtaccccctgctggattgagctgcacctgaatgggcctttgcagtggcttgacaaggtcctcacccagatgggctccccaagcatccgctgttccagtgtgtcttagagacatcaagtatggtaggggagggcaggcttggggaaaatggccatgcaggaggtggagaaaattggaactctactcaacccattgttgtcaaggaagaagaaatctttctccctcaactgaaggggtgcacccacctgttttctgaaacacacgagcaaacccagaggtggatgttatgaacagctgtgtctgccaaacacatttaccctttggccccactttg

SEQ ID NO: 182114 - DNA, 1147 bp, Homo sapiens
  Payload ID: 15865
  Gene Symbol: SMAD3
  Gene Name: SMAD family member 3
  Uniprot ID: P84022
  ENST ID: ENST00000537194
  CDS Start-End: 229-921
agtaatcctgctgcgttcctcttagagcattctaatttggacgtgacgttcatcctgggttagtttactgggctgagattggctacaggcctgtgtgcttgggtcagagtgttaaggaggagacccactgtccaaccttctcagatcctttgcgggtagccctggcgtcccgcggagaccccaccccctggctacctgagtgaagatggagaaaccagtgaccaccagatgaaccacagcatggacgcaggttctccaaacctatccccgaatccgatgtccccagcacataataacttggacctgcagccagttacctactgcgagccggccttctggtgctccatctcctactacgagctgaaccagcgcgtcggggagacattccacgcctcgcagccatccatgactgtggatggcttcaccgacccctccaattcggagcgcttctgcctagggctgctctccaatgtcaacaggaatgcagcagtggagctgacacggagacacatcggaagaggcgtgcggctctactacatcggaggggaggtcttcgcagagtgcctcagtgacagcgctatttttgtccagtctcccaactgtaaccagcgctatggctggcacccggccaccgtctgcaagatcccaccaggatgcaacctgaagatcttcaacaaccaggagttcgctgccctcctggcccagtcggtcaaccagggctttgaggctgtctaccagttgacccgaatgtgcaccatccgcatgagcttcgtcaaaggctggggagcggagtacaggagacagactgtgaccagtaccccctgctggattgagctgcacctgaatgggcctttgcagtggcttgacaaggtcctcacccagatgggctccccaagcatccgctgttccagtgtgtcttagagacatcaagtatggtaggggagggcaggcttggggaaaatggccatgcaggaggtggagaaaattggaactctactcaacccattgttgtcaaggaagaagaaatctttctccctcaactgaaggggtgcacccacctgttttctgaaacacacgagcaaacccagaggtggatgttatgaacagctgtgtctgccaaacacatttaccctttggccccactttg

SEQ ID NO: 182115 - DNA, 552 bp, Homo sapiens
  Payload ID: 15865
  Gene Symbol: SMAD3
  Gene Name: SMAD family member 3
  ENST ID: ENST00000558827
  CDS Start-End: 215-552
acacatttcagacttgggagttgatccggtcctgcgtgagcaaaggcagttatgatccaagcgggagtcagaggtggacaggggcgaggacaacagaaccaagagctggaacctctactccaagacctggagctcctacagccacggatgctagcatcatgagaccccaccccctggctacctgagtgaagatggagaaaccagtgaccaccagatgaaccacagcatggacgcaggttctccaaacctatccccgaatccgatgtccccagcacataataacttggacctgcagccagttacctactgcgagccggccttctggtgctccatctcctactacgagctgaaccagcgcgtcggggagacattccacgcctcgcagccatccatgactgtggatggcttcaccgacccctccaattcggagcgcttctgcctagggctgctctccaatgtcaacaggaatgcagcagtggagctgacacggagacacatcggaagaggcgtgcggctctactacatcggaggggaggtcttcgcagagtgcct

SEQ ID NO: 182116 - DNA, 568 bp, Homo sapiens
  Payload ID: 15865
  Gene Symbol: SMAD3
  Gene Name: SMAD family member 3
  ENST ID: ENST00000559460
  CDS Start-End: 292-568
aaataatccttgcagtgttacaacagtgtgcccgtgtagagaactgttttgcaaagagctcgatcaatgatgtcatctttgccttccgtgacccaggcagctgggtgcagtctcaagatcggagactgaggcttcaacaaagtattgggttcaaattccagctctgccacttggaaccctgagtccctggatggccggttgcaggtgtcccatcggaaggggctccctcatgtcatctactgccgcctgtggcgatggccagacctgcacagccaccacgagctacgggccatggagctgtgtgagttcgccttcaatatgaagaaggacgaggtctgcgtgaatccctaccactaccagagagtagagacaccagttctacctcctgtgttggtgccacgccacacagagatcccggccgagttccccccactggacgactacagccattccatccccgaaaacactaacttccccgcaggcatcgagccccagagcaatattccagagaccccaccccctggctacctgagtgaagatggagaaaccagtgaccaccagatgaacc

SEQ ID NO: 182117 - DNA, 586 bp, Homo sapiens
  Payload ID: 15865
  Gene Symbol: SMAD3
  Gene Name: SMAD family member 3
  ENST ID: ENST00000558739
  CDS Start-End: 398-586
aggatgtcaggaagcaactgtaggaaaccccctgtgtgggtgaagcagaggcgtcgctcagggccctctgcctggttctgggctctgggaccctgctcccctcccctgaaccccccctcccccggccccaggatggagcttgcttgccatcgcagtggatttgcggaagagggttccagagtgtggggagagcgtgctggggaggggagctatttgttcctttccagtcatcgctgtactgagcggttccctgggacagttgaacccaggggaactgaattcatctgtgtccctggatggccggttgcaggtgtcccatcggaaggggctccctcatgtcatctactgccgcctgtggcgatggccagacctgcacagccaccacgagctacgggccatggagctgtgtgagttcgccttcaatatgaagaaggacgaggtctgcgtgaatccctaccactaccagagagtagagacaccagttctacctcctgtgttggtgccacgccacacagagatcccggccgagttccccccactggacgactacagccattccatccccgaaaacactaacttccccgca

SEQ ID NO: 182118 - DNA, 584 bp, Homo sapiens
  Payload ID: 15865
  Gene Symbol: SMAD3
  Gene Name: SMAD family member 3
  ENST ID: ENST00000559092
  CDS Start-End: 293-583
agcacagaggcaaaccacagagtacatttgaggcccagatctgcttatttcgagggtggggccgcgtttttctcctgccacagtgagctaattaaagaaaacaagcttcgggagttgggagagaactgtccacaggacacttggggaggcttgctttggttgtggaggcctccacagcccccggaaggcaggtggaagtgggcatggagggtcctacgcatccccagcgggggtctgagggcccactgttgctcagctgggggatttggggacggtgggagggcatacatggatgggagggtggactccgttcctgagggggccagtgtggaggagggtcaggcagcccatggagatgggacagtgttctgaaatgcttcacaaatgtggacttttgccccaaactgtggacagagcgtatgtcctgagcgaggatcaactctgtccctggatggccggttgcaggtgtcccatcggaaggggctccctcatgtcatctactgccgcctgtggcgatggccagacctgcacagccaccacgagctacgggccatggagctgtgtgagttcgccttcaatatgaa

SEQ ID NO: 182119 - DNA, 554 bp, Homo sapiens
  Payload ID: 15865
  Gene Symbol: SMAD3
  Gene Name: SMAD family member 3
  ENST ID: ENST00000558428
  CDS Start-End: 302-554
acacatttcagacttgggagttgatccggtcctgcgtgagcaaaggcagttatgatccaagcgggagtcagaggtggacaggggcgaggacaacagaaccaagagctggaacctctactccaagacctggagctcctacagccacggatgctagcatcatggtgtgcatgtgtgatgtctttgcaaaaggtgtctcagagccaagctgtgaaggccttttaacagaccaccttccttctgattcccagagaccccaccccctggctacctgagtgaagatggagaaaccagtgaccaccagatgaaccacagcatggacgcaggttctccaaacctatccccgaatccgatgtccccagcacataataacttggacctgcagccagttacctactgcgagccggccttctggtgctccatctcctactacgagctgaaccagcgcgtcggggagacattccacgcctcgcagccatccatgactgtggatggcttcaccgacccctccaattcggagcgcttctgcctagggctgctctccaatgtcaacagga

SEQ ID NO: 182120 - DNA, 542 bp, Homo sapiens
  Payload ID: 15865
  Gene Symbol: SMAD3
  Gene Name: SMAD family member 3
  ENST ID: ENST00000560175
  CDS Start-End: 200-542
aaaacaagcttcgggagttgggagagaactgtccacaggacacttggggaggcttgctttggttgtggaggcctccacagcccccggaaggtccctggatggccggttgcaggtgtcccatcggaaggggctccctcatgtcatctactgccgcctgtggcgatggccagacctgcacagccaccacgagctacgggccatggagctgtgtgagttcgccttcaatatgaagaaggacgaggtctgcgtgaatccctaccactaccagagagtagagacaccagttctacctcctgtgttggtgccacgccacacagagatcccggccgagttccccccactggacgactacagccattccatccccgaaaacactaacttccccgcaggcatcgagccccagagcaatattccagagaccccaccccctggctacctgagtgaagatggagaaaccagtgaccaccagatgaaccacagcatggacgcaggttctccaaacctatccccgaatccgatgtccccagcacataataacttgg

SEQ ID NO: 182121 - DNA, 775 bp, Homo sapiens
  Payload ID: 15865
  Gene Symbol: SMAD3
  Gene Name: SMAD family member 3
  ENST ID: ENST00000560424
  CDS Start-End: 1-470
gcctcagtgacagcgctatttttgtccagtctcccaactgtaaccagcgctatggctggcacccggccaccgtctgcaagatcccaccaggaaaggcccccctctccacaccatctccctatttttggaagccctctttgcagacttctccctgctctgggagtcggagcttgtgggccagccttccatctccccttgcaggatgcaacctgaagatcttcaacaaccaggagttcgctgccctcctggcccagtcggtcaaccagggctttgaggctgtctaccagttgacccgaatgtgcaccatccgcatgagcttcgtcaaaggctggggagcggagtacaggagacagactgtgaccagtaccccctgctggattgagctgcacctgaatgggcctttgcagtggcttgacaaggtcctcacccagatgggctccccaagcatccgctgttccagtgtgtcttagagacatcaagtatggtaggggagggcaggcttggggaaaatggccatgcaggaggtggagaaaattggaactctactcaacccattgttgtcaaggaagaagaaatctttctccctcaactgaaggggtgcacccacctgttttctgaaacacacgagcaaacccagaggtggatgttatgaacagctgtgtctgccaaacacatttaccctttggccccactttgaagggcaagaaatggcgtctgctctggtggcttaagtgagcagaacaggtagtattacaccaccggccccctcccccca

SEQ ID NO: 182122 - DNA, 797 bp, Homo sapiens
  Payload ID: 15865
  Gene Symbol: SMAD3
  Gene Name: SMAD family member 3
  ENST ID: ENST00000558894
  CDS Start-End: 159-797
caagccttggccagacgtggatatggttatgcacggactccgttttgtggtccctggatggccggttgcaggtgtcccatcggaaggggctccctcatgtcatctactgccgcctgtggcgatggccagacctgcacagccaccacgagctacgggccatggagctgtgtgagttcgccttcaatatgaagaaggacgaggtctgcgtgaatccctaccactaccagagagtagagacaccagttctacctcctgtgttggtgccacgccacacagagatcccggccgagttccccccactggacgactacagccattccatccccgaaaacactaacttccccgcaggcatcgagccccagagcaatattccagagaccccaccccctggctacctgagtgaagatggagaaaccagtgaccaccagatgaaccacagcatggacgcaggttctccaaacctatccccgaatccgatgtccccagcacataataacttggacctgcagccagttacctactgcgagccggccttctggtgctccatctcctactacgagctgaaccagcgcgtcggggagacattccacgcctcgcagccatccatgactgtggatggcttcaccgacccctccaattcggagcgcttctgcctagggctgctctccaatgtcaacaggaatgcagcagtggagctgacacggagacacatcggatgcaacctgaagatcttcaacaaccaggagttcgctgccctcctggcccagtcggtcaaccagggctttgaggctgtctac

SEQ ID NO: 182123 - DNA, 8769 bp, Homo sapiens
  Payload ID: 15866
  Gene Symbol: SMAD4
  Gene Name: SMAD family member 4
  Uniprot ID: Q13485
  ENST ID: ENST00000342988
  CDS Start-End: 539-2197
atgctcagtggcttctcgacaagttggcagcaacaacacggccctggtcgtcgtcgccgctgcggtaacggagcggtttgggtggcggagcctgcgttcgcgccttcccgctctcctcgggaggcccttcctgctctcccctaggctccgcggccgcccagggggtgggagcgggtgaggggagccaggcgcccagcgagagaggccccccgccgcagggcggcccgggagctcgaggcggtccggcccgcgcgggcagcggcgcggcgctgaggaggggcggcctggccgggacgcctcggggcgggggccgaggagctctccgggccgccggggaaagctacgggcccggtgcgtccgcggaccagcagcgcgggagagcggactcccctcgccaccgcccgagcccaggttatcctgaatacatgtctaacaattttccttgcaacgttagctgttgtttttcactgtttccaaaggatcaaaattgcttcagaaattggagacatatttgatttaaaaggaaaaacttgaacaaatggacaatatgtctattacgaatacaccaacaagtaatgatgcctgtctgagcattgtgcatagtttgatgtgccatagacaaggtggagagagtgaaacatttgcaaaaagagcaattgaaagtttggtaaagaagctgaaggagaaaaaagatgaattggattctttaataacagctataactacaaatggagctcatcctagtaaatgtgttaccatacagagaacattggatgggaggcttcaggtggctggtcggaaaggatttcctcatgtgatctatgcccgtctctggaggtggcctgatcttcacaaaaatgaactaaaacatgttaaatattgtcagtatgcgtttgacttaaaatgtgatagtgtctgtgtgaatccatatcactacgaacgagttgtatcacctggaattgatctctcaggattaacactgcagagtaatgctccatcaagtatgatggtgaaggatgaatatgtgcatgactttgagggacagccatcgttgtccactgaaggacattcaattcaaaccatccagcatccaccaagtaatcgtgcatcgacagagacatacagcaccccagctctgttagccccatctgagtctaatgctaccagcactgccaactttcccaacattcctgtggcttccacaagtcagcctgccagtatactggggggcagccatagtgaaggactgttgcagatagcatcagggcctcagccaggacagcagcagaatggatttactggtcagccagctacttaccatcataacagcactaccacctggactggaagtaggactgcaccatacacacctaatttgcctcaccaccaaaacggccatcttcagcaccacccgcctatgccgccccatcccggacattactggcctgttcacaatgagcttgcattccagcctcccatttccaatcatcctgctcctgagtattggtgttccattgcttactttgaaatggatgttcaggtaggagagacatttaaggttccttcaagctgccctattgttactgttgatggatacgtggacccttctggaggagatcgcttttgtttgggtcaactctccaatgtccacaggacagaagccattgagagagcaaggttgcacataggcaaaggtgtgcagttggaatgtaaaggtgaaggtgatgtttgggtcaggtgccttagtgaccacgcggtctttgtacagagttactacttagacagagaagctgggcgtgcacctggagatgctgttcataagatctacccaagtgcatatataaaggtctttgatttgcgtcagtgtcatcgacagatgcagcagcaggcggctactgcacaagctgcagcagctgcccaggcagcagccgtggcaggaaacatccctggcccaggatcagtaggtggaatagctccagctatcagtctgtcagctgctgctggaattggtgttgatgaccttcgtcgcttatgcatactcaggatgagttttgtgaaaggctggggaccggattacccaagacagagcatcaaagaaacaccttgctggattgaaattcacttacaccgggccctccagctcctagacgaagtacttcataccatgccgattgcagacccacaacctttagactgaggtcttttaccgttggggcccttaaccttatcaggatggtggactacaaaatacaatcctgtttataatctgaagatatatttcacttttgttctgctttatcttttcataaagggttgaaaatgtgtttgctgccttgctcctagcagacagaaactggattaaaacaattttttttttcctcttcagaacttgtcaggcatggctcagagcttgaagattaggagaaacacattcttattaattcttcacctgttatgtatgaaggaatcattccagtgctagaaaatttagccctttaaaacgtcttagagccttttatctgcagaacatcgatatgtatatcattctacagaataatccagtattgctgattttaaaggcagagaagttctcaaagttaattcacctatgttattttgtgtacaagttgttattgttgaacatacttcaaaaataatgtgccatgtgggtgagttaattttaccaagagtaactttactctgtgtttaaaaagtaagttaataatgtattgtaatctttcatccaaaatattttttgcaagttatattagtgaagatggtttcaattcagattgtcttgcaacttcagttttatttttgccaaggcaaaaaactcttaatctgtgtgtatattgagaatcccttaaaattaccagacaaaaaaatttaaaattacgtttgttattcctagtggatgactgttgatgaagtatacttttcccctgttaaacagtagttgtattcttctgtatttctaggcacaaggttggttgctaagaagcctataagaggaatttcttttccttcattcatagggaaaggttttgtattttttaaaacactaaaagcagcgtcactctacctaatgtctcactgttctgcaaaggtggcaatgcttaaactaaataatgaataaactgaatattttggaaactgctaaattctatgttaaatactgtgcagaataatggaaacattacagttcataataggtagtttggatatttttgtacttgatttgatgtgactttttttggtataatgtttaaatcatgtatgttatgatattgtttaaaattcagtttttgtatcttggggcaagactgcaaacttttttatatcttttggttattctaagccctttgccatcaatgatcatatcaattggcagtgactttgtatagagaatttaagtagaaaagttgcagatgtattgactgtaccacagacacaatatgtatgctttttacctagctggtagcataaataaaactgaatctcaacatacaaagttgaattctaggtttgatttttaagattttttttttcttttgcacttttgagtccaatctcagtgatgaggtaccttctactaaatgacaggcaacagccagttctattgggcagctttgtttttttccctcacactctaccgggacttccccatggacattgtgtatcatgtgtagagttggttttttttttttttaatttttattttactatagcagaaatagacctgattatctacaagatgataaatagattgtctacaggataaatagtatgaaataaaatcaaggattatctttcagatgtgtttacttttgcctggagaacttttagctatagaaacacttgtgtgatgatagtcctccttatatcacctggaatgaacacagcttctactgccttgctcagaaggtcttttaaatagaccatcctagaaaccactgagtttgcttatttctgtgatttaaacatagatcttgatccaagctacatgacttttgtctttaaataacttatctaccacctcatttgtactcttgattacttacaaattctttcagtaaacacctaattttcttctgtaaaagtttggtgatttaagttttattggcagttttataaaaagacatcttctctagaaattgctaactttaggtccattttactgtgaatgaggaataggagtgagttttagaataacagatttttaaaaatccagatgatttgattaaaaccttaatcatacattgacataattcattgcttcttttttttgagatatggagtcttgctgtgttgcccaggcaggagtgcagtggtatgatctcagctcactgcaacctctgcctcccgggttcaactgattctcctgcctcagcctccctggtagctaggattacaggtgcccgccaccatgcctggctaacttttgtagttttagtagagacggggttttgcctgttggccaggctggtcttgaactcctgacctcaagtgatccatccaccttggcctcccaaagtgctgggattacgggcgtgagccactgtccctggcctcattgttcccttttctactttaaggaaagttttcatgtttaatcatctggggaaagtatgtgaaaaatatttgttaagaagtatctctttggagccaagccacctgtcttggtttctttctactaagagccataaagtatagaaatacttctagttgttaagtgcttatatttgtacctagatttagtcacacgcttttgagaaaacatctagtatgttatgatcagctattcctgagagcttggttgttaatctatatttctatttcttagtggtagtcatctttgatgaataagactaaagattctcacaggtttaaaattttatgtctactttaagggtaaaattatgaggttatggttctgggtgggttttctctagctaattcatatctcaaagagtctcaaaatgttgaatttcagtgcaagctgaatgagagatgagccatgtacacccaccgtaagacctcattccatgtttgtccagtgcctttcagtgcattatcaaagggaatccttcatggtgttgcctttattttccggggagtagatcgtgggatatagtctatctcatttttaatagtttaccgcccctggtatacaaagataatgacaataaatcactgccatataaccttgctttttccagaaacatggctgttttgtattgctgtaaccactaaataggttgcctataccattcctcctgtgaacagtgcagatttacaggttgcatggtctggcttaaggagagccatacttgagacatgtgagtaaactgaactcatattagctgtgctgcatttcagacttaaaatccatttttgtggggcagggtgtggtgtgtaaaggggggtgtttgtaatacaagttgaaggcaaaataaaatgtcctgtctcccagatgatatacatcttattatttttaaagtttattgctaattgtaggaaggtgagttgcaggtatctttgactatggtcatctggggaaggaaaattttacattttactattaatgctccttaagtgtctatggaggttaaagaataaaatggtaaatgtttctgtgcctggtttgatggtaactggttaatagttactcaccattttatgcagagtcacattagttcacaccctttctgagagccttttgggagaagcagttttattctctgagtggaacagagttctttttgttgataatttctagtttgctcccttcgttattgccaactttactggcattttatttaatgatagcagattgggaaaatggcaaatttaggttacggaggtaaatgagtatatgaaagcaattacctctaaagccagttaacaattattttgtaggtggggtacactcagcttaaagtaatgcatttttttttcccgtaaaggcagaatccatcttgttgcagatagctatctaaataatctcatatcctcttttgcaaagactacagagaataggctatgacaatcttgttcaagcctttccatttttttccctgataactaagtaatttctttgaacataccaagaagtatgtaaaaagtccatggccttattcatccacaaagtggcatcctaggcccagccttatccctagcagttgtcccagtgctgctaggttgcttatcttgtttatctggaatcactgtggagtgaaattttccacatcatccagaattgccttatttaagaagtaaaacgttttaatttttagcctttttttggtggagttatttaatatgtatatcagaggatatactagatggtaacatttctttctgtgcttggctatctttgtggacttcaggggcttctaaaacagacaggactgtgttgcctttactaaatggtctgagacagctatggttttgaatttttagttttttttttttaacccacttcccctcctggtctcttccctctctgataattaccattcatatgtgagtgttagtgtgcctccttttagcattttcttcttctctttctgattcttcatttctgactgcctaggcaaggaaaccagataaccaaacttactagaacgttctttaaaacacaagtacaaactctgggacaggacccaagacactttcctgtgaagtgctgaaaaagacctcattgtattggcatttgatatcagtttgatgtagcttagagtgcttcctgattcttgctgagtttcaggtagttgagatagagagaagtgagtcatattcatattttcccccttagaataatattttgaaaggtttcattgcttccacttgaatgctgctcttacaaaaactggggttacaagggttactaaattagcatcagtagccagaggcaataccgttgtctggaggacaccagcaaacaacacacaacaaagcaaaacaaaccttgggaaactaaggccatttgttttgttttggtgtcccctttgaagccctgccttctggccttactcctgtacagatatttttgacctataggtgcctttatgagaattgagggtctgacatcctgccccaaggagtagctaaagtaattgctagtgttttcagggattttaacatcagactggaatgaatgaatgaaactttttgtcctttttttttctgtttttttttttctaatgtagtaaggactaaggaaaacctttggtgaagacaatcatttctctctgttgatgtggatacttttcacaccgtttatttaaatgctttctcaataggtccagagccagtgttcttgttcaacctgaaagtaatggctctgggttgggccagacagttgcactctctagtttgccctctgccacaaatttgatgtgtgacctttgggcaagtcatttatcttctctgggccttagttgcctcatctgtaaaatgagggagttggagtagattaattattccagctctgaaattctaagtgaccttggctaccttgcagcagttttggatttcttccttatctttgttctgctgtttgagggggctttttacttatttccatgttattcaaaggagactaggcttgatattttattactgttcttttatggacaaaaggttacatagtatgcccttaagacttaattttaaccaaaggcctagcaccaccttaggggctgcaataaacacttaacgcgcgtgcgcacgcgcgcgcgcacacacacacacacacacacacacacacacaggtcagagtttaaggctttcgagtcatgacattctagcttttgaattgcgtgcacacacacacgcacgcacacactctggtcagagtttattaaggctttcgagtcatgacattatagcttttgagttggtgtgtgtgacaccaccctcctaagtggtgtgtgcttgtaattttttttttcagtgaaaatggattgaaaacctgttgttaatgcttagtgatattatgctcaaaacaaggaaattcccttgaaccgtgtcaattaaactggtttatatgactcaagaaaacaataccagtagatgattattaactttattcttggctctttttaggtccattttgattaagtgacttttggctggatcattcagagctctcttctagcctacccttggatgagtacaattaatgaaattcatattttcaaggacctgggagccttccttggggctgggttgagggtggggggttggggagtcctggtagaggccagctttgtggtagctggagaggaagggatgaaaccagctgctgttgcaaaggctgcttgtcattgatagaaggactcacgggcttggattgattaagactaaacatggagttggcaaactttcttcaagtattgagttctgttcaatgcattggacatgtgatttaagggaaaagtgtgaatgcttatagatgatgaaaacctggtgggctgcagagcccagtttagaagaagtgagttgggggttggggacagatttggtggtggtatttcccaactgtttcctcccctaaattcagaggaatgcagctatgccagaagccagagaagagccactcgtagcttctgctttggggacaactggtcagttgaaagtcccaggagttcctttgtggctttctgtatacttttgcctggttaaagtctgtggctaaaaaatagtcgaacctttcttgagaactctgtaacaaagtatgtttttgattaaaagagaaagccaact

SEQ ID NO: 182124 - DNA, 8495 bp, Homo sapiens
  Payload ID: 15866
  Gene Symbol: SMAD4
  Gene Name: SMAD family member 4
  Uniprot ID: Q13485
  ENST ID: ENST00000398417
  CDS Start-End: 259-1917
aacaaaatccactcacacttgcaacgcctggcaaggctcttcaatatgtgattccttgactgtcctgtgcgtctctcgagtgtaaacacctctggggctcgtgattcggggctgccagaaagagaaggaaggttatcctgaatacatgtctaacaattttccttgcaacgttagctgttgtttttcactgtttccaaaggatcaaaattgcttcagaaattggagacatatttgatttaaaaggaaaaacttgaacaaatggacaatatgtctattacgaatacaccaacaagtaatgatgcctgtctgagcattgtgcatagtttgatgtgccatagacaaggtggagagagtgaaacatttgcaaaaagagcaattgaaagtttggtaaagaagctgaaggagaaaaaagatgaattggattctttaataacagctataactacaaatggagctcatcctagtaaatgtgttaccatacagagaacattggatgggaggcttcaggtggctggtcggaaaggatttcctcatgtgatctatgcccgtctctggaggtggcctgatcttcacaaaaatgaactaaaacatgttaaatattgtcagtatgcgtttgacttaaaatgtgatagtgtctgtgtgaatccatatcactacgaacgagttgtatcacctggaattgatctctcaggattaacactgcagagtaatgctccatcaagtatgatggtgaaggatgaatatgtgcatgactttgagggacagccatcgttgtccactgaaggacattcaattcaaaccatccagcatccaccaagtaatcgtgcatcgacagagacatacagcaccccagctctgttagccccatctgagtctaatgctaccagcactgccaactttcccaacattcctgtggcttccacaagtcagcctgccagtatactggggggcagccatagtgaaggactgttgcagatagcatcagggcctcagccaggacagcagcagaatggatttactggtcagccagctacttaccatcataacagcactaccacctggactggaagtaggactgcaccatacacacctaatttgcctcaccaccaaaacggccatcttcagcaccacccgcctatgccgccccatcccggacattactggcctgttcacaatgagcttgcattccagcctcccatttccaatcatcctgctcctgagtattggtgttccattgcttactttgaaatggatgttcaggtaggagagacatttaaggttccttcaagctgccctattgttactgttgatggatacgtggacccttctggaggagatcgcttttgtttgggtcaactctccaatgtccacaggacagaagccattgagagagcaaggttgcacataggcaaaggtgtgcagttggaatgtaaaggtgaaggtgatgtttgggtcaggtgccttagtgaccacgcggtctttgtacagagttactacttagacagagaagctgggcgtgcacctggagatgctgttcataagatctacccaagtgcatatataaaggtctttgatttgcgtcagtgtcatcgacagatgcagcagcaggcggctactgcacaagctgcagcagctgcccaggcagcagccgtggcaggaaacatccctggcccaggatcagtaggtggaatagctccagctatcagtctgtcagctgctgctggaattggtgttgatgaccttcgtcgcttatgcatactcaggatgagttttgtgaaaggctggggaccggattacccaagacagagcatcaaagaaacaccttgctggattgaaattcacttacaccgggccctccagctcctagacgaagtacttcataccatgccgattgcagacccacaacctttagactgaggtcttttaccgttggggcccttaaccttatcaggatggtggactacaaaatacaatcctgtttataatctgaagatatatttcacttttgttctgctttatcttttcataaagggttgaaaatgtgtttgctgccttgctcctagcagacagaaactggattaaaacaattttttttttcctcttcagaacttgtcaggcatggctcagagcttgaagattaggagaaacacattcttattaattcttcacctgttatgtatgaaggaatcattccagtgctagaaaatttagccctttaaaacgtcttagagccttttatctgcagaacatcgatatgtatatcattctacagaataatccagtattgctgattttaaaggcagagaagttctcaaagttaattcacctatgttattttgtgtacaagttgttattgttgaacatacttcaaaaataatgtgccatgtgggtgagttaattttaccaagagtaactttactctgtgtttaaaaagtaagttaataatgtattgtaatctttcatccaaaatattttttgcaagttatattagtgaagatggtttcaattcagattgtcttgcaacttcagttttatttttgccaaggcaaaaaactcttaatctgtgtgtatattgagaatcccttaaaattaccagacaaaaaaatttaaaattacgtttgttattcctagtggatgactgttgatgaagtatacttttcccctgttaaacagtagttgtattcttctgtatttctaggcacaaggttggttgctaagaagcctataagaggaatttcttttccttcattcatagggaaaggttttgtattttttaaaacactaaaagcagcgtcactctacctaatgtctcactgttctgcaaaggtggcaatgcttaaactaaataatgaataaactgaatattttggaaactgctaaattctatgttaaatactgtgcagaataatggaaacattacagttcataataggtagtttggatatttttgtacttgatttgatgtgactttttttggtataatgtttaaatcatgtatgttatgatattgtttaaaattcagtttttgtatcttggggcaagactgcaaacttttttatatcttttggttattctaagccctttgccatcaatgatcatatcaattggcagtgactttgtatagagaatttaagtagaaaagttgcagatgtattgactgtaccacagacacaatatgtatgctttttacctagctggtagcataaataaaactgaatctcaacatacaaagttgaattctaggtttgatttttaagattttttttttcttttgcacttttgagtccaatctcagtgatgaggtaccttctactaaatgacaggcaacagccagttctattgggcagctttgtttttttccctcacactctaccgggacttccccatggacattgtgtatcatgtgtagagttggttttttttttttttaatttttattttactatagcagaaatagacctgattatctacaagatgataaatagattgtctacaggataaatagtatgaaataaaatcaaggattatctttcagatgtgtttacttttgcctggagaacttttagctatagaaacacttgtgtgatgatagtcctccttatatcacctggaatgaacacagcttctactgccttgctcagaaggtcttttaaatagaccatcctagaaaccactgagtttgcttatttctgtgatttaaacatagatcttgatccaagctacatgacttttgtctttaaataacttatctaccacctcatttgtactcttgattacttacaaattctttcagtaaacacctaattttcttctgtaaaagtttggtgatttaagttttattggcagttttataaaaagacatcttctctagaaattgctaactttaggtccattttactgtgaatgaggaataggagtgagttttagaataacagatttttaaaaatccagatgatttgattaaaaccttaatcatacattgacataattcattgcttcttttttttgagatatggagtcttgctgtgttgcccaggcaggagtgcagtggtatgatctcagctcactgcaacctctgcctcccgggttcaactgattctcctgcctcagcctccctggtagctaggattacaggtgcccgccaccatgcctggctaacttttgtagttttagtagagacggggttttgcctgttggccaggctggtcttgaactcctgacctcaagtgatccatccaccttggcctcccaaagtgctgggattacgggcgtgagccactgtccctggcctcattgttcccttttctactttaaggaaagttttcatgtttaatcatctggggaaagtatgtgaaaaatatttgttaagaagtatctctttggagccaagccacctgtcttggtttctttctactaagagccataaagtatagaaatacttctagttgttaagtgcttatatttgtacctagatttagtcacacgcttttgagaaaacatctagtatgttatgatcagctattcctgagagcttggttgttaatctatatttctatttcttagtggtagtcatctttgatgaataagactaaagattctcacaggtttaaaattttatgtctactttaagggtaaaattatgaggttatggttctgggtgggttttctctagctaattcatatctcaaagagtctcaaaatgttgaatttcagtgcaagctgaatgagagatgagccatgtacacccaccgtaagacctcattccatgtttgtccagtgcctttcagtgcattatcaaagggaatccttcatggtgttgcctttattttccggggagtagatcgtgggatatagtctatctcatttttaatagtttaccgcccctggtatacaaagataatgacaataaatcactgccatataaccttgctttttccagaaacatggctgttttgtattgctgtaaccactaaataggttgcctataccattcctcctgtgaacagtgcagatttacaggttgcatggtctggcttaaggagagccatacttgagacatgtgagtaaactgaactcatattagctgtgctgcatttcagacttaaaatccatttttgtggggcagggtgtggtgtgtaaaggggggtgtttgtaatacaagttgaaggcaaaataaaatgtcctgtctcccagatgatatacatcttattatttttaaagtttattgctaattgtaggaaggtgagttgcaggtatctttgactatggtcatctggggaaggaaaattttacattttactattaatgctccttaagtgtctatggaggttaaagaataaaatggtaaatgtttctgtgcctggtttgatggtaactggttaatagttactcaccattttatgcagagtcacattagttcacaccctttctgagagccttttgggagaagcagttttattctctgagtggaacagagttctttttgttgataatttctagtttgctcccttcgttattgccaactttactggcattttatttaatgatagcagattgggaaaatggcaaatttaggttacggaggtaaatgagtatatgaaagcaattacctctaaagccagttaacaattattttgtaggtggggtacactcagcttaaagtaatgcatttttttttcccgtaaaggcagaatccatcttgttgcagatagctatctaaataatctcatatcctcttttgcaaagactacagagaataggctatgacaatcttgttcaagcctttccatttttttccctgataactaagtaatttctttgaacataccaagaagtatgtaaaaagtccatggccttattcatccacaaagtggcatcctaggcccagccttatccctagcagttgtcccagtgctgctaggttgcttatcttgtttatctggaatcactgtggagtgaaattttccacatcatccagaattgccttatttaagaagtaaaacgttttaatttttagcctttttttggtggagttatttaatatgtatatcagaggatatactagatggtaacatttctttctgtgcttggctatctttgtggacttcaggggcttctaaaacagacaggactgtgttgcctttactaaatggtctgagacagctatggttttgaatttttagttttttttttttaacccacttcccctcctggtctcttccctctctgataattaccattcatatgtgagtgttagtgtgcctccttttagcattttcttcttctctttctgattcttcatttctgactgcctaggcaaggaaaccagataaccaaacttactagaacgttctttaaaacacaagtacaaactctgggacaggacccaagacactttcctgtgaagtgctgaaaaagacctcattgtattggcatttgatatcagtttgatgtagcttagagtgcttcctgattcttgctgagtttcaggtagttgagatagagagaagtgagtcatattcatattttcccccttagaataatattttgaaaggtttcattgcttccacttgaatgctgctcttacaaaaactggggttacaagggttactaaattagcatcagtagccagaggcaataccgttgtctggaggacaccagcaaacaacacacaacaaagcaaaacaaaccttgggaaactaaggccatttgttttgttttggtgtcccctttgaagccctgccttctggccttactcctgtacagatatttttgacctataggtgcctttatgagaattgagggtctgacatcctgccccaaggagtagctaaagtaattgctagtgttttcagggattttaacatcagactggaatgaatgaatgaaactttttgtcctttttttttctgtttttttttttctaatgtagtaaggactaaggaaaacctttggtgaagacaatcatttctctctgttgatgtggatacttttcacaccgtttatttaaatgctttctcaataggtccagagccagtgttcttgttcaacctgaaagtaatggctctgggttgggccagacagttgcactctctagtttgccctctgccacaaatttgatgtgtgacctttgggcaagtcatttatcttctctgggccttagttgcctcatctgtaaaatgagggagttggagtagattaattattccagctctgaaattctaagtgaccttggctaccttgcagcagttttggatttcttccttatctttgttctgctgtttgagggggctttttacttatttccatgttattcaaaggagactaggcttgatattttattactgttcttttatggacaaaaggttacatagtatgcccttaagacttaattttaaccaaaggcctagcaccaccttaggggctgcaataaacacttaacgcgcgtgcgcacgcgcgcgcgcacacacacacacacacacacacacacacacaggtcagagtttaaggctttcgagtcatgacattctagcttttgaattgcgtgcacacacacacgcacgcacacactctggtcagagtttattaaggctttcgagtcatgacattatagcttttgagttggtgtgtgtgacaccaccctcctaagtggtgtgtgcttgtaattttttttttcagtgaaaatggattgaaaacctgttgttaatgcttagtgatattatgctcaaaacaaggaaattcccttgaaccgtgtcaattaaactggtttatatgactcaagaaaacaataccagtagatgattattaactttattcttggctctttttaggtccattttgattaagtgacttttggctggatcattcagagctctcttctagcctacccttggatgagtacaattaatgaaattcatattttcaaggacctgggagccttccttggggctgggttgagggtggggggttggggagtcctggtagaggccagctttgtggtagctggagaggaagggatgaaaccagctgctgttgcaaaggctgcttgtcattgatagaaggactcacgggcttggattgattaagactaaacatggagttggcaaactttcttcaagtattgagttctgttcaatgcattggacatgtgatttaagggaaaagtgtgaatgcttatagatgatgaaaacctggtgggctgcagagcccagtttagaagaagtgagttgggggttggggacagatttggtggtggtatttcccaactgtttcctcccctaaattcagaggaatgcagctatgccagaagccagagaagagccactcgtagcttctgctttggggacaactggtcagttgaaagtcccaggagttcctttgtggctttctgtatacttttgcctggttaaagtctgtggctaaaaaatagtcgaacctttcttgagaactctgtaacaaagtatgtttttgattaaaagagaaagccaactaaatca

SEQ ID NO: 182125 - DNA, 544 bp, Homo sapiens
  Payload ID: 15866
  Gene Symbol: SMAD4
  Gene Name: SMAD family member 4
  ENST ID: ENST00000590061
  CDS Start-End: 124-544
atgctcagtggcttctcgacaagttggcagcaacaacacggccctggtcgtcgtcgccgctgcggatcaaaattgcttcagaaattggagacatatttgatttaaaaggaaaaacttgaacaaatggacaatatgtctattacgaatacaccaacaagtaatgatgcctgtctgagcattgtgcatagtttgatgtgccatagacaaggtggagagagtgaaacatttgcaaaaagagcaattgaaagtttggtaaagaagctgaaggagaaaaaagatgaattggattctttaataacagctataactacaaatggagctcatcctagtaaatgtgttaccatacagagaacattggatgggaggcttcaggtggctggtcggaaaggatttcctcatgtgatctatgcccgtctctggaggtggcctgatcttcacaaaaatgaactaaaacatgttaaatattgtcagtatgcgtttgacttaaaatgtgatagtgtctgtgtgaatccatatcactacgaacgagttgtatcacctggaa

SEQ ID NO: 182126 - DNA, 1371 bp, Homo sapiens
  Payload ID: 15866
  Gene Symbol: SMAD4
  Gene Name: SMAD family member 4
  ENST ID: ENST00000588745
  CDS Start-End: 1-1371
atggacaatatgtctattacgaatacaccaacaagtaatgatgcctgtctgagcattgtgcatagtttgatgtgccatagacaaggtggagagagtgaaacatttgcaaaaagagcaattgaaagtttggtaaagaagctgaaggagaaaaaagatgaattggattctttaataacagctataactacaaatggagctcatcctagtaaatgtgttaccatacagagaacattggatgggaggcttcaggtggctggtcggaaaggatttcctcatgtgatctatgcccgtctctggaggtggcctgatcttcacaaaaatgaactaaaacatgttaaatattgtcagtatgcgtttgacttaaaatgtgatagtgtctgtgtgaatccatatcactacgaacgagttgtatcacctggaattgatctctcaggattaacactgcagagtaatgctccatcaagtatgatggtgaaggatgaatatgtgcatgactttgagggacagccatcgttgtccactgaaggacattcaattcaaaccatccagcatccaccaagtaatcgtgcatcgacagagacatacagcaccccagctctgttagccccatctgagtctaatgctaccagcactgccaactttcccaacattcctgtggcttccacaactcctgagtattggtgttccattgcttactttgaaatggatgttcaggtaggagagacatttaaggttccttcaagctgccctattgttactgttgatggatacgtggacccttctggaggagatcgcttttgtttgggtcaactctccaatgtccacaggacagaagccattgagagagcaaggttgcacataggcaaaggtgtgcagttggaatgtaaaggtgaaggtgatgtttgggtcaggtgccttagtgaccacgcggtctttgtacagagttactacttagacagagaagctgggcgtgcacctggagatgctgttcataagatctacccaagtgcatatataaaggtctttgatttgcgtcagtgtcatcgacagatgcagcagcaggcggctactgcacaagctgcagcagctgcccaggcagcagccgtggcaggaaacatccctggcccaggatcagtaggtggaatagctccagctatcagtctgtcagctgctgctggaattggtgttgatgaccttcgtcgcttatgcatactcaggatgagttttgtgaaaggctggggaccggattacccaagacagagcatcaaagaaacaccttgctggattgaaattcacttacaccgggccctccagctcctagacgaagtacttcataccatgccgattgcagacccacaacctttagactga

SEQ ID NO: 182127 - DNA, 582 bp, Homo sapiens
  Payload ID: 15866
  Gene Symbol: SMAD4
  Gene Name: SMAD family member 4
  ENST ID: ENST00000589941
  CDS Start-End: 221-582
aaaaactgcttctctgcatggggtttatgagttgagacagacatttatgtgaaagagataacaacagagggaggagcaagtcttcaatatcaggttatcctgaatacatgtctaacaattttccttgcaacgttagctgttgtttttcactgtttccaaaggatcaaaattgcttcagaaattggagacatatttgatttaaaaggaaaaacttgaacaaatggacaatatgtctattacgaatacaccaacaagtaatgatgcctgtctgagcattgtgcatagtttgatgtgccatagacaaggtggagagagtgaaacatttgcaaaaagagcaattgaaagtttggtaaagaagctgaaggagaaaaaagatgaattggattctttaataacagctataactacaaatggagctcatcctagtaaatgtgttaccatacagagaacattggatgggaggcttcaggtggctggtcggaaaggatttcctcatgtgatctatgcccgtctctggaggtggcctgatcttcacaaaaatgaactaaaacatgttaaatattgtcagtatgcgtttgactt

SEQ ID NO: 182128 - DNA, 779 bp, Homo sapiens
  Payload ID: 15866
  Gene Symbol: SMAD4
  Gene Name: SMAD family member 4
  ENST ID: ENST00000588860
  CDS Start-End: 400-779
aaaccagtgtcttgctgagactcttcccgttgctggcttcgaagaggcaagctgccatattgttagcttccctatggagagcaccacatggcaaggaacagagggggtctccagccaacagcctgcaaaggactaaggccctcagtcctgtagcctgcaaggaactgaatggtgccaacaaccacatgaacttggaagcagatcctttgttccagcctcactttgtagaggacccagctaagccatgcctggaatcctgactcagagaatctgttatcctgaatacatgtctaacaattttccttgcaacgttagctgttgtttttcactgtttccaaaggatcaaaattgcttcagaaattggagacatatttgatttaaaaggaaaaacttgaacaaatggacaatatgtctattacgaatacaccaacaagtaatgatgcctgtctgagcattgtgcatagtttgatgtgccatagacaaggtggagagagtgaaacatttgcaaaaagagcaattgaaagtttggtaaagaagctgaaggagaaaaaagatgaattggattctttaataacagctataactacaaatggagctcatcctagtaaatgtgttaccatacagagaacattggatgggaggcttcaggtggctggtcggaaaggatttcctcatgtgatctatgcccgtctctggaggtggcctgatcttcacaaaaatgaactaaaacatgttaaatattgtcagtatgcgtttgacttaaaatgtgatagtgtctg

SEQ ID NO: 182129 - DNA, 568 bp, Homo sapiens
  Payload ID: 15866
  Gene Symbol: SMAD4
  Gene Name: SMAD family member 4
  ENST ID: ENST00000593223
  CDS Start-End: 1-249
tactacttagacagagaagctgggcgtgcacctggagatgctgttcataagatctacccaagtgcatatataaaggtctttgatttgcgtcagtgtcatcgacagatgcagcagcaggcggctactgcacaagctgcagcagctgcccaggcagcagccgtggcaggaaacatccctggcccaggatcagtaggtggaatagctccagctatcagtaagtatgcttttcattcttttttaaaggtataatagttgatatttttatcttgatttactcagttgattagtttctttgagcagtaatagaaattaaagtttttttttactgggatgatgacatttttgaattggtaaaatctgttcttctgtaatagttgctttttgcctatgaccctgtttgcattctttttgtatcaaaaatggagtatgggatgaaggagaaaggggatgattattatattatactgttctatctcctccttttttgttgatgcttattataattctgcctcaccagccagggtgggttgtaatcactgaagtgcttggctttattctagtaaggaaa

SEQ ID NO: 182130 - DNA, 576 bp, Homo sapiens
  Payload ID: 15866
  Gene Symbol: SMAD4
  Gene Name: SMAD family member 4
  ENST ID: ENST00000589076
  CDS Start-End: 305-576
gagcgaccctccccgtcactcggagcgggaggcgggggcagccgggagaaaggaaagctgcgggggaaaagggccaaaccctgaaattacccggatgtggtccccgcgcgcgcatgctcagtggcttctcgacaagttggcagcaacaacacggccctggtcgtcgtcgccgctgcggttatcctgaatacatgtctaacaattttccttgcaacgttagctgttgtttttcactgtttccaaaggatcaaaattgcttcagaaattggagacatatttgatttaaaaggaaaaacttgaacaaatggacaatatgtctattacgaatacaccaacaagtaatgatgcctgtctgagcattgtgcatagtttgatgtgccatagacaaggtggagagagtgaaacatttgcaaaaagagcaattgaaagtttggtaaagaagctgaaggagaaaaaagatgaattggattctttaataacagctataactacaaatggagctcatcctagtaaatgtgttaccatacagagaacattggatgggaggcttcaggtggctggtcggaaaggatttcc

SEQ ID NO: 182131 - DNA, 992 bp, Homo sapiens
  Payload ID: 15866
  Gene Symbol: SMAD4
  Gene Name: SMAD family member 4
  ENST ID: ENST00000591914
  CDS Start-End: 539-992
atgctcagtggcttctcgacaagttggcagcaacaacacggccctggtcgtcgtcgccgctgcggtaacggagcggtttgggtggcggagcctgcgttcgcgccttcccgctctcctcgggaggcccttcctgctctcccctaggctccgcggccgcccagggggtgggagcgggtgaggggagccaggcgcccagcgagagaggccccccgccgcagggcggcccgggagctcgaggcggtccggcccgcgcgggcagcggcgcggcgctgaggaggggcggcctggccgggacgcctcggggcgggggccgaggagctctccgggccgccggggaaagctacgggcccggtgcgtccgcggaccagcagcgcgggagagcggactcccctcgccaccgcccgagcccaggttatcctgaatacatgtctaacaattttccttgcaacgttagctgttgtttttcactgtttccaaaggatcaaaattgcttcagaaattggagacatatttgatttaaaaggaaaaacttgaacaaatggacaatatgtctattacgaatacaccaacaagtaatgatgcctgtctgagcattgtgcatagtttgatgtgccatagacaaggtggagagagtgaaacatttgcaaaaagagcaattgaaagtttggtaaagaagctgaaggagaaaaaagatgaattggattctttaataacagctataactacaaatggagctcatcctagtaaatgtgttaccatacagagaacattggatgggaggcttcaggtggctggtcggaaaggatttcctcatgtgatctatgcccgtctctggaggtggcctgatcttcacaaaaatgaactaaaacatgttaaatattgtcagtatgcgtttgacttaaaatgtgatagtgtctgtgtgaatccatatcactacgaacgagttgtatcacctggaattgatctctcaggattaacactgcagagtaatg

SEQ ID NO: 182132 - DNA, 1306 bp, Homo sapiens
  Payload ID: 15866
  Gene Symbol: SMAD4
  Gene Name: SMAD family member 4
  ENST ID: ENST00000592186
  CDS Start-End: 1-963
atggacaatatgtctattacgaatacaccaacaagtaatgatgcctgtctgagcattgtgcatagtttgatgtgccatagacaaggtggagagagtgaaacatttgcaaaaagagcaattgaaagtttggtaaagaagctgaaggagaaaaaagatgaattggattctttaataacagctataactacaaatggagctcatcctagtaaatgtgttaccatacagagaacattggatgggaggcttcaggtggctggtcggaaaggatttcctcatgtgatctatgcccgtctctggaggtggcctgatcttcacaaaaatgaactaaaacatgttaaatattgtcagtatgcgtttgacttaaaatgtgatagtgtctgtgtgaatccatatcactacgaacgagttgtatcacctggaattgatctctcaggattaacactgcagagtaatgctccatcaagtatgatggtgaaggatgaatatgtgcatgactttgagggacagccatcgttgtccactgaaggacattcaattcaaaccatccagcatccaccaagtaatcgtgcatcgacagagacatacagcaccccagctctgttagccccatctgagtctaatgctaccagcactgccaactttcccaacattcctgtggcttccacaagtcagcctgccagtatactggggggcagccatagtgaaggactgttgcagatagcatcagggcctcagccaggacagcagcagaatggatttactggtcagccagctacttaccatcataacagcactaccacctggactggaagtaggactgcaccatacacacctaatttgcctcaccaccaaaacggccatcttcagcaccacccgcctatgccgccccatcccggacattactggcctgttcacaatgagcttgcattccagcctcccatttccaatcatcctggtctttgatttgcgtcagtgtcatcgacagatgcagcagcaggcggctactgcacaagctgcagcagctgcccaggcagcagccgtggcaggaaacatccctggcccaggatcagtaggtggaatagctccagctatcagtctgtcagctgctgctggaattggtgttgatgaccttcgtcgcttatgcatactcaggatgagttttgtgaaaggctggggaccggattacccaagacagagcatcaaagaaacaccttgctggattgaaattcacttacaccgggccctccagctcctagacgaagtacttcataccatgccgattgcagacccacaacctttagactga

SEQ ID NO: 182133 - DNA, 1648 bp, Homo sapiens
  Payload ID: 15866
  Gene Symbol: SMAD4
  Gene Name: SMAD family member 4
  ENST ID: ENST00000611848
  CDS Start-End: 1-661
ctggactggaagtaggactgcaccatacacacctaatttgcctcaccaccaaaacggccatcttcagcaccacccgcctatgccgccccatcccggacattactggcctgttcacaatgagcttgcattccagcctcccatttccaatcatcctgctcctgagtattggtgttccattgcttactttgaaatggatgttcaggtaggagagacatttaaggttccttcaagctgccctattgttactgttgatggatacgtggacccttctggaggagatcgcttttgtttgggtcaactctccaatgtccacaggacagaagccattgagagagcaaggttgcacataggcaaaggtgtgcagttggaatgtaaaggtgaaggtgatgtttgggtcaggtgccttagtgaccacgcggtctttgtacagagttactacttagacagagaagctgggcgtgcacctggagatgctgttcataagatctacccaagtgcatatataaaggtctttgatttgcgtcagtgtcatcgacagatgcagcagcaggcggctactgcacaagctgcagcagctgcccaggcagcagccgtggcaggaaacatccctggcccaggatcagtaggtggaatagctccagctatcaagttaaactcctgactatagacttttatgatggaaacacgtggcacccatcttccacgtctgaaggcataactagtgattcattcaacccctgttcttaacctcttcagtgtggtctgtcagctgctgctggaattggtgttgatgaccttcgtcgcttatgcatactcaggatgagttttgtgaaaggctggggaccggattacccaagacagagcatcaaagaaacaccttgctggattgaaattcacttacaccgggccctccagctcctagacgaagtacttcataccatgccgattgcagacccacaacctttagactgaggtcttttaccgttggggcccttaaccttatcaggatggtggactacaaaatacaatcctgtttataatctgaagatatatttcacttttgttctgctttatcttttcataaagggttgaaaatgtgtttgctgccttgctcctagcagacagaaactggattaaaacaattttttttttcctcttcagaacttgtcaggcatggctcagagcttgaagattaggagaaacacattcttattaattcttcacctgttatgtatgaaggaatcattccagtgctagaaaatttagccctttaaaacgtcttagagccttttatctgcagaacatcgatatgtatatcattctacagaataatccagtattgctgattttaaaggcagagaagttctcaaagttaattcacctatgttattttgtgtacaagttgttattgttgaacatacttcaaaaataatgtgccatgtgggtgagttaattttaccaagagtaactttactctgtgtttaaaaagtaagttaataatgtattgtaatctttcatccaaaatattttttgcaagttatattagtgaagatggtttcaattcagattgtcttgcaacttcagttttatttttgccaaggcaaaaaactcttaatctgtgtgtatattgagaatcccttaaaattac

SEQ ID NO: 182134 - DNA, 548 bp, Homo sapiens
  Payload ID: 15867
  Gene Symbol: SMAD5
  Gene Name: SMAD family member 5
  ENST ID: ENST00000506223
  CDS Start-End: 307-548
agtagccaaaacagatttttggttgcagaactcgggcgaggatacttggggtatttggacgtttgccggcttcccaacagaatgttccggttctggtggtgatggcattggagaatggggcttaggcaagcctgtaggacttgacccaatgaaagaagcatatggcacttgtgaagataaatgttactcctccctttttaattggaacttctgcttaggacctgtgtatgacgtttcacctgtgatctgttctttcggtagccactgactttgagttacaggaaggtctccgaagatttgtgtcaaatgacgtcaatggccagcttgttttcttttactagtccagcagtaaagcgattgttgggctggaaacaaggtgatgaggaggagaaatgggcagaaaaggcagttgatgctttggtgaagaaactaaaaaagaaaaagggtgccatggaggaactggagaaagccttgagcagtccaggacagccgagtaaatgtgtcactattcccagatctttagatggacgcctgcaggtttctcacag

SEQ ID NO: 182135 - DNA, 847 bp, Homo sapiens
  Payload ID: 15867
  Gene Symbol: SMAD5
  Gene Name: SMAD family member 5
  ENST ID: ENST00000511116
  CDS Start-End: 445-847
ccgggtcctgggcgagcgggcgccgtgcgcgtgtcccgcggccgagctgctaataaagttgcagcgaggagaagcgcagcgacggcgtcgggagagcgcgcctagccggctcgcgaaaaggaagctgttgaagttattgaagtacctgttgctatattctaagaaattaaaatgtccagaaatctgcctctaaatgggatctcactatgttgctcagactggacgtgattgaactcctgggctcaagtgagtctcccgaataactgggattacaggacttgacccaatgaaagaagcatatggcacttgtgaagataaatgttactcctccctttttaattggaacttctgcttaggacctgtgtatgacgtttcacctgtgatctgttctttcggtagccactgactttgagttacaggaaggtctccgaagatttgtgtcaaatgacgtcaatggccagcttgttttcttttactagtccagcagtaaagcgattgttgggctggaaacaaggtgatgaggaggagaaatgggcagaaaaggcagttgatgctttggtgaagaaactaaaaaagaaaaagggtgccatggaggaactggagaaagccttgagcagtccaggacagccgagtaaatgtgtcactattcccagatctttagatggacgcctgcaggtttctcacagaaaaggcttaccccatgttatatattgtcgtgtttggcgctggccggatttgcagagtcatcatgagctaaagccgttggatatttgtgaatttccttttggatctaagcaaaaagaagtttgtatcaacccataccactataagagagtggagagtccag

SEQ ID NO: 182136 - DNA, 669 bp, Homo sapiens
  Payload ID: 15867
  Gene Symbol: SMAD5
  Gene Name: SMAD family member 5
  ENST ID: ENST00000507118
  CDS Start-End: 286-669
ccgggtcctgggcgagcgggcgccgtgcgcgtgtcccgcggccgagctgctaataaagttgcagcgaggagaagcgcagcgacggcgtcgggagagcgcgcctagccggctcgcgagacttgacccaatgaaagaagcatatggcacttgtgaagataaatgttactcctccctttttaattggaacttctgcttaggacctgtgtatgacgtttcacctgtgatctgttctttcggtagccactgactttgagttacaggaaggtctccgaagatttgtgtcaaatgacgtcaatggccagcttgttttcttttactagtccagcagtaaagcgattgttgggctggaaacaaggtgatgaggaggagaaatgggcagaaaaggcagttgatgctttggtgaagaaactaaaaaagaaaaagggtgccatggaggaactggagaaagccttgagcagtccaggacagccgagtaaatgtgtcactattcccagatctttagatggacgcctgcaggtttctcacagaaaaggcttaccccatgttatatattgtcgtgtttggcgctggccggatttgcagagtcatcatgagctaaagccgttggatatttgtgaatttccttttggatctaagcaaaaagaagtttgtatcaacccataccactat

SEQ ID NO: 182137 - DNA, 854 bp, Homo sapiens
  Payload ID: 15867
  Gene Symbol: SMAD5
  Gene Name: SMAD family member 5
  ENST ID: ENST00000509297
  CDS Start-End: 59-61
tgataggactgcggtgctcggccgggcagcctgggctgctgcactgcgaagctgtccaatggcttgatgaatccgtgccgccgtcgctttgtgtttcaaagataaggatccgcgcttatcggtgggaattacactctgggcagttgtgaccggctactgcaatcagctggtagttagacctggtttctgccacttgccatgtcagttttcaccactgcaaggatttcttctacttcatgtaaacttctctgtgctgcaaagagaatgccaaagcagcgtctttttgccttcaccatattcagccgctggccgggtcctatacttcaatatcagggctcaaattaatattccagtctcttcccctccccttttcccctctcctcctttcagctgctgttactacgtggagtttggagcctaagctttgaaaactcccatgtggcgcgcccgtcttaagtctgagcatgctcagtagccaaaacagatttttggttgcagaactcgggcgaggatacttggggtatttggacgtttgccggcttcccaacagaatgttccggttctggtggtgatggcattggagaatggggcttaggcaagcctgtagaaaggaagctgttgaagttattgaagtacctgttgctatattctaagaaattaaaatgtccagaaatctgcctctgacttgacccaatgaaagaagcatatggcacttgtgaagataaatgttactcctccctttttaattggaacttctgcttaggacctgtgtatgacgtttcacctgtgatctgttctttcggtagccactgactttgagttacaggaaggtctccgaagatttgtgtcaaatg

SEQ ID NO: 182138 - DNA, 368 bp, Homo sapiens
  Payload ID: 15867
  Gene Symbol: SMAD5
  Gene Name: SMAD family member 5
  ENST ID: ENST00000515005
  CDS Start-End: 59-61
tgataggactgcggtgctcggccgggcagcctgggctgctgcactgcgaagctgtccaatggcttgatgaatccgtgccgccgtcgctttgtgtttcaaagataaggatccgcgcttatcgaaaggaagctgttgaagttattgaagtacctgttgctatattctaagaaattaaaatgtccagaaatctgcctctgacttgacccaatgaaagaagcatatggcacttgtgaagataaatgttactcctccctttttaattggaacttctgcttaggacctgtgtatgacgtttcacctgtgatctgttctttcggtagccactgactttgagttacaggaaggtctccgaagatttgtgtcaaatg

SEQ ID NO: 182139 - DNA, 638 bp, Homo sapiens
  Payload ID: 15867
  Gene Symbol: SMAD5
  Gene Name: SMAD family member 5
  ENST ID: ENST00000507637
  CDS Start-End: 1-523
ccagcccaacaacactccttttcccttatctccaaacagcccttatcccccttctcctgctagcagcacatatcccaactccccagcaagttctggaccaggaagtccatttcagctcccagctgatacgcctcctcctgcctatatgccacctgatgatcagatgggtcaagataattcccagcctatggatacaagcaataatatgattcctcagattatgcccagtatatccagcagggatgttcagcctgttgcctatgaagagcctaaacattggtgttcaatagtctactatgaattaaacaatcgtgttggagaagcttttcatgcatcttctactagtgtgttagtagatggattcacagatccttcaaataacaaaagtagattctgcttgggtttgttgtcaaatgttaatcgtaattcgacaattgaaaacactaggcgacatattggaaaaggtaatcttgtcattttcctacatttaatcgaattcaatcatttgttgtacttgccatgaaccatgcattgtgaaaggtgctagaaacatacaaagaagtttgacacgtggcctctgccttaagttgccgatattgaagaatgtattaatcaaataaagacatgatgttccctca

SEQ ID NO: 182140 - DNA, 523 bp, Homo sapiens
  Payload ID: 15867
  Gene Symbol: SMAD5
  Gene Name: SMAD family member 5
  ENST ID: ENST00000513418
  CDS Start-End: 1-182
atggctttcatcccaccactgtctgtaagattcccagcagctgcagcctcaaaatttttaacaatcaggagtttgctcagcttctggctcaatctgtcaaccatgggtttgaggcagtatatgagctcaccaaaatgtgtaccattcggatgagttttgtcaagtctctgcaggagatatagtaataactgaagtgttacacaggtggagacgggaaacgttagttgctaagaactttggattaccaccgctaggaaaccagccacttggaagaccaatcaataaaggagtgttcaactcaatatttcacctgatacaagatgatgaaacgggctatcagaaatacagaaataacgatgaaggcatggagtggatgatcaagctcaggtcattggctccagaactcagactcttggtcaccactatgctacctctccttgactcctagcatctgcagctacctccccaccgtgatctccagcctctcccccaacccccaccaacaaaaatgcgttaacctcaa

SEQ ID NO: 182141 - DNA, 7012 bp, Homo sapiens
  Payload ID: 15867
  Gene Symbol: SMAD5
  Gene Name: SMAD family member 5
  Uniprot ID: Q99717
  ENST ID: ENST00000545279
  CDS Start-End: 363-1760
atccgggtcctgggcgagcgggcgccgtgcgcgtgtcccgcggccgagctgctaataaagttgcagcgaggagaagcgcagcgacggcgtcgggagagcgcgcctagccggctcgcgaaaaggaagctgttgaagttattgaagtacctgttgctatattctaagaaattaaaatgtccagaaatctgcctctgacttgacccaatgaaagaagcatatggcacttgtgaagataaatgttactcctccctttttaattggaacttctgcttaggacctgtgtatgacgtttcacctgtgatctgttctttcggtagccactgactttgagttacaggaaggtctccgaagatttgtgtcaaatgacgtcaatggccagcttgttttcttttactagtccagcagtaaagcgattgttgggctggaaacaaggtgatgaggaggagaaatgggcagaaaaggcagttgatgctttggtgaagaaactaaaaaagaaaaagggtgccatggaggaactggagaaagccttgagcagtccaggacagccgagtaaatgtgtcactattcccagatctttagatggacgcctgcaggtttctcacagaaaaggcttaccccatgttatatattgtcgtgtttggcgctggccggatttgcagagtcatcatgagctaaagccgttggatatttgtgaatttccttttggatctaagcaaaaagaagtttgtatcaacccataccactataagagagtggagagtccagtcttacctccagtattagtgcctcgtcataatgaattcaatccacaacacagccttctggttcagtttaggaacctgagccacaatgaaccacacatgccacaaaatgccacgtttccagattctttccaccagcccaacaacactccttttcccttatctccaaacagcccttatcccccttctcctgctagcagcacatatcccaactccccagcaagttctggaccaggaagtccatttcagctcccagctgatacgcctcctcctgcctatatgccacctgatgatcagatgggtcaagataattcccagcctatggatacaagcaataatatgattcctcagattatgcccagtatatccagcagggatgttcagcctgttgcctatgaagagcctaaacattggtgttcaatagtctactatgaattaaacaatcgtgttggagaagcttttcatgcatcttctactagtgtgttagtagatggattcacagatccttcaaataacaaaagtagattctgcttgggtttgttgtcaaatgttaatcgtaattcgacaattgaaaacactaggcgacatattggaaaaggtgttcatctgtactatgttggtggagaggtgtatgcggaatgcctcagtgacagcagcatatttgtacagagtaggaactgcaactttcatcatggctttcatcccaccactgtctgtaagattcccagcagctgcagcctcaaaatttttaacaatcaggagtttgctcagcttctggctcaatctgtcaaccatgggtttgaggcagtatatgagctcaccaaaatgtgtaccattcggatgagttttgtcaagggttggggagcagaatatcaccggcaggatgtaaccagcaccccatgttggattgagattcatcttcatgggcctcttcagtggctggataaagtccttactcagatgggctcccctctgaaccccatatcttctgtttcataatgcagaagtattcttttcaattatattgttagtggacttgttttaattttagagaaactttgagtacagatactgtgagcttacattgaaaacagatattacagcttatttttttctacataattgtgaccaatacatttgtattttgtgatgaatctacatttgtttgtattcatgttcatgtgattaactcttagaagtgttgtaaaagatgcagagtaagtattatgccccagttcagaaatttggcattgatcttaaactggaacatgcttttactttattgccctaacaattttttattaaatttatttgaaaatgcatcacatgatgaaaaattatagtagcttataagagggcatatacagtgaagagtaagttttccctcctactctcgatcttccagaagctgtacttttaccagtttctttgtcccaccaacttaaaaaaaaaaagtacaattcattgttttgcaaaagtgtatggtaggggcttaaaagaaactataaagttttatttgaatgaacactatgcactgctgtaactggtagtgttcagtaaaagcaaaatgatagttttctagatgacataaaatttacatttaatacagataagtgttcttcagtgtaatgtgacttcatgctatatatcttttgtaagacatttccttttttaaaaaaatttttgcaaataactgatctcaagtatatgtcatttactcaaaatctgtcataagcattactttatagctagtgacagtgcatgcacagccttgttcaactatgtttgctgcttttggacaatgttgcaagaactctatttttgacatgcattaatcttttattttgcacttttatgggtgacagtttttagcataacctttgataaaatacactcaagtgacttggacttagatgcttatccttacgtccttggtaccttttttgtattaacaaacactgcaatttatagattacatttgtaggaagttatgcttttttctggtttttgttttactttcaacctaggttataagactgttattctatagctccaacttaaggtgcctttttaattccctacagttttatgggtgttatcagtgctggagaatcatgtagttaatcccattgctcttacaagtgtcagcttacttgtatcagcctccctacgcaaggacctatgcactggagccgtaggaggctcttcagttgggccccaaggataaggctactgatttgatactaaatgaatcagcagtggatgtagggatagctgattttaaaacactcggctgggcacagtggctcacacctgtaatcccagcactttgggaggctgaggcaggcagatcatgatgtcaggagtttgagaccagcctggccaatatggtgaaaccctgtctctacaaaaaatacaaaaattagctgggcatggtggtgcgtgcctgaagtcccagctactcgggaagctgaggcagaagaatcacttgaacctgggaggcggaggttgtggtgagccgagatcgcaccactgcactccagcctgggcgacagagcgagactctgcctcaaaaaacaaaacaaaacaaaacactcacccatcaacgaatatagactcttctctcatttatcgatgatcctctttttccattttttaagtacttatgtggaagctagtctcccaaaacacaatctttagagagaaaagacatgaacgaactccaaaatatccatttaatcaatcatgtttttggctttggataaagaactttgaaccagtttttttctcaggagctgtcaaatggacacttaattatgacatgagaatgaagaaattattttggaaaaaaaaaatgacctaatttacctatcagtgaaagctttattttctggtgccttttgaaagtatatggagtcatatcattcttctgtttaaaatgttagtttggtttgactttccactttgtcctttctgctcttgtgaagaaaaaaaaaagcattttcgaggaaagaattatgcaatttcttttgttttctgtgtcattatttattgctttttcaatgtgcagccagtggatggttttagttctttcagatgaactgccatttgtgtttcagctcacagttctttgctgggtaaaagaaatactttctgacagtcacctgagccttaaatgtaagtattacatgacatgcattctgtttcttccagagttctgtctgccacacgaaagagaatatttgcttacttgatagaactttggcattttcatcattcttttacttaaccaggcttatggcatgatctctggaacaaatttgtaggaaaaaattactccaattgaatgactgatgtatgtaatcaacttcattgggctgcagtaaactagtggaaattagagagttgttttattggtgttttctactgtgagttaattaaaaattgtttttatttggggtcattatgtcacagtcttgagttaacaagatcttacgtgattggccttttctttgttttctcttaggagttgtgtctcatgaatgacagtactaaagctattaacaactaagagtttgacagagaactataagcctgttgtatctcctaaaagttgtcaactccccacccttggactttaaatgaaaattttattcagtccagctattcttacagtccctaaggattttcatatatctatgtataggagataaaatttgctagtaagatttttaaaaactggctagtgaaaggaaagtacctctgaaagaaaccattttagcaaattatggttatatgttttaatttaatctacagaatgttttatagtaaaattctagcaccactagaataatcacatagcatgtacaatatatttatgctggctgaaaagacagaatctgggaataataaaattgcaaccagtttggtaatgcaaacagcagaatagaatgaaatctcagtaatgaattaaagcaacaaaaagatattgattggcaaaaagcaagatataagagattcatttgcttaacatttctacataatatttatggtctggtcagtattggtctggtcagtattgcctggctgacgtgaaatgtaaactagtaggcgtgttattgatctgctaaaactaaccctctttttaagaggagatttaaggaagacgtcaatcaaaatgtcaaatatgtgtgtcagaatataaataatttttcacattgtattgttgctatataaaaaaaataatagaattggttgggtttctgaggtgaaatccagagtaagagtactagacagttcaacaagccacatctaatggcacagatagaggatgtagctattttatacctttcataacatttgagagtaagatatccttcaggatgtgaagtgattattaagtactcatacctgaaatctgttgtcaagattagaactggggttcatgttaaaaaccttccatattacctgagggtacctgtggggaacagttccttcccctgtgtggtagtattttgttggaagagaatgtttatacaaaaaatgaaattcttccaacagcagagaaactctaaaaagtttgatagtacctatcaaagtgctgtacttctgtgatagagaacatctgatgtaccaatttagatctatttctttatactttttctaatcaattgcttaatagtactttggatgattatcacctttgccacttaaaatatataaatatcctttttacttcatgaggaaggaagaattttttgataattactgagttcagccttttgtgatgacttatattttggacttacattttaactttaaagaatgtcagatcccttctttgtcttactagttaaatcctcacctaatctcttgggtatgaatataaatgtgtgtcatcgttatattgttcagctagatgagcaagtatcttagggtagtaggtagcctggtggttttagaagtgtttggtgatttttatggagagagttttcctaagtggtggtttataggtggtatcagatattattagggcagctttttggggagtaatctcaggtctcccagagcagcagcatttttctcattgatataagtaagattcttaggagcttttcttatcacacaagatgcctgaatcgaatgtgagaattgaaggcatttcttctgcataaacaaagaattctacctgctggacagaaacctggaaagttctttggaattcgctgaattacagtttagtatgtcctgattacagagtgacaatatttatcaagcctttgttatattggattatcttctctcttaaaatacaactgtattataattgaaatgacagcccaaaattggatggtttaccaaaaccaatgaaagggatttcacacatcaatttttatttctgttttgaagagcacatgctatataataattgctagtagcaactgcagtaaaacaggtgataagttattttctctgaaaagatccagtcctagagcaggattcttcgatcattcatggcagagtgaaaaaggtttgtatggttcttgtccaaataactcagttcttaaaattcttaaaatgatcgtaaaccattatcctttaaaggtttatttgaagatgctgttaaagtacagaattttgtgtacaggtagatttttccgtccctcattaatagtgccttcttaattaatacagactggtgttagctataacaaaactccagtaaggccaaagaatcccaagttctttgtggaaaaaaaaaaaaaatcttttagggtcagattttcccttctaatatcattgaagatgatgttgcattgatttattcataaagtattttaactataggaactctagaagataatggttaggcaagtgattttttttttaaatatggttggcgtaagttgtattttgaaattcacttattttaaaatcgaagaggattgtaatcatggaaatagaatgtttgtatctacctgcccacattttcttaaaaagatatttcatatacagataatgaagaccaagctagtggctgcactgtaggtctgctgcttatttgtatttgttgtgcttctgtttatgttgtagaagctgaaattctagcaacatgcttcaattctgttattttgatacttatgaaaatgtattaggttttactatattgtgcttttgaaagccataactcttaagaactttgtttttgcatattgtttgctaattctttactttaataaacctcaaaacct

SEQ ID NO: 182142 - DNA, 6937 bp, Homo sapiens
  Payload ID: 15867
  Gene Symbol: SMAD5
  Gene Name: SMAD family member 5
  Uniprot ID: Q99717
  ENST ID: ENST00000545620
  CDS Start-End: 286-1683
ccgggtcctgggcgagcgggcgccgtgcgcgtgtcccgcggccgagctgctaataaagttgcagcgaggagaagcgcagcgacggcgtcgggagagcgcgcctagccggctcgcgagacttgacccaatgaaagaagcatatggcacttgtgaagataaatgttactcctccctttttaattggaacttctgcttaggacctgtgtatgacgtttcacctgtgatctgttctttcggtagccactgactttgagttacaggaaggtctccgaagatttgtgtcaaatgacgtcaatggccagcttgttttcttttactagtccagcagtaaagcgattgttgggctggaaacaaggtgatgaggaggagaaatgggcagaaaaggcagttgatgctttggtgaagaaactaaaaaagaaaaagggtgccatggaggaactggagaaagccttgagcagtccaggacagccgagtaaatgtgtcactattcccagatctttagatggacgcctgcaggtttctcacagaaaaggcttaccccatgttatatattgtcgtgtttggcgctggccggatttgcagagtcatcatgagctaaagccgttggatatttgtgaatttccttttggatctaagcaaaaagaagtttgtatcaacccataccactataagagagtggagagtccagtcttacctccagtattagtgcctcgtcataatgaattcaatccacaacacagccttctggttcagtttaggaacctgagccacaatgaaccacacatgccacaaaatgccacgtttccagattctttccaccagcccaacaacactccttttcccttatctccaaacagcccttatcccccttctcctgctagcagcacatatcccaactccccagcaagttctggaccaggaagtccatttcagctcccagctgatacgcctcctcctgcctatatgccacctgatgatcagatgggtcaagataattcccagcctatggatacaagcaataatatgattcctcagattatgcccagtatatccagcagggatgttcagcctgttgcctatgaagagcctaaacattggtgttcaatagtctactatgaattaaacaatcgtgttggagaagcttttcatgcatcttctactagtgtgttagtagatggattcacagatccttcaaataacaaaagtagattctgcttgggtttgttgtcaaatgttaatcgtaattcgacaattgaaaacactaggcgacatattggaaaaggtgttcatctgtactatgttggtggagaggtgtatgcggaatgcctcagtgacagcagcatatttgtacagagtaggaactgcaactttcatcatggctttcatcccaccactgtctgtaagattcccagcagctgcagcctcaaaatttttaacaatcaggagtttgctcagcttctggctcaatctgtcaaccatgggtttgaggcagtatatgagctcaccaaaatgtgtaccattcggatgagttttgtcaagggttggggagcagaatatcaccggcaggatgtaaccagcaccccatgttggattgagattcatcttcatgggcctcttcagtggctggataaagtccttactcagatgggctcccctctgaaccccatatcttctgtttcataatgcagaagtattcttttcaattatattgttagtggacttgttttaattttagagaaactttgagtacagatactgtgagcttacattgaaaacagatattacagcttatttttttctacataattgtgaccaatacatttgtattttgtgatgaatctacatttgtttgtattcatgttcatgtgattaactcttagaagtgttgtaaaagatgcagagtaagtattatgccccagttcagaaatttggcattgatcttaaactggaacatgcttttactttattgccctaacaattttttattaaatttatttgaaaatgcatcacatgatgaaaaattatagtagcttataagagggcatatacagtgaagagtaagttttccctcctactctcgatcttccagaagctgtacttttaccagtttctttgtcccaccaacttaaaaaaaaaaagtacaattcattgttttgcaaaagtgtatggtaggggcttaaaagaaactataaagttttatttgaatgaacactatgcactgctgtaactggtagtgttcagtaaaagcaaaatgatagttttctagatgacataaaatttacatttaatacagataagtgttcttcagtgtaatgtgacttcatgctatatatcttttgtaagacatttccttttttaaaaaaatttttgcaaataactgatctcaagtatatgtcatttactcaaaatctgtcataagcattactttatagctagtgacagtgcatgcacagccttgttcaactatgtttgctgcttttggacaatgttgcaagaactctatttttgacatgcattaatcttttattttgcacttttatgggtgacagtttttagcataacctttgataaaatacactcaagtgacttggacttagatgcttatccttacgtccttggtaccttttttgtattaacaaacactgcaatttatagattacatttgtaggaagttatgcttttttctggtttttgttttactttcaacctaggttataagactgttattctatagctccaacttaaggtgcctttttaattccctacagttttatgggtgttatcagtgctggagaatcatgtagttaatcccattgctcttacaagtgtcagcttacttgtatcagcctccctacgcaaggacctatgcactggagccgtaggaggctcttcagttgggccccaaggataaggctactgatttgatactaaatgaatcagcagtggatgtagggatagctgattttaaaacactcggctgggcacagtggctcacacctgtaatcccagcactttgggaggctgaggcaggcagatcatgatgtcaggagtttgagaccagcctggccaatatggtgaaaccctgtctctacaaaaaatacaaaaattagctgggcatggtggtgcgtgcctgaagtcccagctactcgggaagctgaggcagaagaatcacttgaacctgggaggcggaggttgtggtgagccgagatcgcaccactgcactccagcctgggcgacagagcgagactctgcctcaaaaaacaaaacaaaacaaaacactcacccatcaacgaatatagactcttctctcatttatcgatgatcctctttttccattttttaagtacttatgtggaagctagtctcccaaaacacaatctttagagagaaaagacatgaacgaactccaaaatatccatttaatcaatcatgtttttggctttggataaagaactttgaaccagtttttttctcaggagctgtcaaatggacacttaattatgacatgagaatgaagaaattattttggaaaaaaaaaatgacctaatttacctatcagtgaaagctttattttctggtgccttttgaaagtatatggagtcatatcattcttctgtttaaaatgttagtttggtttgactttccactttgtcctttctgctcttgtgaagaaaaaaaaaagcattttcgaggaaagaattatgcaatttcttttgttttctgtgtcattatttattgctttttcaatgtgcagccagtggatggttttagttctttcagatgaactgccatttgtgtttcagctcacagttctttgctgggtaaaagaaatactttctgacagtcacctgagccttaaatgtaagtattacatgacatgcattctgtttcttccagagttctgtctgccacacgaaagagaatatttgcttacttgatagaactttggcattttcatcattcttttacttaaccaggcttatggcatgatctctggaacaaatttgtaggaaaaaattactccaattgaatgactgatgtatgtaatcaacttcattgggctgcagtaaactagtggaaattagagagttgttttattggtgttttctactgtgagttaattaaaaattgtttttatttggggtcattatgtcacagtcttgagttaacaagatcttacgtgattggccttttctttgttttctcttaggagttgtgtctcatgaatgacagtactaaagctattaacaactaagagtttgacagagaactataagcctgttgtatctcctaaaagttgtcaactccccacccttggactttaaatgaaaattttattcagtccagctattcttacagtccctaaggattttcatatatctatgtataggagataaaatttgctagtaagatttttaaaaactggctagtgaaaggaaagtacctctgaaagaaaccattttagcaaattatggttatatgttttaatttaatctacagaatgttttatagtaaaattctagcaccactagaataatcacatagcatgtacaatatatttatgctggctgaaaagacagaatctgggaataataaaattgcaaccagtttggtaatgcaaacagcagaatagaatgaaatctcagtaatgaattaaagcaacaaaaagatattgattggcaaaaagcaagatataagagattcatttgcttaacatttctacataatatttatggtctggtcagtattggtctggtcagtattgcctggctgacgtgaaatgtaaactagtaggcgtgttattgatctgctaaaactaaccctctttttaagaggagatttaaggaagacgtcaatcaaaatgtcaaatatgtgtgtcagaatataaataatttttcacattgtattgttgctatataaaaaaaataatagaattggttgggtttctgaggtgaaatccagagtaagagtactagacagttcaacaagccacatctaatggcacagatagaggatgtagctattttatacctttcataacatttgagagtaagatatccttcaggatgtgaagtgattattaagtactcatacctgaaatctgttgtcaagattagaactggggttcatgttaaaaaccttccatattacctgagggtacctgtggggaacagttccttcccctgtgtggtagtattttgttggaagagaatgtttatacaaaaaatgaaattcttccaacagcagagaaactctaaaaagtttgatagtacctatcaaagtgctgtacttctgtgatagagaacatctgatgtaccaatttagatctatttctttatactttttctaatcaattgcttaatagtactttggatgattatcacctttgccacttaaaatatataaatatcctttttacttcatgaggaaggaagaattttttgataattactgagttcagccttttgtgatgacttatattttggacttacattttaactttaaagaatgtcagatcccttctttgtcttactagttaaatcctcacctaatctcttgggtatgaatataaatgtgtgtcatcgttatattgttcagctagatgagcaagtatcttagggtagtaggtagcctggtggttttagaagtgtttggtgatttttatggagagagttttcctaagtggtggtttataggtggtatcagatattattagggcagctttttggggagtaatctcaggtctcccagagcagcagcatttttctcattgatataagtaagattcttaggagcttttcttatcacacaagatgcctgaatcgaatgtgagaattgaaggcatttcttctgcataaacaaagaattctacctgctggacagaaacctggaaagttctttggaattcgctgaattacagtttagtatgtcctgattacagagtgacaatatttatcaagcctttgttatattggattatcttctctcttaaaatacaactgtattataattgaaatgacagcccaaaattggatggtttaccaaaaccaatgaaagggatttcacacatcaatttttatttctgttttgaagagcacatgctatataataattgctagtagcaactgcagtaaaacaggtgataagttattttctctgaaaagatccagtcctagagcaggattcttcgatcattcatggcagagtgaaaaaggtttgtatggttcttgtccaaataactcagttcttaaaattcttaaaatgatcgtaaaccattatcctttaaaggtttatttgaagatgctgttaaagtacagaattttgtgtacaggtagatttttccgtccctcattaatagtgccttcttaattaatacagactggtgttagctataacaaaactccagtaaggccaaagaatcccaagttctttgtggaaaaaaaaaaaaaatcttttagggtcagattttcccttctaatatcattgaagatgatgttgcattgatttattcataaagtattttaactataggaactctagaagataatggttaggcaagtgattttttttttaaatatggttggcgtaagttgtattttgaaattcacttattttaaaatcgaagaggattgtaatcatggaaatagaatgtttgtatctacctgcccacattttcttaaaaagatatttcatatacagataatgaagaccaagctagtggctgcactgtaggtctgctgcttatttgtatttgttgtgcttctgtttatgttgtagaagctgaaattctagcaacatgcttcaattctgttattttgatacttatgaaaatgtattaggttttactatattgtgcttttgaaagccataactcttaagaactttgtttttgcatattgtttgctaattctttactttaataaacctcaaaacctgc

SEQ ID NO: 182143 - DNA, 3835 bp, Homo sapiens
  Payload ID: 15868
  Gene Symbol: SMAD6
  Gene Name: SMAD family member 6
  Uniprot ID: O43541
  ENST ID: ENST00000288840
  CDS Start-End: 1032-2522
agactggcatatgatgggaggcagccaatgactccgcggcgctcctccgggggccctcagtgtgcgtttgaggagaacaaaaaagagagagagagccgagcgggggagcgatcgagggagctgagccgagagaaagagccgccgggcgctgcctcgccagacctcgctgggaccccggggccaccgggaggcacttttgtggaggggggagggggggcgacctcggcagcctcggcgcacgaagcgtccgagggcagcgtggggcgggctgcgacctctgcatcggtggactgcatttttaattaaggattcccagcagctctttgggatttttacagcttccactcatgtgttgacacccgcgtccaggagaaactcgctccaagtgcatctagcgcctgggacctgagacggcgttggcctttcgtgcatgcaaatccagggatttaggttttgtttgggatttccttttctttctttccttttttttttctttttgcagggagtaagaagggagctgggggtatcaacaagcctgcctttcggatcctgcgggaaaagcccatgtagttaagcgctttggtttaaaaaaaaggcaaggtaaaggcagggctttccagacacatttaggggttcgcgcgagcgctttgtgctcatggaccagccgcacaacttttgaaggctcgccggcccatgtggggtctttctggcggcgcgccgcctgcagcccccctaaagcgcgggggctggagttgttgagcagccccgccgctgtggtccatgtagccgctggccgcgcgcggactgcggctcggcgtgcgcgtgttcccggccgtcccgcctcggcgagctccctcatgttgtcgccctgcggcgccccttcgacgacaggctgtgcgcggtctgcacggcgctccgcggcggagcttcatgtggggctgcgacccgcgcagccggcgcctcgctgagggaacggacccccggtaaccggagaccgcctcccccccacccctggcgccaaaggatatcgtatgttcaggtccaaacgctcggggctggtgcggcgactttggcgaagtcgtgtggtccccgaccgggaggaaggcggcagcggcggcggcggtggcggcgacgaggatgggagcttgggcagccgagctgagccggccccgcgggcaagagagggcggaggctgcggccgctccgaagtccgcccggtagccccgcggcggccccgggacgcagtgggacagcgaggcgcccagggcgcggggaggcgccggcgcgcagggggccccccgaggcccatgtcggagccaggggccggcgctgggagctccctgctggacgtggcggagccgggaggcccgggctggctgcccgagagtgactgcgagacggtgacctgctgtctcttttcggagcgggacgccgccggcgcgccccgggacgccagcgaccccctggccggggcggccctggagccggcgggcggcgggcggagtcgcgaagcgcgctcgcggctgctgctgctggagcaggaactcaaaaccgtcacgtactcgctgctgaagcggctcaaggagcgctcgctggacacgctgctggaggcggtggagtcccgcggcggcgtgccgggcggctgcgtgctggtgccgcgcgccgacctccgcctgggcggccagcccgcgccgccgcagctgctgctcggccgcctctttcgctggcccgacctgcagcacgccgtggagctgaagcccctgtgcggctgccacagcttcgccgccgccgccgacggccctaccgtgtgctgcaacccctaccacttcagccggctctgcgggcccgaatctccgccacctccctactctcggctgtctcctcgcgacgagtacaagccactggatctgtccgattccacattgtcttacactgaaacggaggctaccaactccctcatcactgctccgggtgaattctcagacgccagcatgtctccggacgccaccaagccgagccactggtgcagcgtggcgtactgggagcaccggacgcgcgtgggccgcctctatgcggtgtacgaccaggccgtcagcatcttctacgacctacctcagggcagcggcttctgcctgggccagctcaacctggagcagcgcagcgagtcggtgcggcgaacgcgcagcaagatcggcttcggcatcctgctcagcaaggagcccgacggcgtgtgggcctacaaccgcggcgagcaccccatcttcgtcaactccccgacgctggacgcgcccggcggccgcgccctggtcgtgcgcaaggtgccccccggctactccatcaaggtgttcgacttcgagcgctcgggcctgcagcacgcgcccgagcccgacgccgccgacggcccctacgaccccaacagcgtccgcatcagcttcgccaagggctgggggccctgctactcccggcagttcatcacctcctgcccctgctggctggagatcctcctcaacaaccccagatagtggcggccccggcgggaggggcgggtgggaggccgcggccaccgccacctgccggcctcgagaggggccgatgcccagagacacagcccccacggacaaaaccccccagatatcatctacctagatttaatataaagttttatatattatatggaaatatatattatacttgtaattatggagtcatttttacaatgtaattatttatgtatggtgcaatgtgtgtatatggacaaaacaagaaagacgcactttggcttataattctttcaatacagatatattttctttctcttcctccttcctcttccttactttttatatatatatataaagaaaatgatacagcagagctaggtggaaaagcctgggtttggtgtatggtttttgagatattaatgcccagacaaaaagctaataccagtcactcgataataaagtattcgcattatagttttttttaaactgtcttctttttacaaagaggggcaggtagggcttcagcggatttctgacccatcatgtaccttgaaacttgacctcagttttcaagttttacttttattggataaagacagaacaaattgaaaagggaggaaagtcacatttactcttaagtaaaccagagaaagttctgttgttccttcctgcccatggctatggggtgtccagtggatagggatggcggtggggaaaagaatacactggccatttatcctggacaagctcttccagtctgatggaggaggttcatgccctagcctagaaaggcccaggtccatgccccccatctttgagttatgagcaagctaaaagaagacactatttctcaccattttgtggaaatggcctggggaacaaagactgaaatgggccttgagcccacctgctaccttgcagagaaccatctcgagccccgtagatctttttaggacctccacaggctatttcccaccccccagccaaaaatagctcagaatctgcccatccagggctgtattaatgatttatgtaaaggcagatggtttatttctactttgtgaaagggaaaagttgaggttctggaaggttaaatgatttgctcatgagacaaaatcaaggttagaagttacatggaattgtaggaccagagccatatcattagatcagctttctgaagaatattctcaaaaaaagaaagtctccttggccagataactaagaggaatgtttcattgtatatcttttttcttggagatttatattaacatattaagtgctctgagaagtcctgtgtattatctcttgctgcataataaattatccccaaactt

SEQ ID NO: 182144 - DNA, 632 bp, Homo sapiens
  Payload ID: 15868
  Gene Symbol: SMAD6
  Gene Name: SMAD family member 6
  ENST ID: ENST00000558937
  CDS Start-End: 1-168
tctcctcgcgacgagtacaagccactggatctgtccgattccacattgtcttacactgaaacggaggctaccaactccctcatcactgctccgggtgaattctcagcagatgctgggataggaagccgagggaaccgtggtttggagtcctctgtcccctgcagttagaagctggtcatagggacccctacatccggaggaatacctgaatcaaactttccttgagaaatgagaggttggtgttggactggggacatcgagggccaggaccaaggtctgtggggccctttgggagcatggctggtggcatggtggcctggtggcatgctggctgggactgacagcccctcaggctggggctgcataccttgtgggcatgtctggatggctgtgtgtctccatctgagacattcttccctcaccccacatccatgccatggtagcagtcgccaaaatcatagccatttattgagtgtatgctatggccggcactccacttggccgctttatatgcattctcttgggacagccatgggctgtttgtctccagggtttgtgctcttcatcactgttttgtcccccacttttctgcaagggccaaatgtaccttcaataaatgtatttcccctaaa

SEQ ID NO: 182145 - DNA, 1401 bp, Homo sapiens
  Payload ID: 15868
  Gene Symbol: SMAD6
  Gene Name: SMAD family member 6
  Uniprot ID: O43541
  ENST ID: ENST00000557916
  CDS Start-End: 1-1017
atgttcaggtccaaacgctcggggctggtgcggcgactttggcgaagtcgtgtggtccccgaccgggaggaaggcggcagcggcggcggcggtggcggcgacgaggatgggagcttgggcagccgagctgagccggccccgcgggcaagagagggcggaggctgcggccgctccgaagtccgcccggtagccccgcggcggccccgggacgcagtgggacagcgaggcgcccagggcgcggggaggcgccggcgcgcagggggccccccgaggcccatgtcggagccaggggccggcgctgggagctccctgctggacgtggcggagccgggaggcccgggctggctgcccgagagtgactgcgagacggtgacctgctgtctcttttcggagcgggacgccgccggcgcgccccgggacgccagcgaccccctggccggggcggccctggagccggcgggcggcgggcggagtcgcgaagcgcgctcgcggctgctgctgctggagcaggaactcaaaaccgtcacgtactcgctgctgaagcggctcaaggagcgctcgctggacacgctgctggaggcggtggagtcccgcggcggcgtgccgggcggctgcgtgctggtgccgcgcgccgacctccgcctgggcggccagcccgcgccgccgcagctgctgctcggccgcctctttcgctggcccgacctgcagcacgccgtggagctgaagcccctgtgcggctgccacagcttcgccgccgccgccgacggccctaccgtgtgctgcaacccctaccacttcagccggctctgcgggcccgaatctccgccacctccctactctcggctgtctcctcgcgacgagtacaagccactggatctgtccgattccacattgtcttacactgaaacggaggctaccaactccctcatcactgctccgggtgaattctcagcagcagatgctgggataggaagccgagggaaccgtggtttggagtcctctgtcccctgcagttagaagctggtcatagggacccctacatccggaggaatacctgaatcaaactttccttgagaaatgagagacgccagcatgtctccggacgccaccaagccgagccactggtgcagcgtggcgtactgggagcaccggacgcgcgtgggccgcctctatgcggtgtacgaccaggccgtcagcatcttctacgacctacctcagggcagcggcttctgcctgggccagctcaacctggagcagcgcagcgagtcggtgcggcgaacgcgcagcaagatcggcttcggcatcctgctcagcaaggagcccgacggcgtgtgggcctacaaccgcggcgagcaccccatcttcgtcaactccccgacgctggacgcgcccggcggccgc

SEQ ID NO: 182146 - DNA, 573 bp, Homo sapiens
  Payload ID: 15868
  Gene Symbol: SMAD6
  Gene Name: SMAD family member 6
  ENST ID: ENST00000559931
  CDS Start-End: 1-189
ccacctccctactctcggctgtctcctcgcgacgagtacaagccactggatctgtccgattccacattgtcttacactgaaacggaggctaccaactccctcatcactgctccgggtgaattctcagcagatgctgggataggaagccgagggaaccgtggtttggagtcctctgtcccctgcagttagaagctggtcatagggacccctacatccggaggaatacctgaatcaaactttccttgagaaatgagagacgccagcatgtctccggacgccaccaagccgagccactggtgcagcgtggcgtactgggagcaccggacgcgcgtgggccgcctctatgcggtgtacgaccaggccgtcagcatcttctacgacctacctcagggcagcggcttctgcctgggccagctcaacctggagcagcgcagcgagtcggtgcggcgaacgcgcagcaagatcggcttcggcatcctgctcagcaaggagcccgacggcgtgtgggcctacaaccgcggcgagcaccccatcttcgtcaactccccgacgctggacgcgcccggcggccgc

SEQ ID NO: 182147 - DNA, 3087 bp, Homo sapiens
  Payload ID: 15869
  Gene Symbol: SMAD7
  Gene Name: SMAD family member 7
  Uniprot ID: O15105
  ENST ID: ENST00000262158
  CDS Start-End: 288-1568
cggagagccgcgcagggcgcgggccgcgcggggtggggcagccggagcgcaggcccccgatccccggcgggcgcccccgggcccccgcgcgcgccccggcctccgggagactggcgcatgccacggagcgcccctcgggccgccgccgctcctgcccgggcccctgctgctgctgctgtcgcctgcgcctgctgccccaactcggcgcccgacttcttcatggtgtgcggaggtcatgttcgctccttagcaggcaaacgacttttctcctcgcctcctcgccccgcatgttcaggaccaaacgatctgcgctcgtccggcgtctctggaggagccgtgcgcccggcggcgaggacgaggaggagggcgcagggggaggtggaggaggaggcgagctgcggggagaaggggcgacggacagccgagcgcatggggccggtggcggcggcccgggcagggctggatgctgcctgggcaaggcggtgcgaggtgccaaaggtcaccaccatccccacccgccagccgcgggcgccggcgcggccgggggcgccgaggcggatctgaaggcgctcacgcactcggtgctcaagaaactgaaggagcggcagctggagctgctgctccaggccgtggagtcccgcggcgggacgcgcaccgcgtgcctcctgctgcccggccgcctggactgcaggctgggcccgggggcgcccgccggcgcgcagcctgcgcagccgccctcgtcctactcgctccccctcctgctgtgcaaagtgttcaggtggccggatctcaggcattcctcggaagtcaagaggctgtgttgctgtgaatcttacgggaagatcaaccccgagctggtgtgctgcaacccccatcaccttagccgactctgcgaactagagtctcccccccctccttactccagatacccgatggattttctcaaaccaactgcagactgtccagatgctgtgccttcctccgctgaaacagggggaacgaattatctggcccctggggggctttcagattcccaacttcttctggagcctggggatcggtcacactggtgcgtggtggcatactgggaggagaagacgagagtggggaggctctactgtgtccaggagccctctctggatatcttctatgatctacctcaggggaatggcttttgcctcggacagctcaattcggacaacaagagtcagctggtgcagaaggtgcggagcaaaatcggctgcggcatccagctgacgcgggaggtggatggtgtgtgggtgtacaaccgcagcagttaccccatcttcatcaagtccgccacactggacaacccggactccaggacgctgttggtacacaaggtgttccccggtttctccatcaaggctttcgactacgagaaggcgtacagcctgcagcggcccaatgaccacgagtttatgcagcagccgtggacgggctttaccgtgcagatcagctttgtgaagggctggggccagtgctacacccgccagttcatcagcagctgcccgtgctggctagaggtcatcttcaacagccggtagccgcgtgcggaggggacagagcgtgagctgagcaggccacacttcaaactactttgctgctaatattttcctcctgagtgcttgcttttcatgcaaactctttggtcgttttttttttgtttgttggttggttttcttcttctcgtcctcgtttgtgttctgttttgtttcgctctttgagaaatagcttatgaaaagaattgttgggggtttttttggaagaaggggcaggtatgatcggcaggacaccctgataggaagaggggaagcagaaatccaagcaccaccaaacacagtgtatgaaggggggcggtcatcatttcacttgtcaggagtgtgtgtgagtgtgagtgtgcggctgtgtgtgcacgcgtgtgcaggagcggcagatggggagacaacgtgctctttgttttgtgtctcttatggatgtccccagcagagaggtttgcagtcccaagcggtgtctctcctgccccttggacacgctcagtggggcagaggcagtacctgggcaagctggcggctggggtcccagcagctgccaggagcacggctctgtccccagcctgggaaagcccctgcccctcctctccctcatcaaggacacgggcctgtccacaggcttctgagcagcgagcctgctagtggccgaaccagaaccaattattttcatccttgtcttattcccttcctgccagcccctgccattgtagcgtctttcttttttggccatctgctcctggatctccctgagatgggcttcccaagggctgccggggcagccccctcacagtattgctcacccagtgccctctcccctcagcctctcccctgcctgccctggtgacatcaggtttttcccggacttagaaaaccagctcagcactgcctgctcccatcctgtgtgttaagctctgctattaggccagcaagcggggatgtccctgggagggacatgcttagcagtccccttccctccaagaaggatttggtccgtcataacccaaggtaccatcctaggctgacacctaactcttctttcatttcttctacaactcatacactcgtatgatacttcgacactgttcttagctcaatgagcatgtttagactttaacataagctatttttctaactacaaaggtttaaatgaacaagagaagcattctcattggaaatttagcattgtagtgctttgagagagaaaggactcctgaaaaaaaacctgagatttattaaagaaaaaaatgtattttatgttatatataaatatattattacttgtaaatataaagacgttttataagcatcattatttatgtattgtgcaatgtgtataaacaagaaaaataaagaaaagatgcactttgctttaatataaatgcaaataacaaatgccaaattaaaaaagataaacacaagattggtgtttttttctatgggtgttatcacctagctgaatgtttttctaaaggagtttatgttccattaaacgatttttaaaatgtacacttga

SEQ ID NO: 182148 - DNA, 574 bp, Homo sapiens
  Payload ID: 15869
  Gene Symbol: SMAD7
  Gene Name: SMAD family member 7
  ENST ID: ENST00000586093
  CDS Start-End: 101-574
gttatcataagtttctatctctcttctcatggctgggcctttattttctcttgcttttttaatttcagagtctcccccccctccttactccagatacccgatggattttctcaaaccaactgcagactgtccagatgctgtgccttcctccgctgaaacagggggaacgaattatctggcccctggggggctttcagattcccaacttcttctggagcctggggatcggtcacactggtgcgtggtggcatactgggaggagaagacgagagtggggaggctctactgtgtccaggagccctctctggatatcttctatgatctacctcaggggaatggcttttgcctcggacagctcaattcggacaacaagagtcagctggtgcagaaggtgcggagcaaaatcggctgcggcatccagctgacgcgggaggtggatggtgtgtgggtgtacaaccgcagcagttaccccatcttcatcaagtccgccacactggacaacccggactccaggacgctgttggtacacaaggtgttccccggtttctccatcaaggctttcgactacgagaag

SEQ ID NO: 182149 - DNA, 1152 bp, Homo sapiens
  Payload ID: 15869
  Gene Symbol: SMAD7
  Gene Name: SMAD family member 7
  Uniprot ID: O15105
  ENST ID: ENST00000591805
  CDS Start-End: 138-773
agtaaatacggagaatcacgtcgaacaccagtggcccagatactgtcgtggccgcgcacctttggagttttggggcaaagagagttggatggaaggccgaactggagtctcccccccctccttactccagatacccgatggattttctcaaaccaactgcagactgtccagatgctgtgccttcctccgctgaaacagggggaacgaattatctggcccctggggggctttcagattcccaacttcttctggagcctggggatcggtcacactggtgcgtggtggcatactgggaggagaagacgagagtggggaggctctactgtgtccaggagccctctctggatatcttctatgatctacctcaggggaatggcttttgcctcggacagctcaattcggacaacaagagtcagctggtgcagaaggtgcggagcaaaatcggctgcggcatccagctgacgcgggaggtggatggtgtgtgggtgtacaaccgcagcagttaccccatcttcatcaagtccgccacactggacaacccggactccaggacgctgttggtacacaaggtgttccccggtttctccatcaaggctttcgactacgagaaggcgtacagcctgcagcggcccaatgaccacgagtttatgcagcagccgtggacgggctttaccgtgcagatcagctttgtgaagggctggggccagtgctacacccgccagttcatcagcagctgcccgtgctggctagaggtcatcttcaacagccggtagccgcgtgcggaggggacagagcgtgagctgagcaggccacacttcaaactactttgctgctaatattttcctcctgagtgcttgcttttcatgcaaactctttggtcgttttttttttgtttgttggttggttttcttcttctcgtcctcgtttgtgttctgttttgtttcgctctttgagaaatagcttatgaaaagaattgttgggggtttttttggaagaaggggcaggtatgatcggcaggacaccctgataggaagaggggaagcagaaatccaagcaccaccaaacacagtgtatgaaggggggcggtcatcatttcacttgtcaggagtgtgtgtgagtgtgagtgtgcggctgtgtgtgcacgcgtgtgca

SEQ ID NO: 182150 - DNA, 1278 bp, Homo sapiens
  Payload ID: 15869
  Gene Symbol: SMAD7
  Gene Name: SMAD family member 7
  Uniprot ID: O15105
  ENST ID: ENST00000589634
  CDS Start-End: 1-1278
atgttcaggaccaaacgatctgcgctcgtccggcgtctctggaggagccgtgcgcccggcggcgaggacgaggaggagggcgcagggggaggtggaggaggaggcgagctgcggggagaaggggcgacggacagccgagcgcatggggccggtggcggcggcccgggcagggctggatgctgcctgggcaaggcggtgcgaggtgccaaaggtcaccaccatccccacccgccagccgcgggcgccggcgcggccgggggcgccgaggcggatctgaaggcgctcacgcactcggtgctcaagaaactgaaggagcggcagctggagctgctgctccaggccgtggagtcccgcggcgggacgcgcaccgcgtgcctcctgctgcccggccgcctggactgcaggctgggcccgggggcgcccgccggcgcgcagcctgcgcagccgccctcgtcctactcgctccccctcctgctgtgcaaagtgttcaggtggccggatctcaggcattcctcggaagtcaagaggctgtgttgctgtgaatcttacgggaagatcaaccccgagctggtgtgctgcaacccccatcaccttagccgactctgcgaactagagtctcccccccctccttactccagatacccgatggattttctcaaaccaactgactgtccagatgctgtgccttcctccgctgaaacagggggaacgaattatctggcccctggggggctttcagattcccaacttcttctggagcctggggatcggtcacactggtgcgtggtggcatactgggaggagaagacgagagtggggaggctctactgtgtccaggagccctctctggatatcttctatgatctacctcaggggaatggcttttgcctcggacagctcaattcggacaacaagagtcagctggtgcagaaggtgcggagcaaaatcggctgcggcatccagctgacgcgggaggtggatggtgtgtgggtgtacaaccgcagcagttaccccatcttcatcaagtccgccacactggacaacccggactccaggacgctgttggtacacaaggtgttccccggtttctccatcaaggctttcgactacgagaaggcgtacagcctgcagcggcccaatgaccacgagtttatgcagcagccgtggacgggctttaccgtgcagatcagctttgtgaagggctggggccagtgctacacccgccagttcatcagcagctgcccgtgctggctagaggtcatcttcaacagccggtag

SEQ ID NO: 182151 - DNA, 5447 bp, Homo sapiens
  Payload ID: 15870
  Gene Symbol: SMAD9
  Gene Name: SMAD family member 9
  Uniprot ID: O15198
  ENST ID: ENST00000350148
  CDS Start-End: 310-1602
agtctgactgacgccggctggggccgccgccgccgccgccgccgccgccgctgctgcagccgctgtctcggtccccgccgccgccgccgggccctgcaggcgctgggcgcgcgcagccaggcaagttggccaccctgttcaagggcttaggagaaagtcaacacacttcgcaacttgaattggtcccagctgctcccagaagaacgggcgggttggtccctatgccacccctggagagctactcgccgcccactttgccgtgaagggctgtgcggttcccgtgcgcgccggagcctgctgtggcctcttatgcactccaccacccccatcagctccctcttctccttcaccagccccgcagtgaagagactgctaggctggaagcaaggagatgaagaggaaaagtgggcagagaaggcagtggactctctagtgaagaagttaaagaagaagaagggagccatggacgagctggagagggctctcagctgcccggggcagcccagcaaatgcgtcacgattccccgctccctggacgggcggctgcaggtgtcccaccgcaagggcctgccccatgtgatttactgtcgcgtgtggcgctggccggatctgcagtcccaccacgagctgaagccgctggagtgctgtgagttcccatttggctccaagcagaaagaagtgtgcattaacccttaccactaccgccgggtggagactccagtactgcctcctgtgctcgtgccaagacacagtgaatataacccccagctcagcctcctggccaagttccgcagcgcctccctgcacagtgagccactcatgccacacaacgccacctatcctgactctttccagcagcctccgtgctctgcactccctccctcacccagccacgcgttctcccagtccccgtgcacggccagctaccctcactccccaggaagtccttctgagccagagagtccctatcaacactcagactttcgaccagtttgttacgaggagccccagcactggtgctcggtcgcctactatgaactgaacaaccgagttggggagacattccaggcttcctcccgaagtgtgctcatagatgggttcaccgacccttcaaataacaggaacagattctgtcttggacttctttctaatgtaaacagaaactcaacgatagaaaataccaggagacatataggaaagggtgtgcacttgtactacgtcgggggagaggtgtatgccgagtgcgtgagtgacagcagcatctttgtgcagagccggaactgcaactatcaacacggcttccacccagctaccgtctgcaagatccccagcggctgcagcctcaaggtcttcaacaaccagctcttcgctcagctcctggcccagtcagttcaccacggctttgaagtcgtgtatgaactgaccaagatgtgtactatccggatgagttttgttaagggttggggtgctgagtatcatcgccaggatgtcaccagcaccccctgctggattgagattcatcttcatgggccactgcagtggctggacaaagttctgactcagatgggctctccacataaccccatttcttcagtgtcttaacagtcatgtcttaagctgcatttccataggatagaggctattgcagggagtggcttgtatcatttcagatttgcaactgaagtttctaaaaacatgtgtaaatacatagaatgtatactgttcttattttttttaatcaccgtttgttttgtgctttctagttaacctgatgccagtacagtgcaattggaaaagcaggactttggtgcctgtgctataagcagcagattttgtgggaggaaacacttgagaggcgatattgtcaacagtatttgaagggtgttagcagaataaaagacagctttagtcagccgtgtcattataaagcatgttgtgtggcctcacagaaacattgaaactgtttatacagcaaaagtcaggtattagcagcactaaagcaaatatcactcagatgaaacaaagcagtgaaacccctacagtttaaatgatgtcacttttagtgctgttggcaagaaaaaaaaaacaacaaacttgtacaatgaattaatgagataggccatagaaactttatttctaaggttgacatacctatagctgggctcctgtgctcatattcagtggtacattttaaacaaactgtgatcggaaaagaaaaaaaactgtgaagccaaaagtcatgttccctcagtctaccactgtaaaaacagagtctaatatgggaaaataaatatgaaaatagcatgaaatgctgtttcccagattgcaagataagaccagaacttggtccaagagccagccacccagggagactcctgctttccacagaggagaccaggttcctgtcgtgctggttgttcgtgtcaggcagtcctgcaaactttgagtctgcgcagcgtgccagaatagcttgtgtttcagtcctgtgtcaagaagcaggtgaaaccaaaggttggagaaaagcatcacacgtcgacttacactttctcatttcccacgttccagtctcctgggaagggcactctttcgccacgttttcctgcctcttggcaaatattaactctttgcagatcactaaagcaacagtaaagactttgagaaaatctagacacattattggatcaatgagttatttaacctagtgtctagtgattatctaacctggaaataaattcccaaggaaagtgataataatttcataatcatctgcaatttctggggaacagtggtactgaataataagacatcttttaaaaatatacacaatattaaaaacctgttcttattttactttagatgagggaggaaaatcccccaaatttctaggtactttcatatatatacttgccatgcactaaacactgcattgcttggaaaaatatttcacaccctctttaaaaatgtacaatttaagatggcagttatgcttgtaacagacagcacttcagtaatccaagaagtttcttcatttatacattttatctcaactctttctagcattagtgcacatggtagtttttctaattaaattgtattcaaggtagaaatgatcatgtgagaaagatatatgattgagctactactgtcacctcttacagttactagtgttagctaatagaaactttcatatatacacatagaaaagaattattacattttacattgaaaaatgtaatatatggcccatgtagtgtatagaaaaatctgtagtttattggttcatcaactatgtattgtgcacctacctatgggtgtcaggtacaatgttaggtactgtagaatcaaatgtaaataagagacagtcccagccctcagggagccgagaacctaatagtgaatctgtttgtacagacatcttcatgtttcagaacttttaaaacaaaacaaaataatgtaatctatcatcttttgcttgaaagaatgtgattgatttcttatctctgttttgaaattatttccttactcttctgcaaagtcaggtaatggattccttgtataaatgctacttttcttccatgtctcaaagttgttttttttcctcccctttcttccctgttttccaataattctccatgtccccttttcttagaaaaggcattaatatggtgaatcttgtatgggaaccattccatgggagaacttcaacacagtttttgctccagagatcaaacatagctttcgtgatctctctaccagctatctaacttatcctctggtaatctttttttttttttttttttttttgagatggagtctcgctgtgtcaccaggccagagtgcagtggcgtgatcttggctcactgcaacctctgcctcccgggttcgagtgattctcctgcctcagcctcccaagtagttgggactacaggctaccacgcccagctaatttttatatttttagtagagacggggtttcaccatggtagccagaatggtctctatctcttgaccttgtgatccgcccgcctcagcctcccaaagtgctgggattacaggcgtgagccactgcgcccggcttcctctggtaatcttacacctttacagaattaatctaaactggtggctcataaatgacattaaaaacaaaaaaaaaatctggatgcagtggctcattcctatagtcccagcactttgggaggccaaggcgggaggatcatctgagcccaggagtttggggctgtagtgaactatgatcatacaacttcattctagcctgggtgacaaagtgacaccctgtctctaaacaaaaatcaagaaacaaaaaacttgtatttccctgcagctttgggaagccagaacacaatattgcagtgaatctgaattttctgtgacaaataaattattaaattggcacatatgatcatcaccagtcatgtctcatcaaaagcctttattatgatgcttgtacattttgaagaatttagaattaatgagaagttaaccctttagtcattgtaacacaatcatattttaatcagctttttcttttgctaccaagagtttcaaaaaataaatgcagtatttgatttcaggctgctaaatgggctcatttagcattcattccttgatgtagacattaaaaaaaaaactgaatagcattctttccaggataactaataaagcagacatgctaagcctataaatacatcagcactgcagcacacgtttaaggttgccacggacaaggatcacacaatagagaacactgtagtaacatttcggtctgctcacaagacccagaacattgatcagtttttgttgttggtttattatttttctgttaaaaaattgtgaaaagtttgttttagctagatgatattttaatagctgcgagtgctttggaactataaagatgtcactacttaacacatataccttatgttttgttttgttttgttttacactcagtataaatcaggagaagttagccaaccatctagcatttagaatcctcttttttattgtcttctaaggatatggatgttcccataacagcaacaaaacagcaacaaaaacatttcataaatatcacttgatagactgtaagcacctgcttaactttgtgtcccaaatatttagtgtgtatatatatatatatatatacacacacacacacatatatattcaacaaataaagcaaaatataacatgcatttcacattttgtctttccctgttacgattttaatagcagaactgtatgacaagtttaggtgatcctagcatatgttaaattcaaattaatgtaaaacagattaacaacaacaaagaaactgtctatttgagtgaagtcatgctttctattataataacttggcttcggttatccatcaaatgcacacttatactgttatctgattgtttataataaagaatactgtacttata

SEQ ID NO: 182152 - DNA, 5592 bp, Homo sapiens
  Payload ID: 15870
  Gene Symbol: SMAD9
  Gene Name: SMAD family member 9
  Uniprot ID: O15198
  ENST ID: ENST00000379826
  CDS Start-End: 344-1747
cgcactaatacgggcgatgaggcttcgcggctccagtctgactgacgccggctggggccgccgccgccgccgccgccgccgccgctgctgcagccgctgtctcggtccccgccgccgccgccgggccctgcaggcgctgggcgcgcgcagccaggcaagttggccaccctgttcaagggcttaggagaaagtcaacacacttcgcaacttgaattggtcccagctgctcccagaagaacgggcgggttggtccctatgccacccctggagagctactcgccgcccactttgccgtgaagggctgtgcggttcccgtgcgcgccggagcctgctgtggcctcttatgcactccaccacccccatcagctccctcttctccttcaccagccccgcagtgaagagactgctaggctggaagcaaggagatgaagaggaaaagtgggcagagaaggcagtggactctctagtgaagaagttaaagaagaagaagggagccatggacgagctggagagggctctcagctgcccggggcagcccagcaaatgcgtcacgattccccgctccctggacgggcggctgcaggtgtcccaccgcaagggcctgccccatgtgatttactgtcgcgtgtggcgctggccggatctgcagtcccaccacgagctgaagccgctggagtgctgtgagttcccatttggctccaagcagaaagaagtgtgcattaacccttaccactaccgccgggtggagactccagtactgcctcctgtgctcgtgccaagacacagtgaatataacccccagctcagcctcctggccaagttccgcagcgcctccctgcacagtgagccactcatgccacacaacgccacctatcctgactctttccagcagcctccgtgctctgcactccctccctcacccagccacgcgttctcccagtccccgtgcacggccagctaccctcactccccaggaagtccttctgagccagagagtccctatcaacactcagttgacacaccacccctgccttatcatgccacagaagcctctgagacccagagtggccaacctgtagatgccacagctgatagacatgtagtgctatcgataccaaatggagactttcgaccagtttgttacgaggagccccagcactggtgctcggtcgcctactatgaactgaacaaccgagttggggagacattccaggcttcctcccgaagtgtgctcatagatgggttcaccgacccttcaaataacaggaacagattctgtcttggacttctttctaatgtaaacagaaactcaacgatagaaaataccaggagacatataggaaagggtgtgcacttgtactacgtcgggggagaggtgtatgccgagtgcgtgagtgacagcagcatctttgtgcagagccggaactgcaactatcaacacggcttccacccagctaccgtctgcaagatccccagcggctgcagcctcaaggtcttcaacaaccagctcttcgctcagctcctggcccagtcagttcaccacggctttgaagtcgtgtatgaactgaccaagatgtgtactatccggatgagttttgttaagggttggggtgctgagtatcatcgccaggatgtcaccagcaccccctgctggattgagattcatcttcatgggccactgcagtggctggacaaagttctgactcagatgggctctccacataaccccatttcttcagtgtcttaacagtcatgtcttaagctgcatttccataggatagaggctattgcagggagtggcttgtatcatttcagatttgcaactgaagtttctaaaaacatgtgtaaatacatagaatgtatactgttcttattttttttaatcaccgtttgttttgtgctttctagttaacctgatgccagtacagtgcaattggaaaagcaggactttggtgcctgtgctataagcagcagattttgtgggaggaaacacttgagaggcgatattgtcaacagtatttgaagggtgttagcagaataaaagacagctttagtcagccgtgtcattataaagcatgttgtgtggcctcacagaaacattgaaactgtttatacagcaaaagtcaggtattagcagcactaaagcaaatatcactcagatgaaacaaagcagtgaaacccctacagtttaaatgatgtcacttttagtgctgttggcaagaaaaaaaaaacaacaaacttgtacaatgaattaatgagataggccatagaaactttatttctaaggttgacatacctatagctgggctcctgtgctcatattcagtggtacattttaaacaaactgtgatcggaaaagaaaaaaaactgtgaagccaaaagtcatgttccctcagtctaccactgtaaaaacagagtctaatatgggaaaataaatatgaaaatagcatgaaatgctgtttcccagattgcaagataagaccagaacttggtccaagagccagccacccagggagactcctgctttccacagaggagaccaggttcctgtcgtgctggttgttcgtgtcaggcagtcctgcaaactttgagtctgcgcagcgtgccagaatagcttgtgtttcagtcctgtgtcaagaagcaggtgaaaccaaaggttggagaaaagcatcacacgtcgacttacactttctcatttcccacgttccagtctcctgggaagggcactctttcgccacgttttcctgcctcttggcaaatattaactctttgcagatcactaaagcaacagtaaagactttgagaaaatctagacacattattggatcaatgagttatttaacctagtgtctagtgattatctaacctggaaataaattcccaaggaaagtgataataatttcataatcatctgcaatttctggggaacagtggtactgaataataagacatcttttaaaaatatacacaatattaaaaacctgttcttattttactttagatgagggaggaaaatcccccaaatttctaggtactttcatatatatacttgccatgcactaaacactgcattgcttggaaaaatatttcacaccctctttaaaaatgtacaatttaagatggcagttatgcttgtaacagacagcacttcagtaatccaagaagtttcttcatttatacattttatctcaactctttctagcattagtgcacatggtagtttttctaattaaattgtattcaaggtagaaatgatcatgtgagaaagatatatgattgagctactactgtcacctcttacagttactagtgttagctaatagaaactttcatatatacacatagaaaagaattattacattttacattgaaaaatgtaatatatggcccatgtagtgtatagaaaaatctgtagtttattggttcatcaactatgtattgtgcacctacctatgggtgtcaggtacaatgttaggtactgtagaatcaaatgtaaataagagacagtcccagccctcagggagccgagaacctaatagtgaatctgtttgtacagacatcttcatgtttcagaacttttaaaacaaaacaaaataatgtaatctatcatcttttgcttgaaagaatgtgattgatttcttatctctgttttgaaattatttccttactcttctgcaaagtcaggtaatggattccttgtataaatgctacttttcttccatgtctcaaagttgttttttttcctcccctttcttccctgttttccaataattctccatgtccccttttcttagaaaaggcattaatatggtgaatcttgtatgggaaccattccatgggagaacttcaacacagtttttgctccagagatcaaacatagctttcgtgatctctctaccagctatctaacttatcctctggtaatctttttttttttttttttttttttgagatggagtctcgctgtgtcaccaggccagagtgcagtggcgtgatcttggctcactgcaacctctgcctcccgggttcgagtgattctcctgcctcagcctcccaagtagttgggactacaggctaccacgcccagctaatttttatatttttagtagagacggggtttcaccatggtagccagaatggtctctatctcttgaccttgtgatccgcccgcctcagcctcccaaagtgctgggattacaggcgtgagccactgcgcccggcttcctctggtaatcttacacctttacagaattaatctaaactggtggctcataaatgacattaaaaacaaaaaaaaaatctggatgcagtggctcattcctatagtcccagcactttgggaggccaaggcgggaggatcatctgagcccaggagtttggggctgtagtgaactatgatcatacaacttcattctagcctgggtgacaaagtgacaccctgtctctaaacaaaaatcaagaaacaaaaaacttgtatttccctgcagctttgggaagccagaacacaatattgcagtgaatctgaattttctgtgacaaataaattattaaattggcacatatgatcatcaccagtcatgtctcatcaaaagcctttattatgatgcttgtacattttgaagaatttagaattaatgagaagttaaccctttagtcattgtaacacaatcatattttaatcagctttttcttttgctaccaagagtttcaaaaaataaatgcagtatttgatttcaggctgctaaatgggctcatttagcattcattccttgatgtagacattaaaaaaaaaactgaatagcattctttccaggataactaataaagcagacatgctaagcctataaatacatcagcactgcagcacacgtttaaggttgccacggacaaggatcacacaatagagaacactgtagtaacatttcggtctgctcacaagacccagaacattgatcagtttttgttgttggtttattatttttctgttaaaaaattgtgaaaagtttgttttagctagatgatattttaatagctgcgagtgctttggaactataaagatgtcactacttaacacatataccttatgttttgttttgttttgttttacactcagtataaatcaggagaagttagccaaccatctagcatttagaatcctcttttttattgtcttctaaggatatggatgttcccataacagcaacaaaacagcaacaaaaacatttcataaatatcacttgatagactgtaagcacctgcttaactttgtgtcccaaatatttagtgtgtatatatatatatatatatacacacacacacacatatatattcaacaaataaagcaaaatataacatgcatttcacattttgtctttccctgttacgattttaatagcagaactgtatgacaagtttaggtgatcctagcatatgttaaattcaaattaatgtaaaacagattaacaacaacaaagaaactgtctatttgagtgaagtcatgctttctattataataacttggcttcggttatccatcaaatgcacacttatactgttatctgattgtttataataaagaatactgtacttata

SEQ ID NO: 182153 - DNA, 5389 bp, Homo sapiens
  Payload ID: 15870
  Gene Symbol: SMAD9
  Gene Name: SMAD family member 9
  Uniprot ID: O15198
  ENST ID: ENST00000399275
  CDS Start-End: 141-1544
gcaacttgaattggtcccagctgctcccagaagaacgggcgggttggtccctatgccacccctggagagctactcgccgcccactttgccgtgaagggctgtgcggttcccgtgcgcgccggagcctgctgtggcctcttatgcactccaccacccccatcagctccctcttctccttcaccagccccgcagtgaagagactgctaggctggaagcaaggagatgaagaggaaaagtgggcagagaaggcagtggactctctagtgaagaagttaaagaagaagaagggagccatggacgagctggagagggctctcagctgcccggggcagcccagcaaatgcgtcacgattccccgctccctggacgggcggctgcaggtgtcccaccgcaagggcctgccccatgtgatttactgtcgcgtgtggcgctggccggatctgcagtcccaccacgagctgaagccgctggagtgctgtgagttcccatttggctccaagcagaaagaagtgtgcattaacccttaccactaccgccgggtggagactccagtactgcctcctgtgctcgtgccaagacacagtgaatataacccccagctcagcctcctggccaagttccgcagcgcctccctgcacagtgagccactcatgccacacaacgccacctatcctgactctttccagcagcctccgtgctctgcactccctccctcacccagccacgcgttctcccagtccccgtgcacggccagctaccctcactccccaggaagtccttctgagccagagagtccctatcaacactcagttgacacaccacccctgccttatcatgccacagaagcctctgagacccagagtggccaacctgtagatgccacagctgatagacatgtagtgctatcgataccaaatggagactttcgaccagtttgttacgaggagccccagcactggtgctcggtcgcctactatgaactgaacaaccgagttggggagacattccaggcttcctcccgaagtgtgctcatagatgggttcaccgacccttcaaataacaggaacagattctgtcttggacttctttctaatgtaaacagaaactcaacgatagaaaataccaggagacatataggaaagggtgtgcacttgtactacgtcgggggagaggtgtatgccgagtgcgtgagtgacagcagcatctttgtgcagagccggaactgcaactatcaacacggcttccacccagctaccgtctgcaagatccccagcggctgcagcctcaaggtcttcaacaaccagctcttcgctcagctcctggcccagtcagttcaccacggctttgaagtcgtgtatgaactgaccaagatgtgtactatccggatgagttttgttaagggttggggtgctgagtatcatcgccaggatgtcaccagcaccccctgctggattgagattcatcttcatgggccactgcagtggctggacaaagttctgactcagatgggctctccacataaccccatttcttcagtgtcttaacagtcatgtcttaagctgcatttccataggatagaggctattgcagggagtggcttgtatcatttcagatttgcaactgaagtttctaaaaacatgtgtaaatacatagaatgtatactgttcttattttttttaatcaccgtttgttttgtgctttctagttaacctgatgccagtacagtgcaattggaaaagcaggactttggtgcctgtgctataagcagcagattttgtgggaggaaacacttgagaggcgatattgtcaacagtatttgaagggtgttagcagaataaaagacagctttagtcagccgtgtcattataaagcatgttgtgtggcctcacagaaacattgaaactgtttatacagcaaaagtcaggtattagcagcactaaagcaaatatcactcagatgaaacaaagcagtgaaacccctacagtttaaatgatgtcacttttagtgctgttggcaagaaaaaaaaaacaacaaacttgtacaatgaattaatgagataggccatagaaactttatttctaaggttgacatacctatagctgggctcctgtgctcatattcagtggtacattttaaacaaactgtgatcggaaaagaaaaaaaactgtgaagccaaaagtcatgttccctcagtctaccactgtaaaaacagagtctaatatgggaaaataaatatgaaaatagcatgaaatgctgtttcccagattgcaagataagaccagaacttggtccaagagccagccacccagggagactcctgctttccacagaggagaccaggttcctgtcgtgctggttgttcgtgtcaggcagtcctgcaaactttgagtctgcgcagcgtgccagaatagcttgtgtttcagtcctgtgtcaagaagcaggtgaaaccaaaggttggagaaaagcatcacacgtcgacttacactttctcatttcccacgttccagtctcctgggaagggcactctttcgccacgttttcctgcctcttggcaaatattaactctttgcagatcactaaagcaacagtaaagactttgagaaaatctagacacattattggatcaatgagttatttaacctagtgtctagtgattatctaacctggaaataaattcccaaggaaagtgataataatttcataatcatctgcaatttctggggaacagtggtactgaataataagacatcttttaaaaatatacacaatattaaaaacctgttcttattttactttagatgagggaggaaaatcccccaaatttctaggtactttcatatatatacttgccatgcactaaacactgcattgcttggaaaaatatttcacaccctctttaaaaatgtacaatttaagatggcagttatgcttgtaacagacagcacttcagtaatccaagaagtttcttcatttatacattttatctcaactctttctagcattagtgcacatggtagtttttctaattaaattgtattcaaggtagaaatgatcatgtgagaaagatatatgattgagctactactgtcacctcttacagttactagtgttagctaatagaaactttcatatatacacatagaaaagaattattacattttacattgaaaaatgtaatatatggcccatgtagtgtatagaaaaatctgtagtttattggttcatcaactatgtattgtgcacctacctatgggtgtcaggtacaatgttaggtactgtagaatcaaatgtaaataagagacagtcccagccctcagggagccgagaacctaatagtgaatctgtttgtacagacatcttcatgtttcagaacttttaaaacaaaacaaaataatgtaatctatcatcttttgcttgaaagaatgtgattgatttcttatctctgttttgaaattatttccttactcttctgcaaagtcaggtaatggattccttgtataaatgctacttttcttccatgtctcaaagttgttttttttcctcccctttcttccctgttttccaataattctccatgtccccttttcttagaaaaggcattaatatggtgaatcttgtatgggaaccattccatgggagaacttcaacacagtttttgctccagagatcaaacatagctttcgtgatctctctaccagctatctaacttatcctctggtaatctttttttttttttttttttttttgagatggagtctcgctgtgtcaccaggccagagtgcagtggcgtgatcttggctcactgcaacctctgcctcccgggttcgagtgattctcctgcctcagcctcccaagtagttgggactacaggctaccacgcccagctaatttttatatttttagtagagacggggtttcaccatggtagccagaatggtctctatctcttgaccttgtgatccgcccgcctcagcctcccaaagtgctgggattacaggcgtgagccactgcgcccggcttcctctggtaatcttacacctttacagaattaatctaaactggtggctcataaatgacattaaaaacaaaaaaaaaatctggatgcagtggctcattcctatagtcccagcactttgggaggccaaggcgggaggatcatctgagcccaggagtttggggctgtagtgaactatgatcatacaacttcattctagcctgggtgacaaagtgacaccctgtctctaaacaaaaatcaagaaacaaaaaacttgtatttccctgcagctttgggaagccagaacacaatattgcagtgaatctgaattttctgtgacaaataaattattaaattggcacatatgatcatcaccagtcatgtctcatcaaaagcctttattatgatgcttgtacattttgaagaatttagaattaatgagaagttaaccctttagtcattgtaacacaatcatattttaatcagctttttcttttgctaccaagagtttcaaaaaataaatgcagtatttgatttcaggctgctaaatgggctcatttagcattcattccttgatgtagacattaaaaaaaaaactgaatagcattctttccaggataactaataaagcagacatgctaagcctataaatacatcagcactgcagcacacgtttaaggttgccacggacaaggatcacacaatagagaacactgtagtaacatttcggtctgctcacaagacccagaacattgatcagtttttgttgttggtttattatttttctgttaaaaaattgtgaaaagtttgttttagctagatgatattttaatagctgcgagtgctttggaactataaagatgtcactacttaacacatataccttatgttttgttttgttttgttttacactcagtataaatcaggagaagttagccaaccatctagcatttagaatcctcttttttattgtcttctaaggatatggatgttcccataacagcaacaaaacagcaacaaaaacatttcataaatatcacttgatagactgtaagcacctgcttaactttgtgtcccaaatatttagtgtgtatatatatatatatatatacacacacacacacatatatattcaacaaataaagcaaaatataacatgcatttcacattttgtctttccctgttacgattttaatagcagaactgtatgacaagtttaggtgatcctagcatatgttaaattcaaattaatgtaaaacagattaacaacaacaaagaaactgtctatttgagtgaagtcatgctttctattataataacttggcttcggttatccatcaaatgcacacttatactgttatctgattgtttataataaagaatactgtacttata

SEQ ID NO: 182154 - DNA, 4563 bp, Homo sapiens
  Payload ID: 15871
  Gene Symbol: SNIP1
  Gene Name: Smad nuclear interacting protein 1
  Uniprot ID: Q8TAD8
  ENST ID: ENST00000296215
  CDS Start-End: 74-1264
gttaaactcgtcatttcctccagctagaggagctcaactgatctgttttctttcgcccagccaaaatcacagaatgaaggcggtgaagagcgaacgggagcgagggagccggcgaagacaccgggacggggacgtggtgctgccggcgggggtggtggtgaagcaggagcgtctcagcccagaagtcgcacctcccgcccaccgccgtccggaccactccggtggtagcccgtctccgccgaccagcgagccggcccgctcgggccaccgcgggaaccgagcccgaggagttagccggtccccacccaaaaagaaaaacaaggcctcagggagaagaagcaagtctcctcgcagtaagagaaaccgaagtcctcaccactcaacagtcaaagtgaagcaggagcgtgaggatcatccccggagaggacgggaggatcggcagcacagggaaccatcagaacaggaacacaggagagctaggaacagtgaccgggacagacaccggggccattcccaccaaaggagaacgtctaacgagaggcctgggagtgggcagggtcagggacgggatcgagacactcagaacctgcaggctcaggaagaagagcgggagttttataatgccaggcgacgggagcatcgccagaggaatgacgttggtggtggcggcagtgagtctcaggagttggttcctcggcctggtggcaacaacaaagaaaaagaggtgcccgctaaagaaaaaccaagctttgaactttctggggcacttcttgaggacaccaacactttccggggtgtagtcattaaatatagtgagcccccagaagcacgtatccccaaaaaacggtggcgtctctacccatttaaaaatgatgaggtgcttccagtcatgtacatacatcgacagagtgcgtacctactgggtcgacaccgccgcattgcagacattccaattgatcacccgtcttgttcaaagcagcatgcggtctttcaatatcggcttgtggaatatacccgtgctgatggcacagttggccgaagagtgaagccctacatcattgaccttggctcaggcaatggaaccttcttaaacaacaaacgtattgagccacagagatactatgaactaaaagaaaaggatgtactcaaatttggattcagtagcagagaatacgtcttgctccatgagtcgtcggacacttctgaaatagacaggaaagatgacgaggatgaggaggaggaggaagaagtgtctgacagctagcaaactaagaacccaaactattgatacacggtttccttcttggaagtctttgattgactcagagagcactatggtggtgggtccagcactatggtgctctctgtaatgcctcttactgccttaagtctttcctctgttgctgaccagattgtgttaccatttgaatacactgactaatgtttgttaaactttttctgtggcaccttggccacatgcctgcaggcatttgttttcagaacagtctcaccaattacaacacaccgtgttttagtagaagtgttgtggttttagttggtgctttcagaactgctgcctaggaaactataaacccttggttaaggggaaatcatggcttgttctctttgtacagttactttatttatataggtgttaagctttgtggaccaggtgtttttcttttggggcgaacccctgagcagagaatcttactaggctttggttatcaccaaaacaacctccagtatataccaaagctttgacttgtttgagctcttgagcttagaagttgattttgcacttatttttttggggggtgggaatgtactgcagtcagtaaacattattgactgtttaacttaaacagatgctttatggcacctgctcaagcccgtgactgtacagaaggatcctggttgctaccagtgggtgctgattcagcatcacaagtgactgaaattggctgtggatctgttctttgtgaaagaattcctgatttctccatggagcatgtacacaacaattttgatcatattaactgtacttcagttttgcatttttattcaaatgttatctctttttttctttgagaaataaactgtcactgatgtgacagcgttctttctttattctaataacatgtatagatctaaagcaggttgtgttgtttacatgtttctacacatttcatcctttaaaaagttgttgagagaggttgtatttaccttcccaaggttggaaagcaggggaatttcccagtgtcctagttttccaccagaggaatatgtgtaagtagcaaagtatttgctgcttacatatagtgtgtatgtatgtatatatgtaaattgtgtgttaaagagctgatactgattttcatatgacaatgttaggcaaaggcctccctgcatttgaagagcaggttttcatttatatgtatttttgggataaaaaaataaaatttgtaaatatagccccatttcaaagagtaatgctttcctagcgtagaggaccttgtgttcataggtctgtttgctgctaatggagccttctgtcagtacttttgagataaaagtaggtagctgttttagagtgttgtggggcaggttatatcgttggcctccaagtcagtggaatagcagatggtgacatggaggtgggttgtggggaaaggtggtgaagcagctcaatcagtgttactactaattgttcctcttgggttgagacttaggatactattaaatttgattgttttccattgtttttatacccatgtgtgctcagggctaaagattggctagtgggaggggcagctgactaatgttcattcagaagaagttaaaagatcctttgaaaagtgaacacttaataaggtcattagatgaaacgtaagttgggccgggcatgggcacagtggctcatgcctgtaatcccaacactttcggaggctgaggtgggcagatcatctgaggtcaggagttcaagaccaacctggccaacatggtgaaaccccatctctactaaaaatacaaaaattagctgggcgtggtggcacatgcctgttttaatcccagctactcgggaggctgaggcaggagaatcgcttgaacccgggaggtggaggttgcagcgagctgagattgtgccactgcactccagcctgggtgacagcgagactctgtctcagaaaaaaaaaaaaaaggtaagttgaagaatgtgttctacattggccactgtaactgctattttcttcattttggtatgtgccatagatcatatatatgtgcttgtctgaaaagtaggtttgtttggatgaacttttctcttgatccagactgacggttttctcttgagggtttaagcactaatctggtatcttactctaggatctccttgttcagtctgtgctgcagtagcactactttgtggtagccttgagttttgctacaaacttcatcctggtgggcactgtgatagatgaccactttgcctacatttttcagtaagaagtcctaattgtttagtcagtttttattttagtagaggaataacgtcctggattaagaaattctttatgccacatatctgagaaggtgggtttttttgttggtttgtttgttttgagatggcgtctcactctgtcgcccaggctggagtgcagtggcaccatcttggctcactgcaacctccgcctcccagtttcaagcgattctcctgcctcagcctcccaagtagctgggactacaggcacctgtcaccaagcctggctaatttatatatataatttttattttttatttttttttagtagagatggggtttcaccatattggccaggctggtctcgaactcctgaccttgtgatccgcccctctcagcctcccaaagtgctgggattacaggtgttagccaccaggcctggcctgagaaggtgtttttttttttttttggtcttgttttcccttacccctttctttgaagaaagggtgtcaaaagacattacctgcctctaaagccagatatcaccagcagacttcttaaagtggacataatcctagagctttcattctgtttagaagttcatgttcatcttagccatttggaacttcttcattctctatcttttctccacggtggctgggcttgtctgcaaatcattgtgtcaaaatcaaactattttcaaaacagccctttgcttctgagcccctcccctaagtcctctgtgggggtccatgattctgcagaggtatgggacagaatcttcagattttaccccttgagtctcttcctagtcatatcctggttccctcattctaatattgacaaaggatgactcattaagtgcaactggttatgtaactttcaaatactttcattgtgtatgtcaggatctgaggaacaaaatgatgtcatttaatcggaatctaaacgtgacacaaacaacgtgccagcaatacctgcttgtgaaataatgttctgagcccacagtgttcctgggtatgtgagtttatatcaagtgaaaaggctgcttaattgacattaaagttttggaatgtaaagcttca

SEQ ID NO: 182155 - DNA, 5737 bp, Homo sapiens
  Payload ID: 15872
  Gene Symbol: SMURF1
  Gene Name: SMAD specific E3 ubiquitin protein ligase 1
  Uniprot ID: Q9HCE7
  ENST ID: ENST00000361125
  CDS Start-End: 321-2594
ggcagcggcggaagcggcgagggcggcgggcgtccggctctgaggtggtggaggcggcggaggcggcggcggaggcggcggcggctcgggactgggctcggctggaagcagcgagggtcagagcgccgcagcaagcgccgatctcccggctcgaccatccgcctgccgcccggacgcctgggccgcggagtttgtgtcccggctcggaccccggcgcccagcccggagccgtaaccttgaggcggcggcggcggggccgggccgggccgggctggggggcggtggcgctggatccgcggctgcccgatcgttggcgggagatgtcgaaccccgggacacgcaggaacggctccagcatcaagatccgtctgacagtgttatgtgccaagaaccttgcaaagaaagacttcttcaggctccctgacccttttgcaaagattgtcgtggatgggtctgggcagtgccactcaaccgacactgtgaaaaacacattggacccaaagtggaaccagcactatgatctatatgttgggaaaacggattcgataaccattagcgtgtggaaccataagaaaattcacaagaaacagggagctggcttcctgggctgtgtgcggctgctctccaatgccatcagcagattaaaagataccggataccagcgtttggatctatgcaaactaaacccctcagatactgatgcagttcgtggccagatagtggtcagtttacagacacgagacagaataggaaccggcggctcggtggtggactgcagaggactgttagaaaatgaaggaacggtgtatgaagactccgggcctgggaggccgctcagctgcttcatggaggaaccagccccttacacagatagcaccggtgctgctgctggaggagggaattgcaggttcgtggagtccccaagtcaagatcaaagacttcaggcacagcggcttcgaaaccctgatgtgcgaggttcactacagacgccccagaaccgaccacacggccaccagtccccggaactgcccgaaggctacgaacaaagaacaacagtccagggccaagtttactttttgcatacacagactggagttagcacgtggcacgaccccaggataccaagtccctcggggaccattcctgggggagatgcagcttttctatacgaattccttctacaaggccatacatctgagcccagagaccttaacagtgtgaactgtgatgaacttggaccactgccgccaggctgggaagtcagaagtacagtttctgggaggatatattttgtagatcataataaccgaacaacccagtttacagacccaaggttacaccacatcatgaatcaccagtgccaactcaaggagcccagccagccgctgccactgcccagtgagggctctctggaggacgaggagcttcctgcccagagatacgaaagagatctagtccagaagctgaaagtcctcagacacgaactgtcgcttcagcagccccaagctggtcattgccgcatcgaagtgtccagagaagaaatctttgaggagtcttaccgccagataatgaagatgcgaccgaaagacttgaaaaaacggctgatggtgaaattccgtggggaagaaggtttggattacggtggtgtggccagggagtggctttacttgctgtgccatgaaatgctgaatccttattacgggctcttccagtattctacggacaatatttacatgttgcaaataaatccggattcttcaatcaaccccgaccacttgtcttatttccactttgtggggcggatcatggggctggctgtgttccatggacactacatcaacgggggcttcacagtgcccttctacaagcagctgctggggaagcccatccagctctcagatctggaatctgtggacccagagctgcataagagcttggtgtggatcctagagaacgacatcacgcctgtactggaccacaccttctgcgtggaacacaacgccttcgggcggatcctgcagcatgaactgaaacccaatggcagaaatgtgccagtcacagaggagaataagaaagaatacgtccggttgtatgtaaactggaggtttatgagaggaatcgaagcccagttcttagctctgcagaaggggttcaatgagctcatccctcaacatctgctgaagccttttgaccagaaggaactggagctgatcataggcggcctggataaaatagacttgaacgactggaagtcgaacacgcggctgaagcactgtgtggccgacagcaacatcgtgcggtggttctggcaagcggtggagacgttcgatgaagaaaggagggccaggctcctgcagtttgtgactgggtccacgcgagtcccgctccaaggcttcaaggctttgcaaggttctacaggcgcggcagggccccggctgttcaccatccacctgatagacgcgaacacagacaaccttccgaaggcccatacctgctttaaccggatcgacattccaccatatgagtcctatgagaagctctacgagaagctgctgacagccgtggaggagacctgcgggtttgctgtggagtgaaaagcaaccaaaggcaacagagtctagctcatggccaccagaccaaaagcatccagcttctgtgcacctcctgcaaagctggcagaggccctggaattccagatcacctgaggggaaagggttgtctctctcctttctgttgggggagggggatgggggacttttgttggtggctcccacccatatatccctcctttaccatagtactcccacccacttccatcacccatccaataaaatgcagccaggtttagcctttggctttggtcacacaggatattctgctgtgttgcaacccatgtggtgataaggctcacagccctgagctctttacgggagcatcaactcacagttaggggactgggcgtggctgattgagggtttggaactggtggctatgccagctattccatctcaaaacagccttgaggccccttttcaatttgagcagctgctagatatcttatcagagctcagattccagatttcacatcccagcagccggttctgggtagcagatcaatttccaactggaaaataactatataatgtatgcttattggaattctgccacagcaggaagcttgagtcaaaatgtgtttcccctttgaaaggagaaggaattggagcagcttttcctggaggcccaggatatttcttttctgggtatcttggctgaaaattttgttttacatagagaaaaacgatcttttaagggtcccttttgctgcattatctgtccagtttgacttttttttcagtgaaaacaccatgtcatggagtgtaggaaagagcagaccaaaatcagccctagagccaaccagtcagtcccaaagctgtgacctctgtgccactgttgtccatagaagagcatcgactgtgtcacttaaaatattagtaaaccatgatgcagcaactgctaagagctaaactaacaaaattgtgtcatcatagctgctggcttggtgtgaactcgcttaaaagcaatggtgaaaggataacctcgatgatgtaaatccacccaaagatactgttctacaaaaagtagggtgtggacgcaaacctgtgacagcagagggggacgacttcacactcactgcctcatgtggcccctttcccagtggcagctggtgacactaacgattgctactcggttcacttgcccagatgtcttcatatgatgagcaaggccagaagcaaggctagattcgaagtttctgacaccatttccagtttgcacaaaagtcagtattttatcttaaagtggcttgatttccaatagctgaacttgggcagaaaacagcaggccaatgttcctatgtggtttctttgttgttgtttttgtttggggtgggggcaagtacagggtaattcatgagcaagacatttcactgctgtcgaagtctctgggatcccgctgtgggtctgagatggcctgggaaggaccttgtggacaatggttttatctgttctttttgtcactgttaatttctgggctgctgaggttctagaatagaagggctgccaaatgaggtttgctgcaggaggaaagtttaatcccccattccaaaagtccaggccaaatggtgggcttagcctctttgaaaagttctgccttgcccccacaggtgggcacatcctgtgtctcattcaccatgatgcttcctgagggtgttctagaagcccgttccccagtggctgtatccagcctttccttgcatcatcttcctcttgaaggtgaggaagtgaaaactacagacctcccccggacagcccactctctatcacgagcctaacccgcgggaggcggaagagacatccattcgagaactgaagcggcctccgggatgaggtcagaggccccacctgattttcctggtggtggtatccaaaatcttcagtaactaggaaggaaaccagggtctcatggtttaaaagactttgaagcaggaatgttgcatttgacgcctttaaaactacctttttgctgttgggaggagtcgggggcgagccttagcagctgcaccgccatccccatgctggttggtgctgccctgcctctcgtgccgggtgttgcttcagcccagagccagagggctgggtcccgggtcctccacaggtgaccccggtggacacacgcgttcccatcctggcctccgtctctgcttttccacttctacctgcgtgtgggtttgccgccttgtcatcggttgtgtgagtgtcgcagacctttccagagctccggttcactctttccaaacaggcctccctgtcggtggcactgcactcctagaaccttcagtttctacgatggtttgtttggtccttttgaaccaccccaaagaactcaacatggcaaagcaaatggtaaaagcttcccgactgttctactttgggtccgcgcgaagcccactcacgtgtgatctgtgttgcccctctcggtggtcccaggcgatccagccatgccccctgcccctctgcccagatgcttcaggggcccggcttttcaggcttgccctcaccagcggccgtcagccgacactcagggatgtagctaacaccactccgccagtgctttcagtaggaagagctgaggctgcctgggaggcccggggcgaccggaaaagggctctctcaagttctgaaaagagaatctgccaccagatcgaatttcgacccctgagcttgttcggacgtatggtccaaattcagattaaggtggtcacccaacccgagatgtcaggaaaggccttctgcagagaaaatgtccccccacccgccatctgcagccaggtgtgtgccacacggcagccttcccgaaacatagtatggattttaaaaatgtgtttatttttgtttctcaaccactttataacgtattttttaatttattttgtaatgtcttgttttgaagtattgctgctatccttgttatccttcccactgtttttatcactgatttattttgtgaaagttgtacactaatgttctatgtcaaaatcaaaagtatttaatgaaatactagttctatttaatgtggttatggaaccagctggaaacacaaaacaaacagtgattgtacagcaggctgggcccaggaggtcaggttcattttgttacatatgcaataaactcacgacttt

SEQ ID NO: 182156 - DNA, 5581 bp, Homo sapiens
  Payload ID: 15872
  Gene Symbol: SMURF1
  Gene Name: SMAD specific E3 ubiquitin protein ligase 1
  Uniprot ID: Q9HCE7
  ENST ID: ENST00000361368
  CDS Start-End: 240-2435
cggctcgggactgggctcggctggaagcagcgagggtcagagcgccgcagcaagcgccgatctcccggctcgaccatccgcctgccgcccggacgcctgggccgcggagtttgtgtcccggctcggaccccggcgcccagcccggagccgtaaccttgaggcggcggcggcggggccgggccgggccgggctggggggcggtggcgctggatccgcggctgcccgatcgttggcgggagatgtcgaaccccgggacacgcaggaacggctccagcatcaagatccgtctgacagtgttatgtgccaagaaccttgcaaagaaagacttcttcaggctccctgacccttttgcaaagattgtcgtggatgggtctgggcagtgccactcaaccgacactgtgaaaaacacattggacccaaagtggaaccagcactatgatctatatgttgggaaaacggattcgataaccattagcgtgtggaaccataagaaaattcacaagaaacagggagctggcttcctgggctgtgtgcggctgctctccaatgccatcagcagattaaaagataccggataccagcgtttggatctatgcaaactaaacccctcagatactgatgcagttcgtggccagatagtggtcagtttacagacacgagacagaataggaaccggcggctcggtggtggactgcagaggactgttagaaaatgaaggaacggtgtatgaagactccgggcctgggaggccgctcagctgcttcatggaggaaccagccccttacacagatagcaccggtgctgctgctggaggagggaattgcaggttcgtggagtccccaagtcaagatcaaagacttcaggcacagcggcttcgaaaccctgatgtgcgaggttcactacagacgccccagaaccgaccacacggccaccagtccccggaactgcccgaaggctacgaacaaagaacaacagtccagggccaagtttactttttgcatacacagactggagttagcacgtggcacgaccccaggataccaagagaccttaacagtgtgaactgtgatgaacttggaccactgccgccaggctgggaagtcagaagtacagtttctgggaggatatattttgtagatcataataaccgaacaacccagtttacagacccaaggttacaccacatcatgaatcaccagtgccaactcaaggagcccagccagccgctgccactgcccagtgagggctctctggaggacgaggagcttcctgcccagagatacgaaagagatctagtccagaagctgaaagtcctcagacacgaactgtcgcttcagcagccccaagctggtcattgccgcatcgaagtgtccagagaagaaatctttgaggagtcttaccgccagataatgaagatgcgaccgaaagacttgaaaaaacggctgatggtgaaattccgtggggaagaaggtttggattacggtggtgtggccagggagtggctttacttgctgtgccatgaaatgctgaatccttattacgggctcttccagtattctacggacaatatttacatgttgcaaataaatccggattcttcaatcaaccccgaccacttgtcttatttccactttgtggggcggatcatggggctggctgtgttccatggacactacatcaacgggggcttcacagtgcccttctacaagcagctgctggggaagcccatccagctctcagatctggaatctgtggacccagagctgcataagagcttggtgtggatcctagagaacgacatcacgcctgtactggaccacaccttctgcgtggaacacaacgccttcgggcggatcctgcagcatgaactgaaacccaatggcagaaatgtgccagtcacagaggagaataagaaagaatacgtccggttgtatgtaaactggaggtttatgagaggaatcgaagcccagttcttagctctgcagaaggggttcaatgagctcatccctcaacatctgctgaagccttttgaccagaaggaactggagctgatcataggcggcctggataaaatagacttgaacgactggaagtcgaacacgcggctgaagcactgtgtggccgacagcaacatcgtgcggtggttctggcaagcggtggagacgttcgatgaagaaaggagggccaggctcctgcagtttgtgactgggtccacgcgagtcccgctccaaggcttcaaggctttgcaaggttctacaggcgcggcagggccccggctgttcaccatccacctgatagacgcgaacacagacaaccttccgaaggcccatacctgctttaaccggatcgacattccaccatatgagtcctatgagaagctctacgagaagctgctgacagccgtggaggagacctgcgggtttgctgtggagtgaaaagcaaccaaaggcaacagagtctagctcatggccaccagaccaaaagcatccagcttctgtgcacctcctgcaaagctggcagaggccctggaattccagatcacctgaggggaaagggttgtctctctcctttctgttgggggagggggatgggggacttttgttggtggctcccacccatatatccctcctttaccatagtactcccacccacttccatcacccatccaataaaatgcagccaggtttagcctttggctttggtcacacaggatattctgctgtgttgcaacccatgtggtgataaggctcacagccctgagctctttacgggagcatcaactcacagttaggggactgggcgtggctgattgagggtttggaactggtggctatgccagctattccatctcaaaacagccttgaggccccttttcaatttgagcagctgctagatatcttatcagagctcagattccagatttcacatcccagcagccggttctgggtagcagatcaatttccaactggaaaataactatataatgtatgcttattggaattctgccacagcaggaagcttgagtcaaaatgtgtttcccctttgaaaggagaaggaattggagcagcttttcctggaggcccaggatatttcttttctgggtatcttggctgaaaattttgttttacatagagaaaaacgatcttttaagggtcccttttgctgcattatctgtccagtttgacttttttttcagtgaaaacaccatgtcatggagtgtaggaaagagcagaccaaaatcagccctagagccaaccagtcagtcccaaagctgtgacctctgtgccactgttgtccatagaagagcatcgactgtgtcacttaaaatattagtaaaccatgatgcagcaactgctaagagctaaactaacaaaattgtgtcatcatagctgctggcttggtgtgaactcgcttaaaagcaatggtgaaaggataacctcgatgatgtaaatccacccaaagatactgttctacaaaaagtagggtgtggacgcaaacctgtgacagcagagggggacgacttcacactcactgcctcatgtggcccctttcccagtggcagctggtgacactaacgattgctactcggttcacttgcccagatgtcttcatatgatgagcaaggccagaagcaaggctagattcgaagtttctgacaccatttccagtttgcacaaaagtcagtattttatcttaaagtggcttgatttccaatagctgaacttgggcagaaaacagcaggccaatgttcctatgtggtttctttgttgttgtttttgtttggggtgggggcaagtacagggtaattcatgagcaagacatttcactgctgtcgaagtctctgggatcccgctgtgggtctgagatggcctgggaaggaccttgtggacaatggttttatctgttctttttgtcactgttaatttctgggctgctgaggttctagaatagaagggctgccaaatgaggtttgctgcaggaggaaagtttaatcccccattccaaaagtccaggccaaatggtgggcttagcctctttgaaaagttctgccttgcccccacaggtgggcacatcctgtgtctcattcaccatgatgcttcctgagggtgttctagaagcccgttccccagtggctgtatccagcctttccttgcatcatcttcctcttgaaggtgaggaagtgaaaactacagacctcccccggacagcccactctctatcacgagcctaacccgcgggaggcggaagagacatccattcgagaactgaagcggcctccgggatgaggtcagaggccccacctgattttcctggtggtggtatccaaaatcttcagtaactaggaaggaaaccagggtctcatggtttaaaagactttgaagcaggaatgttgcatttgacgcctttaaaactacctttttgctgttgggaggagtcgggggcgagccttagcagctgcaccgccatccccatgctggttggtgctgccctgcctctcgtgccgggtgttgcttcagcccagagccagagggctgggtcccgggtcctccacaggtgaccccggtggacacacgcgttcccatcctggcctccgtctctgcttttccacttctacctgcgtgtgggtttgccgccttgtcatcggttgtgtgagtgtcgcagacctttccagagctccggttcactctttccaaacaggcctccctgtcggtggcactgcactcctagaaccttcagtttctacgatggtttgtttggtccttttgaaccaccccaaagaactcaacatggcaaagcaaatggtaaaagcttcccgactgttctactttgggtccgcgcgaagcccactcacgtgtgatctgtgttgcccctctcggtggtcccaggcgatccagccatgccccctgcccctctgcccagatgcttcaggggcccggcttttcaggcttgccctcaccagcggccgtcagccgacactcagggatgtagctaacaccactccgccagtgctttcagtaggaagagctgaggctgcctgggaggcccggggcgaccggaaaagggctctctcaagttctgaaaagagaatctgccaccagatcgaatttcgacccctgagcttgttcggacgtatggtccaaattcagattaaggtggtcacccaacccgagatgtcaggaaaggccttctgcagagaaaatgtccccccacccgccatctgcagccaggtgtgtgccacacggcagccttcccgaaacatagtatggattttaaaaatgtgtttatttttgtttctcaaccactttataacgtattttttaatttattttgtaatgtcttgttttgaagtattgctgctatccttgttatccttcccactgtttttatcactgatttattttgtgaaagttgtacactaatgttctatgtcaaaatcaaaagtatttaatgaaatactagttctatttaatgtggttatggaaccagctggaaacacaaaacaaacagtgattgtacagcaggctgggcccaggaggtcaggttcattttgttacatatgcaataaactcacgactttaca

SEQ ID NO: 182157 - DNA, 2918 bp, Homo sapiens
  Payload ID: 15873
  Gene Symbol: SMURF2
  Gene Name: SMAD specific E3 ubiquitin protein ligase 2
  Uniprot ID: Q9HAU4
  ENST ID: ENST00000262435
  CDS Start-End: 189-2435
ggggagctcggcgtcccgctccctccgcggctcatggcgacgactctcggcacatccgggaccctccggccgtggcggccgaggcgccggctgctcgggccccagccccggccgctgtggtgactccgccgcgcctcgccgtcgcccccgtgccgcccgccgcccccgccgcccccgccgccggggacatgtctaaccccggaggccggaggaacgggcccgtcaagctgcgcctgacagtactctgtgcaaaaaacctggtgaaaaaggattttttccgacttcctgatccatttgctaaggtggtggttgatggatctgggcaatgccattctacagatactgtgaagaatacgcttgatccaaagtggaatcagcattatgacctgtatattggaaagtctgattcagttacgatcagtgtatggaatcacaagaagatccataagaaacaaggtgctggatttctcggttgtgttcgtcttctttccaatgccatcaaccgcctcaaagacactggttatcagaggttggatttatgcaaactcgggccaaatgacaatgatacagttagaggacagatagtagtaagtcttcagtccagagaccgaataggcacaggaggacaagttgtggactgcagtcgtttatttgataacgatttaccagacggctgggaagaaaggagaaccgcctctggaagaatccagtatctaaaccatataacaagaactacgcaatgggagcgcccaacacgaccggcatccgaatattctagccctggcagacctcttagctgctttgttgatgagaacactccaattagtggaacaaatggtgcaacatgtggacagtcttcagatcccaggctggcagagaggagagtcaggtcacaacgacatagaaattacatgagcagaacacatttacatactcctccagacctaccagaaggctatgaacagaggacaacgcaacaaggccaggtgtatttcttacatacacagactggtgtgagcacatggcatgatccaagagtgcccagggatcttagcaacatcaattgtgaagagcttggtccattgcctcctggatgggagatccgtaatacggcaacaggcagagtttatttcgttgaccataacaacagaacaacacaatttacagatcctcggctgtctgctaacttgcatttagttttaaatcggcagaaccaattgaaagaccaacagcaacagcaagtggtatcgttatgtcctgatgacacagaatgcctgacagtcccaaggtacaagcgagacctggttcagaaactaaaaattttgcggcaagaactttcccaacaacagcctcaggcaggtcattgccgcattgaggtttccagggaagagatttttgaggaatcatatcgacaggtcatgaaaatgagaccaaaagatctctggaagcgattaatgataaaatttcgtggagaagaaggccttgactatggaggcgttgccagggaatggttgtatctcttgtcacatgaaatgttgaatccatactatggcctcttccagtattcaagagatgatatttatacattgcagatcaatcctgattctgcagttaatccggaacatttatcctatttccactttgttggacgaataatgggaatggctgtgtttcatggacattatattgatggtggtttcacattgcctttttataagcaattgcttgggaagtcaattaccttggatgacatggagttagtagatccggatcttcacaacagtttagtgtggatacttgagaatgatattacaggtgttttggaccataccttctgtgttgaacataatgcatatggtgaaattattcagcatgaacttaaaccaaatggcaaaagtatccctgttaatgaagaaaataaaaaagaatatgtcaggctctatgtgaactggagatttttacgaggcattgaggctcaattcttggctctgcagaaaggatttaatgaagtaattccacaacatctgctgaagacatttgatgagaaggagttagagctcattatttgtggacttggaaagatagatgttaatgactggaaggtaaacacccggttaaaacactgtacaccagacagcaacattgtcaaatggttctggaaagctgtggagttttttgatgaagagcgacgagcaagattgcttcagtttgtgacaggatcctctcgagtgcctctgcagggcttcaaagcattgcaaggtgctgcaggcccgagactctttaccatacaccagattgatgcctgcactaacaacctgccgaaagcccacacttgcttcaatcgaatagacattccaccctatgaaagctatgaaaagctatatgaaaagctgctaacagccattgaagaaacatgtggatttgctgtggaatgacaagcttcaaggatttacccaggactctatttatacaaccctgactgacagcctcctttcagcagagtttcaaagaatatgctgaaatacaggaaaacactccccccccccccctttttttttttttttttacattttaggacactgtgaggggaaaggacaattttgaaattccttttcaaggaaaaaaaaggtctttatgctttgccatgaggccacattcagctgctatttaaacttaatatcttgaacctaaagaatgctgacttttcctacatttccagagttaggcagtattctacacttaaagactactactatttttataaaaggtaatctattcaaatttcttcacagatttcaagtctctcaaacatcaagacaacttcagcagtcggtacaagtcacatttcattttgattgaatacatgatcttgaacagctcctgtacttgctctttgtaaaaaaaaataaaattatttt

SEQ ID NO: 182158 - DNA, 5892 bp, Homo sapiens
  Payload ID: 15873
  Gene Symbol: SMURF2
  Gene Name: SMAD specific E3 ubiquitin protein ligase 2
  ENST ID: ENST00000582081
  CDS Start-End: 18-185
cccccgccgccggggacatgtctaaccccggaggccggaggaacgggcccgtcaagctgcgcctgacaggacttcctgatccatttgctaaggtggtggttgatggatctgggcaatgccattctacagatactgtgaagaatacgcttgatccaaagtggaatcagcattatgacctgcagtgaagtgaaatctgcaagagtcctgctcgctcaaggcctgcatacaggaaagaagcaggggaaaagcgttacaaacagcttttgttctacagcattttaaaatataacaggtatattggaaagtctgattcagttacgatcagtgtatggaatcacaagaagatccataagaaacaaggtgctggatttctcggttgtgttcgtcttctttccaatgccatcaaccgcctcaaagacactggttatcagaggttggatttatgcaaactcgggccaaatgacaatgatacagttagaggacagatagtagtaagtcttcagtccagagaccgaataggcacaggaggacaagttgtggactgcagtcgtttatttgataacgatttaccagacggctgggaagaaaggagaaccgcctctggaagaatccagtatctaaaccatataacaagaactacgcaatgggagcgcccaacacgaccggcatccgaatattctagccctggcagacctcttagctgctttgttgatgagaacactccaattagtggaacaaatggtgcaacatgtggacagtcttcagatcccaggctggcagagaggagagtcaggtcacaacgacatagaaattacatgagcagaacacatttacatactcctccagacctaccagaaggctatgaacagaggacaacgcaacaaggccaggtgtatttcttacatacacagactggtgtgagcacatggcatgatccaagagtgcccagggatcttagcaacatcaattgtgaagagcttggtccattgcctcctggatgggagatccgtaatacggcaacaggcagagtttatttcgttgaccataacaacagaacaacacaatttacagatcctcggctgtctgctaacttgcatttagttttaaatcggcagaaccaattgaaagaccaacagcaacagcaagtggtatcgttatgtcctgatgacacagaatgcctgacagtcccaaggtacaagcgagacctggttcagaaactaaaaattttgcggcaagaactttcccaacaacagcctcaggcaggtcattgccgcattgaggtttccagggaagagatttttgaggaatcatatcgacaggtcatgaaaatgagaccaaaagatctctggaagcgattaatgataaaatttcgtggagaagaaggccttgactatggaggcgttgccagggaatggttgtatctcttgtcacatgaaatgttgaatccatactatggcctcttccagtattcaagagatgatatttatacattgcagatcaatcctgattctgcagttaatccggaacatttatcctatttccactttgttggacgaataatgggaatggctgtgtttcatggacattatattgatggtggtttcacattgcctttttataagcaattgcttgggaagtcaattaccttggatgacatggagttagtagatccggatcttcacaacagtttagtgtggatacttgagaatgatattacaggtgttttggaccataccttctgtgttgaacataatgcatatggtgaaattattcagcatgaacttaaaccaaatggcaaaagtatccctgttaatgaagaaaataaaaaagaatatgtcaggctctatgtgaactggagatttttacgaggcattgaggctcaattcttggctctgcagaaaggatttaatgaagtaattccacaacatctgctgaagacatttgatgagaaggagttagagctcattatttgtggacttggaaagatagatgttaatgactggaaggtaaacacccggttaaaacactgtacaccagacagcaacattgtcaaatggttctggaaagctgtggagttttttgatgaagagcgacgagcaagattgcttcagtttgtgacaggatcctctcgagtgcctctgcagggcttcaaagcattgcaaggtgctgcaggcccgagactctttaccatacaccagattgatgcctgcactaacaacctgccgaaagcccacacttgcttcaatcgaatagacattccaccctatgaaagctatgaaaagctatatgaaaagctgctaacagccattgaagaaacatgtggatttgctgtggaatgacaagcttcaaggatttacccaggactctatttatacaaccctgactgacagcctcctttcagcagagtttcaaagaatatgctgaaatacaggaaaacactccccccccccccctttttttttttttttttacattttaggacactgtgaggggaaaggacaattttgaaattccttttcaaggaaaaaaaaggtctttatgctttgccatgaggccacattcagctgctatttaaacttaatatcttgaacctaaagaatgctgacttttcctacatttccagagttaggcagtattctacacttaaagactactactatttttataaaaggtaatctattcaaatttcttcacagatttcaagtctctcaaacatcaagacaacttcagcagtcggtacaagtcacatttcattttgattgaatacatgatcttgaacagctcctgtacttgctctttgtaaaaaaaaataaaattattttgaattattctacctttgtaaacaattggctaaaagaatcatctttaagaaattaagccatttacatgtttgtgtttttctatagcagagcattatattttgcattatatgtttcaacctagtctaagtgggtcttttttacatttttcaagaacggatttcctggaatacagcgatataattttggttgtcaaattcctaatgcaaccatttagtctaaacttagtcatttatttgtgacaataagatgtgttcaggggctccctgtttttaagagactcttttaaaaaaaaaaaaacctaatgtttttatcttgagtcaatatgattaggtattttggatttacttttaatcttaaaatactgcatttttatagcttctcagagcatgtggatgggatgggattttcgttattttgctgggtcagcttatctttaatatatggactattcctataaaccaaagtctctgacaagtgcacctaatttatattgtattttaactacagtgtaagtttccattaacaaaaccatcctaaagcgttaactgctcataattttaatcagctacagttatgaaaaaggaagaattttgctctaaagattattaataagcttagaaaatcctgcttttacctaacagaatgaagtggggttgaggggcggtagtatgaacagtgattctaactctatggcgtaaattactttgaagagttcattttggaagtaagggaatcccgcttcccttggtgttgaagatctgcatctgattttgaaacgtccagatttagctttcaaggtgcgtgcatgttgaatgatccagaagcaacgaaaactctggggtgagggattgaaaaaatctgaaatcacagttggatttttaaattcaaccatcaaaaatatgtactatcagtttttttttacattgatgtgaaataagcaaattttcatgataattaagctgcaaaatttaaagttatcaagtaaataggtcctctgtgttctgtttcatgtgatggagtgggtttcagtctgtgttcttggagccaaagggttcctcaggggtgcctcaggagtaatggtttaagagaagaggggcaatgagagggagcgagggggaaggcctagttggtatttgagcaggggccttaggctccatatccccaccccctttacccagaacagcccatttttcttatgtatattggaatttcaagtaagctttcatggggtgcagtggggcggggaggaatggatgggataaaaaaagtggagattttgctgctttaaaaaagttgagaactacttgtgtagtttttaagtattttaatgtatttcatttggccaaattcaactgccacaagcaagctagtcatagttgtaactgtgcagtggtaatatgcttatgcctacctttttcctctcaaacaatttgttttttttacattgcattctgagtactgaagagcatcttgaaatgtatggaagtggtttctatgctatttgataatcagtaatgttcagctgtcatgatagtactttactggttgcagacccatctctcttttatattaaagcactagtgcagtttataattgtgcctacttttaaaatctttcagtaaaaaagtacataatgaatacagaaatcataactgacagggatacagtaataatgaaatgctactatcacttattttaatatacaatataaagcaggcaaataccattgctttttgagtgcctttttaactttatactaatgacttaatagagctttaaaagaaagaaattggctgggcatggtggctcacacctgtaatcccagcactttgggaggccgaggtgggcggatcacctgaggtcaggagttcgagaccagcctggccaacgtggtgaaaccctgtctctactaaaaatacaaaatttagccgggcatggtggcgcactcctgtaatccaactacttgggaggctgaggcaggagaattgcttgaatctgggaggcagagattgcagtgagccgagatcgcaccactgcactccagcctgggcgacaagagtgagactccgtccccgcccaaaaaaaaaaaaaaaagaaattactctccataacagtctatgttatcaccaacatatataaaaacatgatttagatttccatttcaaagttacattacccgattacttccaaataggtgctaagcaaaaacccccaatgtattattgaaccatggacttgcacctcatgtttaatgtgaatatttatttccatgtccctcttaactggttttttcttgtcttccctctagctgtattgttatttcagatatgtgatatctgttttcatactcttgcctttccatcatgaatgcttagttatgaacagagattcctttgtagagctcataggcagtacagagaggtaagtcttgcctcagagggccttgtatcttggtgtagtttttaaatagtgcatagtgtatagtgtatagtgtacattttgttttgcacatagtttgttgccccgaatgggttttttaccaagcctttttttctttcatgtatttacagtccggagcacaagattctcttctttcaaatacaatgtaattcgctttactttacaacactaaatctgggctttgaatttccagtgcattggactgattggattgttgggagttagaggctgttccaaccatccttagtttgggagagtggctccttctgcttgttttctaagcgtacagtcaacgggtgccatttgtggtatttaacatgttaggatgattgttccaaatgctgagttgttttatttctagatgtaattagttcactttatgtaatattcttctctcagactgactttaaaaacaaagttttatcattttcattgtatttgtatttattacagagtgttttagctttgatattctttgtattttcattcatttgttacatgagctttatcagtaacatctgtataaatggtttttaaaaattaactatgtatgtgcccatgccgaagtcgagcaataaaatcaatgctgtttgcactgtcacagcatcaa

SEQ ID NO: 182159 - DNA, 1716 bp, Homo sapiens
  Payload ID: 15873
  Gene Symbol: SMURF2
  Gene Name: SMAD specific E3 ubiquitin protein ligase 2
  ENST ID: ENST00000585301
  CDS Start-End: 33-1716
ccgccgcccccgccgcccccgccgccggggacatgtctaaccccggaggccggaggaacgggcccgtcaagctgcgcctgacaggacttcctgatccatttgctaaggtggtggttgatggatctgggcaatgccattctacagatactgtgaagaatacgcttgatccaaagtggaatcagcattatgacctgtatattggaaagtctgattcagttacgatcagtgtatggaatcacaagaagatccataagaaacaaggtgctggatttctcggttgtgttcgtcttctttccaatgccatcaaccgcctcaaagacactggttatcagaggttggatttatgcaaactcgggccaaatgacaatgatacagttagaggacagatagtagtaagtcttcagtccagagaccgaataggcacaggaggacaagttgtggactgcagtcgtttatttgataacgatttaccagacggctgggaagaaaggagaaccgcctctggaagaatccagtatctaaaccatataacaagaactacgcaatgggagcgcccaacacgaccggcatccgaatattctagccctggcagacctcttagctgctttgttgatgagaacactccaattagtggaacaaatggtgcaacatgtggacagtcttcagatcccaggctggcagagaggagagtcaggtcacaacgacatagaaattacatgagcagaacacatttacatactcctccagacctaccagaaggctatgaacagaggacaacgcaacaaggccaggtgtatttcttacatacacagactggtgtgagcacatggcatgatccaagagtgcccagggatcttagcaacatcaattgtgaagagcttggtccattgcctcctggatgggagatccgtaatacggcaacaggcagagtttatttcgttgaccataacaacagaacaacacaatttacagatcctcggctgtctgctaacttgcatttagttttaaatcggcagaaccaattgaaagaccaacagcaacagcaagtggtatcgttatgtcctgatgacacagaatgcctgacagtcccaaggtacaagcgagacctggttcagaaactaaaaattttgcggcaagaactttcccaacaacagcctcaggcaggtcattgccgcattgaggtttccagggaagagatttttgaggaatcatatcgacaggtcatgaaaatgagaccaaaagatctctggaagcgattaatgataaaatttcgtggagaagaaggccttgactatggaggcgttgccagggaatggttgtatctcttgtcacatgaaatgttgaatccatactatggcctcttccagtattcaagagatgatatttatacattgcagatcaatcctgattctgcagttaatccggaacatttatcctatttccactttgttggacgaataatgggaatggctgtgtttcatggacattatattgatggtggtttcacattgcctttttataagcaattgcttgggaagtcaattaccttggatgacatggagttagtagatccggatcttcacaacagtttagtgtggatacttgagaatgatattacaggtgttttggaccataccttctgtgttgaacataatgcatatggtgaaattattcagcatgaacttaaaccaaatggcaaaagtatccctgttaatg

SEQ ID NO: 182160 - DNA, 3104 bp, Homo sapiens
  Payload ID: 15873
  Gene Symbol: SMURF2
  Gene Name: SMAD specific E3 ubiquitin protein ligase 2
  ENST ID: ENST00000578386
  CDS Start-End: 49-255
gtcgcccccgtgccgcccgccgcccccgccgcccccgccgccggggacatgtctaaccccggaggccggaggaacgggcccgtcaagctgcgcctgacagtactctgtgcaaaaaacctggtgaaaaaggattttttccgacttcctgatccatttgctaaggtggtggttgatggatctgggcaatgccattctacagatactgtgaagaatacgcttgatccaaagtggaatcagcattatgacctgcagtgaagtgaaatctgcaagagtcctgctcgctcaaggcctgcatacaggaaagaagcaggggaaaagcgttacaaacagcttttgttctacagcattttaaaatataacaggtatattggaaagtctgattcagttacgatcagtgtatggaatcacaagaagatccataagaaacaaggtgctggatttctcggttgtgttcgtcttctttccaatgccatcaaccgcctcaaagacactggttatcagaggttggatttatgcaaactcgggccaaatgacaatgatacagttagaggacagatagtagctgggaagaaaggagaaccgcctctggaagaatccagtatctaaaccatataacaagaactacgcaatgggagcgcccaacacgaccggcatccgaatattctagccctggcagacctcttagctgctttgttgatgagaacactccaattagtggaacaaatggtgcaacatgtggacagtcttcagatcccaggctggcagagaggagagtcaggtcacaacgacatagaaattacatgagcagaacacatttacatactcctccagacctaccagaaggctatgaacagaggacaacgcaacaaggccaggtgtatttcttacatacacagactggtgtgagcacatggcatgatccaagagtgcccagggatcttagcaacatcaattgtgaagagcttggtccattgcctcctggatgggagatccgtaatacggcaacaggcagagtttatttcgttgaccataacaacagaacaacacaatttacagatcctcggctgtctgctaacttgcatttagttttaaatcggcagaaccaattgaaagaccaacagcaacagcaagtggtatcgttatgtcctgatgacacagaatgcctgacagtcccaaggtacaagcgagacctggttcagaaactaaaaattttgcggcaagaactttcccaacaacagcctcaggcaggtcattgccgcattgaggtttccagggaagagatttttgaggaatcatatcgacaggtcatgaaaatgagaccaaaagatctctggaagcgattaatgataaaatttcgtggagaagaaggccttgactatggaggcgttgccagggaatggttgtatctcttgtcacatgaaatgttgaatccatactatggcctcttccagtattcaagagatgatatttatacattgcagatcaatcctgattctgcagttaatccggaacatttatcctatttccactttgttggacgaataatgggaatggctgtgtttcatggacattatattgatggtggtttcacattgcctttttataagcaattgcttgggaagtcaattaccttggatgacatggagttagtagatccggatcttcacaacagtttagtgtggatacttgagaatgatattacaggtgttttggaccataccttctgtgttgaacataatgcatatggtgaaattattcagcatgaacttaaaccaaatggcaaaagtatccctgttaatgaagaaaataaaaaagaatatgtcaggctctatgtgaactggagatttttacgaggcattgaggctcaattcttggctctgcagaaaggatttaatgaagtaattccacaacatctgctgaagacatttgatgagaaggagttagagctcattatttgtggacttggaaagatagatgttaatgactggaaggtaaacacccggttaaaacactgtacaccagacagcaacattgtcaaatggttctggaaagctgtggagttttttgatgaagagcgacgagcaagattgcttcagtttgtgacaggatcctctcgagtgcctctgcagggcttcaaagcattgcaaggtgctgcaggcccgagactctttaccatacaccagattgatgcctgcactaacaacctgccgaaagcccacacttgcttcaatcgaatagacattccaccctatgaaagctatgaaaagctatatgaaaagctgctaacagccattgaagaaacatgtggatttgctgtggaatgacaagcttcaaggatttacccaggactctatttatacaaccctgactgacagcctcctttcagcagagtttcaaagaatatgctgaaatacaggaaaacactccccccccccccctttttttttttttttttacattttaggacactgtgaggggaaaggacaattttgaaattccttttcaaggaaaaaaaaggtctttatgctttgccatgaggccacattcagctgctatttaaacttaatatcttgaacctaaagaatgctgacttttcctacatttccagagttaggcagtattctacacttaaagactactactatttttataaaaggtaatctattcaaatttcttcacagatttcaagtctctcaaacatcaagacaacttcagcagtcggtacaagtcacatttcattttgattgaatacatgatcttgaacagctcctgtacttgctctttgtaaaaaaaaataaaattattttgaattattctacctttgtaaacaattggctaaaagaatcatctttaagaaattaagccatttacatgtttgtgtttttctatagcagagcattatattttgcattatatgtttcaacctagtctaagtgggtcttttttacatttttcaagaacggatttcctggaatacagcgatataattttggttgtcaaattcctaatgcaaccatttagtctaaacttagtcatttatttgtgacaataagatgtgttcaggggctccctgtttttaagagactcttttaaaaaaaaaaaaa

SEQ ID NO: 182161 - DNA, 2403 bp, Homo sapiens
  Payload ID: 15874
  Gene Symbol: SMAP1
  Gene Name: small ArfGAP 1
  Uniprot ID: Q8IYB5
  ENST ID: ENST00000316999
  CDS Start-End: 249-1571
agtccccctccccctcccctcgccggctagggtggtgcgtgccggcaggccggtcaaggaggcgggacacgtcggcgctaccaccgccaccgccgccgccgcccctcctcccgttccagctgccgctgccgcttcctgggctgagtccgcccgcggtcccggcggcgccaggtgcgttcactctgcccggctccagccagcgtccgccgccgccgtagctgccccaggctccccgccccgctgccgagatggcgacgcgctcctgtcgggagaaggctcagaagctgaacgagcagcaccagctcatcctatccaagcttctgagggaggaggacaacaagtactgcgccgactgcgaggccaaaggtcctcgatgggcttcctggaatattggtgtgtttatttgcatcagatgtgctggaattcatagaaatcttggggttcatatatccagggtcaaatcagtcaacctagaccaatggacagcagaacagatacagtgcatgcaagatatgggaaatactaaagcaagactactctatgaagccaatcttccagagaactttcgaagaccacagacagatcaagcagtggaatttttcatcagagataaatatgaaaagaagaaatactacgataaaaatgccatagctattacaaataaagaaaaggaaaaaaaaaaggaagagaaaaagagagaaaaggagccagaaaagccggcaaaaccacttacagctgaaaagctgcagaagaaagatcagcaactggagcctaaaaaaagtaccagccctaaaaaagctgcggagcccactgtggatcttttaggacttgatggccctgctgtggcaccagtgaccaacgggaacacaacggtgccacccctgaacgatgatctggacatctttggaccgatgatttctaatcccttacctgcaactgtcatgcccccagctcaggggacaccctctgcaccagcagctgcaaccctgtctacagtaacatctggggatctagatttattcactgagcaaactacaaaatcagaagaagtggcaaagaaacaactttccaaagactccatcttatctctgtatggcacaggaaccattcaacagcaaagtactcctggtgtatttatgggacccacaaatataccatttacctcacaagcaccagctgcatttcagggctttccatcgatgggcgtgcctgtgcctgcagctcctggccttataggaaatgtgatgggacagagtccaagcatgatggtgggcatgcccatgcccaatgggtttatgggaaatgcacaaactggtgtgatgccacttcctcagaacgttgttggcccccaaggaggaatggtgggacaaatgggtgcaccccagagtaagtttggcctgccgcaagctcagcagccccagtggagcctctcacagatgaatcagcagatggctggcatgagtatcagtagtgcaacccctactgcaggttttggccagccctccagcacaacagcaggatggtctggaagctcatcaggtcagactctcagcacacaactgtggaaatgaaaactgcaatacaagtttcatccagaactaccacctgacattccttgctgaaacgcatctagttcccctgtttattcatatgcatattttttttctttttacccatttgttcatattaagaatgatctgattgaccgtgttggtctgtactgattcaatttgatgtggtgaaaagcaggttgataaatcattttatgtcaagggcagctttgctcatatttcccatgatttcatgtactgcattatttgagaagctgctcaacttgcaaaatcagttttcctctcaataaaattatagctctaatgtttgcatataagggaagtagttatcatgttagtaatacctctaatagtataaaccccaccccaaaattagccagtaatcctgtaggaaggtactgtatgatcaaatgtttaatcatataaatagaatgtaaatgtctcactgagcactgttttctagtgtatcaaaatgctcttatttcatcattcacttcactgtgctgttgttatgatgtgcttaacagggaacgtgattagtgaaaggaagataaacgtggatgttactccaaaacttcgtttaatgaatgcttaaagaattcaaattttatctgcctctcttgtaatttggatctcttcttaatgtacatagtgctaacatgaagacctttttctgcactatatgcaaacagggtaactaactaaaacaaagccactttcaatcttcaatccttgaaggtatatctaggtttatgacagtaattgtgtttacattttatggtgcctagtattgacaaaatgttatttccctacattaaacatgactccatag

SEQ ID NO: 182162 - DNA, 2491 bp, Homo sapiens
  Payload ID: 15874
  Gene Symbol: SMAP1
  Gene Name: small ArfGAP 1
  Uniprot ID: Q8IYB5
  ENST ID: ENST00000370452
  CDS Start-End: 249-1559
agtccccctccccctcccctcgccggctagggtggtgcgtgccggcaggccggtcaaggaggcgggacacgtcggcgctaccaccgccaccgccgccgccgcccctcctcccgttccagctgccgctgccgcttcctgggctgagtccgcccgcggtcccggcggcgccaggtgcgttcactctgcccggctccagccagcgtccgccgccgccgtagctgccccaggctccccgccccgctgccgagatggcgacgcgctcctgtcgggagaaggctcagaagctgaacgagcagcaccagctcatcctatccaagcttctgagggaggaggacaacaagtactgcgccgactgcgaggccaaaggtcctcgatgggcttcctggaatattggtgtgtttatttgcatcagatgtgctggaattcatagaaatcttggggttcatatatccagggtcaaatcagtcaacctagaccaatggacagcagaacagatacagtgcatgcaagatatgggaaatactaaagcaagactactctatgaagccaatcttccagagaactttcgaagaccacagacagatcaagcagtggaatttttcatcagagataaatatgaaaagaagaaatactacgataaaaatgccatagctattacaaataaagaaaaggaaaaaaaaaaggaagagaaaaagagagaaaaggagccagaaaagccggcaaaaccacttacagctgaaaagctgcagaagaaagatcagcaactggagcctaaaaaaagtaccagccctaaaaaagctgcggagcccactgtggatcttttaggacttgatggccctgctgtggcaccagtgaccaacgggaacacaacggtgccacccctgaacgatgatctggacatctttggaccgatgatttctaatcccttacctgcaactgtcatgcccccagctcaggggacaccctctgcaccagcagctgcaaccctgtctacagtaacatctggggatctagatttattcactgagcaaactacaaaatcagaagaagtggcaaagaaacaactttccaaagactccatcttatctctgtatggcacaggaaccattcaacagcaaagtactcctggtgtatttatgggacccacaaatataccatttacctcacaagcaccagctgcatttcagggctttccatcgatgggcgtgcctgtgcctgcagctcctggccttataggaaatgtgatgggacagagtccaagcatgatggtgggcatgcccatgcccaatgggtttatgggaaatgcacaaactggtgtgatgccacttcctcagaacgttgttggcccccaaggaggaatggtgggacaaatgggtgcaccccagagtaagtttggcctgccgcaagctcagcagccccagtggagcctctcacagataatgcagaagggtgatgctgttctccagcactccatcagtgcaatctactggccaatgacaaggtggttaaaatgtcctttagtagatgaatcagcagatggctggcatgagtatcagtagtgcaacccctactgcaggttttggccagccctccagcacaacagcaggatggtctggaagctcatcaggtcagactctcagcacacaactgtggaaatgaaaactgcaatacaagtttcatccagaactaccacctgacattccttgctgaaacgcatctagttcccctgtttattcatatgcatattttttttctttttacccatttgttcatattaagaatgatctgattgaccgtgttggtctgtactgattcaatttgatgtggtgaaaagcaggttgataaatcattttatgtcaagggcagctttgctcatatttcccatgatttcatgtactgcattatttgagaagctgctcaacttgcaaaatcagttttcctctcaataaaattatagctctaatgtttgcatataagggaagtagttatcatgttagtaatacctctaatagtataaaccccaccccaaaattagccagtaatcctgtaggaaggtactgtatgatcaaatgtttaatcatataaatagaatgtaaatgtctcactgagcactgttttctagtgtatcaaaatgctcttatttcatcattcacttcactgtgctgttgttatgatgtgcttaacagggaacgtgattagtgaaaggaagataaacgtggatgttactccaaaacttcgtttaatgaatgcttaaagaattcaaattttatctgcctctcttgtaatttggatctcttcttaatgtacatagtgctaacatgaagacctttttctgcactatatgcaaacagggtaactaactaaaacaaagccactttcaatcttcaatccttgaaggtatatctaggtttatgacagtaattgtgtttacattttatggtgcctagtattgacaaaatgttatttccctacattaaacatgactccatag

SEQ ID NO: 182163 - DNA, 3333 bp, Homo sapiens
  Payload ID: 15874
  Gene Symbol: SMAP1
  Gene Name: small ArfGAP 1
  Uniprot ID: Q8IYB5
  ENST ID: ENST00000370455
  CDS Start-End: 249-1652
agtccccctccccctcccctcgccggctagggtggtgcgtgccggcaggccggtcaaggaggcgggacacgtcggcgctaccaccgccaccgccgccgccgcccctcctcccgttccagctgccgctgccgcttcctgggctgagtccgcccgcggtcccggcggcgccaggtgcgttcactctgcccggctccagccagcgtccgccgccgccgtagctgccccaggctccccgccccgctgccgagatggcgacgcgctcctgtcgggagaaggctcagaagctgaacgagcagcaccagctcatcctatccaagcttctgagggaggaggacaacaagtactgcgccgactgcgaggccaaaggtcctcgatgggcttcctggaatattggtgtgtttatttgcatcagatgtgctggaattcatagaaatcttggggttcatatatccagggtcaaatcagtcaacctagaccaatggacagcagaacagatacagtgcatgcaagatatgggaaatactaaagcaagactactctatgaagccaatcttccagagaactttcgaagaccacagacagatcaagcagtggaatttttcatcagagataaatatgaaaagaagaaatactacgataaaaatgccatagctattacaaatatttcctcctctgatgctcctcttcagcctttggtatcctctccttctctgcaagctgctgttgacaaaaataaattggagaaagaaaaggaaaaaaaaaaggaagagaaaaagagagaaaaggagccagaaaagccggcaaaaccacttacagctgaaaagctgcagaagaaagatcagcaactggagcctaaaaaaagtaccagccctaaaaaagctgcggagcccactgtggatcttttaggacttgatggccctgctgtggcaccagtgaccaacgggaacacaacggtgccacccctgaacgatgatctggacatctttggaccgatgatttctaatcccttacctgcaactgtcatgcccccagctcaggggacaccctctgcaccagcagctgcaaccctgtctacagtaacatctggggatctagatttattcactgagcaaactacaaaatcagaagaagtggcaaagaaacaactttccaaagactccatcttatctctgtatggcacaggaaccattcaacagcaaagtactcctggtgtatttatgggacccacaaatataccatttacctcacaagcaccagctgcatttcagggctttccatcgatgggcgtgcctgtgcctgcagctcctggccttataggaaatgtgatgggacagagtccaagcatgatggtgggcatgcccatgcccaatgggtttatgggaaatgcacaaactggtgtgatgccacttcctcagaacgttgttggcccccaaggaggaatggtgggacaaatgggtgcaccccagagtaagtttggcctgccgcaagctcagcagccccagtggagcctctcacagatgaatcagcagatggctggcatgagtatcagtagtgcaacccctactgcaggttttggccagccctccagcacaacagcaggatggtctggaagctcatcaggtcagactctcagcacacaactgtggaaatgaaaactgcaatacaagtttcatccagaactaccacctgacattccttgctgaaacgcatctagttcccctgtttattcatatgcatattttttttctttttacccatttgttcatattaagaatgatctgattgaccgtgttggtctgtactgattcaatttgatgtggtgaaaagcaggttgataaatcattttatgtcaagggcagctttgctcatatttcccatgatttcatgtactgcattatttgagaagctgctcaacttgcaaaatcagttttcctctcaataaaattatagctctaatgtttgcatataagggaagtagttatcatgttagtaatacctctaatagtataaaccccaccccaaaattagccagtaatcctgtaggaaggtactgtatgatcaaatgtttaatcatataaatagaatgtaaatgtctcactgagcactgttttctagtgtatcaaaatgctcttatttcatcattcacttcactgtgctgttgttatgatgtgcttaacagggaacgtgattagtgaaaggaagataaacgtggatgttactccaaaacttcgtttaatgaatgcttaaagaattcaaattttatctgcctctcttgtaatttggatctcttcttaatgtacatagtgctaacatgaagacctttttctgcactatatgcaaacagggtaactaactaaaacaaagccactttcaatcttcaatccttgaaggtatatctaggtttatgacagtaattgtgtttacattttatggtgcctagtattgacaaaatgttatttccctacattaaacatgactccatagaccttttcatttgtgggtttttatttcctatgatgtatactgccactaaccttccaaaaattacttagtattgcaaagtcaggaatcatcaggaacgtttagctgacaaaatacttgtctgttttaaaaacctgttcaagtctaccaacctgttcaagtctaccaattataagggcaaattggagaaaaagaaaaaatatatactcaagagtggtatcttgcagtatcggcactgtacaaaaaaatcttccaatttagttgttgtagagaaaacatgcagaacaaatgaagacaaaacatacattttgtaccaaccatccaattagcttatgttaactgacaagctccatttaaacagatgtccatcagatgacaagaaaggctgctgtactgaagtaaaacaaacaatacctgaatgctctgtagcctaaactccaaacatcctcttccatatggatccactggctggacaaactgcaccagttgctgcttcaatttatacctcaattttcactgtgtccaggtggtactttggctcgttggctagattaaccttctctgtccgagtgtgccacacgagaacctgaaggggaaggaaatagcttgggtagcgcactcttcatggtgacactcgaggtcgggcagcacaagtgtaatgaataccttagtgcagttatttgctttcggttccagttcttcgactgttgttatctgtttgagaaagtcagattcttgcatccctggctgggatccacgacgcttaaatacagcttttggattggacaaaatgacttgaagacttacagcaaatcctttgtgaaaaataaaaaaaaaaaagagactttaaaa

SEQ ID NO: 182164 - DNA, 419 bp, Homo sapiens
  Payload ID: 15874
  Gene Symbol: SMAP1
  Gene Name: small ArfGAP 1
  ENST ID: ENST00000439432
  CDS Start-End: 1-376
gaaatactacgataaaaatgccatagctattacaaatatttcctcctctgatgctcctcttcagcctttggtatcctctccttctctgcaagctgctgttgacaaaaataaattggagaaagaaaaggaaaaaaaaaaggaagagaaaaagagagaaaaggagccagaaaagccggcaaaaccacttacagctgaaaagctgcagaagaaagatcagcaactggagcctaaaaaaagtaccagccctaaaaaagctgcggagcccactgtggatcttttaggacttgtttggagaaagattgagaaggaaaagagtgaaaggcagttagttgaagtggaagagttgaccttcatgtactgctttccaaaaaattgatcctagttgttattgaataaattgttgtctgttttaagaatta

SEQ ID NO: 182165 - DNA, 578 bp, Homo sapiens
  Payload ID: 15874
  Gene Symbol: SMAP1
  Gene Name: small ArfGAP 1
  ENST ID: ENST00000445046
  CDS Start-End: 393-578
ttaaaggacccaaagtatgtacagcatatatagtataggatgtctggctcagtgtgggtacttgcatagatgttaatttcttataccaaaaaccccaaatgaacctgaattgaatttaaagtgtggtgatgcattgatagtggtggtggtgatgtaggaattaagaattgtcatttacttttctttctagaattagtttggatgagttttgttcagtgagaaaatttcctgaaagaggtagacttctttaagagaaagaaaagtagtttacagaatgtagttgcagaaataatgtgaaagagagcacagattgaggagtaggaaaattaaatttagagtcccagctttgtggagtggcgtgaataaagggaagtgtacatatcactgaattcatgcttttccttaagttatctgttttcagagcagtggaatttttcatcagagataaatatgaaaagaagaaatactacgataaaaatgccatagctattacaaatatttcctcctctgatgctcctcttcagcctttggtatcctctccttctctgcaagctgctgttgacaaaaataaattggag

SEQ ID NO: 182166 - DNA, 3150 bp, Homo sapiens
  Payload ID: 15874
  Gene Symbol: SMAP1
  Gene Name: small ArfGAP 1
  ENST ID: ENST00000619054
  CDS Start-End: 100-1473
atctctgtgggtggggccgcgcttaggtctggatcccctcctctaccctccggtgtgaccacgtcctcccactccgggctcggattcttggtctcctagatggagccctacctgcctgcccacctgacagcttttgtacaaggcttttatctctgcttcctgaaaaagagtatggtggtctttttcggtcctcgatgggcttcctggaatattggtgtgtttatttgcatcagatgtgctggaattcatagaaatcttggggttcatatatccagggtcaaatcagtcaacctagaccaatggacagcagaacagatacagtgcatgcaagatatgggaaatactaaagcaagactactctatgaagccaatcttccagagaactttcgaagaccacagacagatcaagcagtggaatttttcatcagagataaatatgaaaagaagaaatactacgataaaaatgccatagctattacaaatatttcctcctctgatgctcctcttcagcctttggtatcctctccttctctgcaagctgctgttgacaaaaataaattggagaaagaaaaggaaaaaaaaaaggaagagaaaaagagagaaaaggagccagaaaagccggcaaaaccacttacagctgaaaagctgcagaagaaagatcagcaactggagcctaaaaaaagtaccagccctaaaaaagctgcggagcccactgtggatcttttaggacttgatggccctgctgtggcaccagtgaccaacgggaacacaacggtgccacccctgaacgatgatctggacatctttggaccgatgatttctaatcccttacctgcaactgtcatgcccccagctcaggggacaccctctgcaccagcagctgcaaccctgtctacagtaacatctggggatctagatttattcactgagcaaactacaaaatcagaagaagtggcaaagaaacaactttccaaagactccatcttatctctgtatggcacaggaaccattcaacagcaaagtactcctggtgtatttatgggacccacaaatataccatttacctcacaagcaccagctgcatttcagggctttccatcgatgggcgtgcctgtgcctgcagctcctggccttataggaaatgtgatgggacagagtccaagcatgatggtgggcatgcccatgcccaatgggtttatgggaaatgcacaaactggtgtgatgccacttcctcagaacgttgttggcccccaaggaggaatggtgggacaaatgggtgcaccccagagtaagtttggcctgccgcaagctcagcagccccagtggagcctctcacagatgaatcagcagatggctggcatgagtatcagtagtgcaacccctactgcaggttttggccagccctccagcacaacagcaggatggtctggaagctcatcaggtcagactctcagcacacaactgtggaaatgaaaactgcaatacaagtttcatccagaactaccacctgacattccttgctgaaacgcatctagttcccctgtttattcatatgcatattttttttctttttacccatttgttcatattaagaatgatctgattgaccgtgttggtctgtactgattcaatttgatgtggtgaaaagcaggttgataaatcattttatgtcaagggcagctttgctcatatttcccatgatttcatgtactgcattatttgagaagctgctcaacttgcaaaatcagttttcctctcaataaaattatagctctaatgtttgcatataagggaagtagttatcatgttagtaatacctctaatagtataaaccccaccccaaaattagccagtaatcctgtaggaaggtactgtatgatcaaatgtttaatcatataaatagaatgtaaatgtctcactgagcactgttttctagtgtatcaaaatgctcttatttcatcattcacttcactgtgctgttgttatgatgtgcttaacagggaacgtgattagtgaaaggaagataaacgtggatgttactccaaaacttcgtttaatgaatgcttaaagaattcaaattttatctgcctctcttgtaatttggatctcttcttaatgtacatagtgctaacatgaagacctttttctgcactatatgcaaacagggtaactaactaaaacaaagccactttcaatcttcaatccttgaaggtatatctaggtttatgacagtaattgtgtttacattttatggtgcctagtattgacaaaatgttatttccctacattaaacatgactccatagaccttttcatttgtgggtttttatttcctatgatgtatactgccactaaccttccaaaaattacttagtattgcaaagtcaggaatcatcaggaacgtttagctgacaaaatacttgtctgttttaaaaacctgttcaagtctaccaacctgttcaagtctaccaattataagggcaaattggagaaaaagaaaaaatatatactcaagagtggtatcttgcagtatcggcactgtacaaaaaaatcttccaatttagttgttgtagagaaaacatgcagaacaaatgaagacaaaacatacattttgtaccaaccatccaattagcttatgttaactgacaagctccatttaaacagatgtccatcagatgacaagaaaggctgctgtactgaagtaaaacaaacaatacctgaatgctctgtagcctaaactccaaacatcctcttccatatggatccactggctggacaaactgcaccagttgctgcttcaatttatacctcaattttcactgtgtccaggtggtactttggctcgttggctagattaaccttctctgtccgagtgtgccacacgagaacctgaaggggaaggaaatagcttgggtagcgcactcttcatggtgacactcgaggtcgggcagcacaagtgtaatgaataccttagtgcagttatttgctttcggttccagttcttcgactgttgttatctgtttgagaaagtcagattcttgcatccctggctgggatccacgacgcttaaatacagcttttggattggacaaaatgacttgaagacttacagcaaatcctttgtgaaaaataaaaaaaaaaaagagacttt

SEQ ID NO: 182167 - DNA, 2473 bp, Homo sapiens
  Payload ID: 15875
  Gene Symbol: SMAP2
  Gene Name: small ArfGAP2
  Uniprot ID: Q8WU79
  ENST ID: ENST00000372708
  CDS Start-End: 49-1248
gaggaggaggaggagggaagtgagatggcggaaaggaaaactgcttaaatgatttttaaagggccgcgatgggcctcttggaacattggtgtgttcatctgcattcgatgtgctggaatccacaggaatctgggggtgcacatatccagggtaaagtcagttaacctcgaccagtggactcaagaacagattcagtgcatgcaagagatgggaaatggaaaggcaaaccgactttatgaagcctatcttcctgagacctttcggcgacctcagatagacccagctgttgaaggatttattcgagacaaatatgagaagaagaaatacatggaccgaagtctggacatcaatgcctttaggaaagaaaaagatgacaagtggaaaagagggagcgaaccagttccagaaaaaaaattggaacctgttgtttttgagaaggtgaaaatgccacagaaaaaagaagacccacagctacctcggaaaagctccccgaaatccacagcgcctgtcatggatttgttgggccttgatgctcctgtggcctgctccattgcaaatagtaagaccagcaataccctagagaaggatttagatctgttggcctctgttccatccccttcttcttccggttccagaaaggttgtaggttccatgccaactgcagggagtgccggctctgttcctgaaaatctgaacctgtttccggagccagggagcaaatcagaagaaataggcaagaaacagctctctaaagactccattctttcactgtatggatcccagacgcctcaaatgcctactcaagcaatgttcatggctcccgctcagatggcatatcccacagcctaccccagcttccccggggttacacctcctaacagcataatggggagcatgatgcctccaccagtaggcatggttgctcagccaggagcttctgggatggttgcccccatggccatgcctgcaggctatatgggtggcatgcaggcatcaatgatgggtgtgccgaatggaatgatgaccacccagcaggctggctacatggcaggcatggcagctatgccccagactgtgtatggggtccagccagctcagcagctgcaatggaaccttactcagatgacccagcagatggctgggatgaacttctatggagccaatggcatgatgaactatggacagtcaatgagtggcggaaatggacaggcagcaaatcagactctcagtcctcagatgtggaaataaaaacaaaacacctgtatggctgccattctcttcagccctcgctctcccctttccacagcctccacccctgacccccatcctcttttcctacctctctgtttggtttagaaattgctcaataagtcatttggggtttggcatcctgcccagccacttcccaaacatgaagacctctctgttgctttatgttgtacatgccccatagccatcccaacgtcctccccagtcctctcctggcaccagcaccttagaagttgttggcagaaggcacttaaactgtgggagaagtgtgcacacctttgagtcccttccctcaaggttaaagctcctgtcagactctcagaagggtctgtgggtgttgtatattaggcaaacaggggaaagcttagaggtccttctatatgtgttaataagctgtttctaagtgtttaaatttgaaaagcatcatgttctcatgatttatgggaatgaagcaagtactgaaatcaaattaaatactccctgggtcctgggtcagtttgaccctagccctggggtgaggcaagccccctcctatgaggatgagcaaaaatactactctcttcgccctgagttgctttctggatctggggcttcaggacttgctgcttcagtcagcctttattagcaccaaagactttatgaagatcccacacacagacacacatcccttcccgcctcccccctgccttcagtaggatctggctccgtggctggaggaccaacccctatagtgggaatgcagagcttaacgtgtactgcttgtgtgtgtgcgtgagtgtgtgtgtgtgtatgagtgtgtgttccgcctcccaccctctccccatctgctctgggtatttttgtttttgtttagttttaggtttacaacagagaggaattaatttatcagcagcctaaaactgttgtgtttttcttatggtttaaaaaacgccatgtcattgataactccctttctcccttcccttctcccggtctgctgatcactctttcatgcctgtgtatccagggtgctctgtttccccaccgttcccaggtgtacgaggcagagggccgggacagctttcctctcagtcattgttcaccccacttgaaaattcagacaagaaaactttgcttaaaagatttcatgtgtgggaaccacagttcctggctgcctttctcctgtgtatgtgtaaattccttaataaatattgcagggaaggac

SEQ ID NO: 182168 - DNA, 2939 bp, Homo sapiens
  Payload ID: 15875
  Gene Symbol: SMAP2
  Gene Name: small ArfGAP2
  Uniprot ID: Q8WU79
  ENST ID: ENST00000372718
  CDS Start-End: 425-1714
ggggaggaagagctgccggaagtaggcggtggaggtggtagcggagctgacggcagctgccagggaaaccgaggcgcgggacgcaaggccagcagacaggccggccagagggtcatctgcgtccggcacccaggaggctcgtggtccgcctttgcctgggctgagggtctctggccccgcagcctctcttggaggcgggcctgtccctaagcccgccaaggggcgccgcgccgaggggctgcggagtgggggacggacgcccccgacccgggaaggggcgtccggcggggccggaggagagggctctccccgctcaggaggtgcccctgggcgggggaccgggagtcctcaaccccggactgaggcaggggtctctgggggcgaggagggcgcgtcgccctctgcccccgccggcaccctggccatgacaggcaagtcggtgaaggacgtggatcggtaccaggctgtcctggccaacctgctgctggaggaggataacaagttttgtgcagattgccagtctaaagggccgcgatgggcctcttggaacattggtgtgttcatctgcattcgatgtgctggaatccacaggaatctgggggtgcacatatccagggtaaagtcagttaacctcgaccagtggactcaagaacagattcagtgcatgcaagagatgggaaatggaaaggcaaaccgactttatgaagcctatcttcctgagacctttcggcgacctcagatagacccagctgttgaaggatttattcgagacaaatatgagaagaagaaatacatggaccgaagtctggacatcaatgcctttaggaaagaaaaagatgacaagtggaaaagagggagcgaaccagttccagaaaaaaaattggaacctgttgtttttgagaaggtgaaaatgccacagaaaaaagaagacccacagctacctcggaaaagctccccgaaatccacagcgcctgtcatggatttgttgggccttgatgctcctgtggcctgctccattgcaaatagtaagaccagcaataccctagagaaggatttagatctgttggcctctgttccatccccttcttcttccggttccagaaaggttgtaggttccatgccaactgcagggagtgccggctctgttcctgaaaatctgaacctgtttccggagccagggagcaaatcagaagaaataggcaagaaacagctctctaaagactccattctttcactgtatggatcccagacgcctcaaatgcctactcaagcaatgttcatggctcccgctcagatggcatatcccacagcctaccccagcttccccggggttacacctcctaacagcataatggggagcatgatgcctccaccagtaggcatggttgctcagccaggagcttctgggatggttgcccccatggccatgcctgcaggctatatgggtggcatgcaggcatcaatgatgggtgtgccgaatggaatgatgaccacccagcaggctggctacatggcaggcatggcagctatgccccagactgtgtatggggtccagccagctcagcagctgcaatggaaccttactcagatgacccagcagatggctgggatgaacttctatggagccaatggcatgatgaactatggacagtcaatgagtggcggaaatggacaggcagcaaatcagactctcagtcctcagatgtggaaataaaaacaaaacacctgtatggctgccattctcttcagccctcgctctcccctttccacagcctccacccctgacccccatcctcttttcctacctctctgtttggtttagaaattgctcaataagtcatttggggtttggcatcctgcccagccacttcccaaacatgaagacctctctgttgctttatgttgtacatgccccatagccatcccaacgtcctccccagtcctctcctggcaccagcaccttagaagttgttggcagaaggcacttaaactgtgggagaagtgtgcacacctttgagtcccttccctcaaggttaaagctcctgtcagactctcagaagggtctgtgggtgttgtatattaggcaaacaggggaaagcttagaggtccttctatatgtgttaataagctgtttctaagtgtttaaatttgaaaagcatcatgttctcatgatttatgggaatgaagcaagtactgaaatcaaattaaatactccctgggtcctgggtcagtttgaccctagccctggggtgaggcaagccccctcctatgaggatgagcaaaaatactactctcttcgccctgagttgctttctggatctggggcttcaggacttgctgcttcagtcagcctttattagcaccaaagactttatgaagatcccacacacagacacacatcccttcccgcctcccccctgccttcagtaggatctggctccgtggctggaggaccaacccctatagtgggaatgcagagcttaacgtgtactgcttgtgtgtgtgcgtgagtgtgtgtgtgtgtatgagtgtgtgttccgcctcccaccctctccccatctgctctgggtatttttgtttttgtttagttttaggtttacaacagagaggaattaatttatcagcagcctaaaactgttgtgtttttcttatggtttaaaaaacgccatgtcattgataactccctttctcccttcccttctcccggtctgctgatcactctttcatgcctgtgtatccagggtgctctgtttccccaccgttcccaggtgtacgaggcagagggccgggacagctttcctctcagtcattgttcaccccacttgaaaattcagacaagaaaactttgcttaaaagatttcatgtgtgggaaccacagttcctggctgcctttctcctgtgtatgtgtaaattccttaataaatattgcagggaaggac

SEQ ID NO: 182169 - DNA, 666 bp, Homo sapiens
  Payload ID: 15875
  Gene Symbol: SMAP2
  Gene Name: small ArfGAP2
  ENST ID: ENST00000435168
  CDS Start-End: 144-666
gattccagttcattcctagctcagaaagcaacgttttgagccacaactgtcacaactccagctggtgtgcagagaagccaggttgatgccatctatcaaagttgtctcttagacctcagagccagttgaagggctgagagaggatgtggaagccaatggaacacagccagcgcaggaggcaagattttgaaatctatgggccgcgatgggcctcttggaacattggtgtgttcatctgcattcgatgtgctggaatccacaggaatctgggggtgcacatatccagggtaaagtcagttaacctcgaccagtggactcaagaacagattcagtgcatgcaagagatgggaaatggaaaggcaaaccgactttatgaagcctatcttcctgagacctttcggcgacctcagatagacccagctgttgaaggatttattcgagacaaatatgagaagaagaaatacatggaccgaagtctggacatcaatgcctttaggaaagaaaaagatgacaagtggaaaagagggagcgaaccagttccagaaaaaaaattggaacctgttgtttttgagaaggtgaaaatgccacagaaaaaagaagacccacagctacctcggaaaagctccccgaaatccacagcgcctgtcatggatttgttgggccttg

SEQ ID NO: 182170 - DNA, 2501 bp, Homo sapiens
  Payload ID: 15875
  Gene Symbol: SMAP2
  Gene Name: small ArfGAP2
  Uniprot ID: Q8WU79
  ENST ID: ENST00000539317
  CDS Start-End: 229-1278
acacaatttttccaagatcccactggtgtttctgtgtattcttccttttcagtgaatcagagaatggagggatataatgagtggaactgagggccgcgatgggcctcttggaacattggtgtgttcatctgcattcgatgtgctggaatccacaggaatctgggggtgcacatatccagggtaaagtcagttaacctcgaccagtggactcaagaacagattcagtgcatgcaagagatgggaaatggaaaggcaaaccgactttatgaagcctatcttcctgagacctttcggcgacctcagatagacccagctgttgaaggatttattcgagacaaatatgagaagaagaaatacatggaccgaagtctggacatcaatgcctttaggaaagaaaaagatgacaagtggaaaagagggagcgaaccagttccagaaaaaaaattggaacctgttgtttttgagaaggtgaaaatgccacagaaaaaagaagacccacagctacctcggaaaagctccccgaaatccacagcgcctgtcatggatttgttgggccttgatgctcctgtggcctgctccattgcaaatagtaagaccagcaataccctagagaaggatttagatctgttggcctctgttccatccccttcttcttccggttccagaaaggttgtaggttccatgccaactgcagggagtgccggctctgttcctgaaaatctgaacctgtttccggagccagggagcaaatcagaagaaataggcaagaaacagctctctaaagactccattctttcactgtatggatcccagacgcctcaaatgcctactcaagcaatgttcatggctcccgctcagatggcatatcccacagcctaccccagcttccccggggttacacctcctaacagcataatggggagcatgatgcctccaccagtaggcatggttgctcagccaggagcttctgggatggttgcccccatggccatgcctgcaggctatatgggtggcatgcaggcatcaatgatgggtgtgccgaatggaatgatgaccacccagcaggctggctacatggcaggcatggcagctatgccccagactgtgtatggggtccagccagctcagcagctgcaatggaaccttactcagatgacccagcagatggctgggatgaacttctatggagccaatggcatgatgaactatggacagtcaatgagtggcggaaatggacaggcagcaaatcagactctcagtcctcagatgtggaaataaaaacaaaacacctgtatggctgccattctcttcagccctcgctctcccctttccacagcctccacccctgacccccatcctcttttcctacctctctgtttggtttagaaattgctcaataagtcatttggggtttggcatcctgcccagccacttcccaaacatgaagacctctctgttgctttatgttgtacatgccccatagccatcccaacgtcctccccagtcctctcctggcaccagcaccttagaagttgttggcagaaggcacttaaactgtgggagaagtgtgcacacctttgagtcccttccctcaaggttaaagctcctgtcagactctcagaagggtctgtgggtgttgtatattaggcaaacaggggaaagcttagaggtccttctatatgtgttaataagctgtttctaagtgtttaaatttgaaaagcatcatgttctcatgatttatgggaatgaagcaagtactgaaatcaaattaaatactccctgggtcctgggtcagtttgaccctagccctggggtgaggcaagccccctcctatgaggatgagcaaaaatactactctcttcgccctgagttgctttctggatctggggcttcaggacttgctgcttcagtcagcctttattagcaccaaagactttatgaagatcccacacacagacacacatcccttcccgcctcccccctgccttcagtaggatctggctccgtggctggaggaccaacccctatagtgggaatgcagagcttaacgtgtactgcttgtgtgtgtgcgtgagtgtgtgtgtgtgtatgagtgtgtgttccgcctcccaccctctccccatctgctctgggtatttttgtttttgtttagttttaggtttacaacagagaggaattaatttatcagcagcctaaaactgttgtgtttttcttatggtttaaaaaacgccatgtcattgataactccctttctcccttcccttctcccggtctgctgatcactctttcatgcctgtgtatccagggtgctctgtttccccaccgttcccaggtgtacgaggcagagggccgggacagctttcctctcagtcattgttcaccccacttgaaaattcagacaagaaaactttgcttaaaagatttcatgtgtgggaaccacagttcctggctgcctttctcctgtgtatgtgtaaattccttaataaatattgcagggaagg

SEQ ID NO: 182171 - DNA, 2570 bp, Homo sapiens
  Payload ID: 15875
  Gene Symbol: SMAP2
  Gene Name: small ArfGAP2
  ENST ID: ENST00000614549
  CDS Start-End: 73-1347
acaaatgagtgagtgcagcaggagaggcagcagagcgccgtgggagttggaataggaaggagaaaaggcttcatggggaaagtgggcagagcaagatttgcacaaaaagatgttttgcaaatagaggaaataggccctgtaaagctatttgtgagagactggccgcgatgggcctcttggaacattggtgtgttcatctgcattcgatgtgctggaatccacaggaatctgggggtgcacatatccagggtaaagtcagttaacctcgaccagtggactcaagaacagattcagtgcatgcaagagatgggaaatggaaaggcaaaccgactttatgaagcctatcttcctgagacctttcggcgacctcagatagacccagctgttgaaggatttattcgagacaaatatgagaagaagaaatacatggaccgaagtctggacatcaatgcctttaggaaagaaaaagatgacaagtggaaaagagggagcgaaccagttccagaaaaaaaattggaacctgttgtttttgagaaggtgaaaatgccacagaaaaaagaagacccacagctacctcggaaaagctccccgaaatccacagcgcctgtcatggatttgttgggccttgatgctcctgtggcctgctccattgcaaatagtaagaccagcaataccctagagaaggatttagatctgttggcctctgttccatccccttcttcttccggttccagaaaggttgtaggttccatgccaactgcagggagtgccggctctgttcctgaaaatctgaacctgtttccggagccagggagcaaatcagaagaaataggcaagaaacagctctctaaagactccattctttcactgtatggatcccagacgcctcaaatgcctactcaagcaatgttcatggctcccgctcagatggcatatcccacagcctaccccagcttccccggggttacacctcctaacagcataatggggagcatgatgcctccaccagtaggcatggttgctcagccaggagcttctgggatggttgcccccatggccatgcctgcaggctatatgggtggcatgcaggcatcaatgatgggtgtgccgaatggaatgatgaccacccagcaggctggctacatggcaggcatggcagctatgccccagactgtgtatggggtccagccagctcagcagctgcaatggaaccttactcagatgacccagcagatggctgggatgaacttctatggagccaatggcatgatgaactatggacagtcaatgagtggcggaaatggacaggcagcaaatcagactctcagtcctcagatgtggaaataaaaacaaaacacctgtatggctgccattctcttcagccctcgctctcccctttccacagcctccacccctgacccccatcctcttttcctacctctctgtttggtttagaaattgctcaataagtcatttggggtttggcatcctgcccagccacttcccaaacatgaagacctctctgttgctttatgttgtacatgccccatagccatcccaacgtcctccccagtcctctcctggcaccagcaccttagaagttgttggcagaaggcacttaaactgtgggagaagtgtgcacacctttgagtcccttccctcaaggttaaagctcctgtcagactctcagaagggtctgtgggtgttgtatattaggcaaacaggggaaagcttagaggtccttctatatgtgttaataagctgtttctaagtgtttaaatttgaaaagcatcatgttctcatgatttatgggaatgaagcaagtactgaaatcaaattaaatactccctgggtcctgggtcagtttgaccctagccctggggtgaggcaagccccctcctatgaggatgagcaaaaatactactctcttcgccctgagttgctttctggatctggggcttcaggacttgctgcttcagtcagcctttattagcaccaaagactttatgaagatcccacacacagacacacatcccttcccgcctcccccctgccttcagtaggatctggctccgtggctggaggaccaacccctatagtgggaatgcagagcttaacgtgtactgcttgtgtgtgtgcgtgagtgtgtgtgtgtgtatgagtgtgtgttccgcctcccaccctctccccatctgctctgggtatttttgtttttgtttagttttaggtttacaacagagaggaattaatttatcagcagcctaaaactgttgtgtttttcttatggtttaaaaaacgccatgtcattgataactccctttctcccttcccttctcccggtctgctgatcactctttcatgcctgtgtatccagggtgctctgtttccccaccgttcccaggtgtacgaggcagagggccgggacagctttcctctcagtcattgttcaccccacttgaaaattcagacaagaaaactttgcttaaaagatttcatgtgtgggaaccacagttcctggctgcctttctcctgtgtatgtgtaaattccttaataaatattgcagggaagg

SEQ ID NO: 182172 - DNA, 1045 bp, Homo sapiens
  Payload ID: 15876
  Gene Symbol: SMAGP
  Gene Name: small cell adhesion glycoprotein
  ENST ID: ENST00000380103
  CDS Start-End: 43-156
acagatctgcctcttctccaagaaactcaaccactagtgacaatgaccagcctcctgactactccttctccaagagggtctcactctgtcacccagactagagtacagtggcacaatcacagctcactgcagcctggacctcctgggctccagtgatcctctcacctcaagtttaccgagtagctgggactacagaagaactgatgaccaccccaattttacagcccactgaggccctgtccccagaagatggagccagcacagcactcattgcagttgttatcaccgttgtcttcctcaccctgctctcggtcgtgatcttgatcttcttttacctgtacaagaacaaaggcagctacgtcacctatgaacctacagaaggtgagcccagtgccatcgtccagatggagagtgacttggccaagggcagcgagaaagaggaatatttcatctaatgactcccaggccccaaggagcttattcctggctccatcgctaacacgttgactgcttattatgggaaagttttctctgaagccagggagaagcattgattgatgtgggcaaatccaagctccagccaggtcgcagtcccaaatgccgacatcactgactccagggaccagggacatggagaaagctgtttatgatatctttaaccaggccctcttactagagctggtgtttgtgactggccaacaagatgtggctatgccaggggacatctgagtatgtgcccagtcatcttttttcacaggttgaagggagagaaaagattttgagttaaggtcattggctgctctactctgtcccctacctggtcacctagtgatagccccagtggagatactgtccatacaaggtcttcccagaggctggataccacagtaaaaggccaggccaggaggggtaggagactatggagatcttacctcctgataaatgtgctacaccccctaatctgagcccttcctttccgtgttccccaacaacctcatgcttacgtgatttttattcaaattaaaaattttcattgctacagaaa

SEQ ID NO: 182173 - DNA, 1062 bp, Homo sapiens
  Payload ID: 15876
  Gene Symbol: SMAGP
  Gene Name: small cell adhesion glycoprotein
  Uniprot ID: Q0VAQ4
  ENST ID: ENST00000398453
  CDS Start-End: 179-472
gccacctcggccgtggcaggaaccgaaacccggagcggccgaagctcagcgctccgctggggcagagggtcgcggcggctgggaacgccgctccccgacgcaccggccgcccccagcgcagcgcgctccgcggggtgctgatctgcctcttctccaagaaactcaaccactagtgacaatgaccagcctcctgactactccttctccaagagaagaactgatgaccaccccaattttacagcccactgaggccctgtccccagaagatggagccagcacagcactcattgcagttgttatcaccgttgtcttcctcaccctgctctcggtcgtgatcttgatcttcttttacctgtacaagaacaaaggcagctacgtcacctatgaacctacagaaggtgagcccagtgccatcgtccagatggagagtgacttggccaagggcagcgagaaagaggaatatttcatctaatgactcccaggccccaaggagcttattcctggctccatcgctaacacgttgactgcttattatgggaaagttttctctgaagccagggagaagcattgattgatgtgggcaaatccaagctccagccaggtcgcagtcccaaatgccgacatcactgactccagggaccagggacatggagaaagctgtttatgatatctttaaccaggccctcttactagagctggtgtttgtgactggccaacaagatgtggctatgccaggggacatctgagtatgtgcccagtcatcttttttcacaggttgaagggagagaaaagattttgagttaaggtcattggctgctctactctgtcccctacctggtcacctagtgatagccccagtggagatactgtccatacaaggtcttcccagaggctggataccacagtaaaaggccaggccaggaggggtaggagactatggagatcttacctcctgataaatgtgctacaccccctaatctgagcccttcctttccgtgttccccaacaacctcatgcttacgtgatttttattcaaattaaaaattttcattgctacagaaa

SEQ ID NO: 182174 - DNA, 610 bp, Homo sapiens
  Payload ID: 15876
  Gene Symbol: SMAGP
  Gene Name: small cell adhesion glycoprotein
  ENST ID: ENST00000605426
  CDS Start-End: 461-610
gaggatctccggggcgcggggcgcgggctggggcccagtgaggcttggcaggctgtgcgcggaccgcgccctggacggcgaaagcaggcccggagggggcggccagtccggcgtcccagcgtccgaggcgagccagaaggcggcccacggccgtcgcctcccggtcccggcccggctactgcgctgcgcccactccgctctggagcctgggcgcgggtcctgaccttcccggccctctcctgacacctggtggatggcgtcaccagaactcctagctgtggaaccctagggtacctgttaccgcgctttggcgaaactgggttcgctgctgatttgcgaacctttgcctgactttctcaggccttgagagatctaagtaaatttggtggcccattgaaaggacctggagagagcgtatgaagatctgcctcttctccaagaaactcaaccactagtgacaatgaccagcctcctgactactccttctccaagagaagaactgatgaccaccccaattttacagcccactgaggccctgtccccagaagatggagccagcacagcactcattgcagttgttatcaccgttgtcttcctcaccctgctctcg

SEQ ID NO: 182175 - DNA, 816 bp, Homo sapiens
  Payload ID: 15876
  Gene Symbol: SMAGP
  Gene Name: small cell adhesion glycoprotein
  ENST ID: ENST00000603838
  CDS Start-End: 415-543
ggcaggctgtgcgcggaccgcgccctggacggcgaaagcaggcccggagggggcggccagtccggcgtcccagcgtccgaggcgagccagaaggcggcccacggccgtcgcctcccggtcccggcccggctactgcgctgcgcccactccgctctggagcctgggcgcgggtcctgaccttcccggccctctcctgacacctggtggatggcgtcaccagaactcctagctgtggaaccctagggtacctgttaccgcgctttggcgaaactgggttcgctgctgatttgcgaacctttgcctgactttctcaggccttgagagatctaagtaaatttggtggcccattgaaaggacctggagagagcgtatgaagatctgcctcttctccaagaaactcaaccactagtgacaatgaccagcctcctgactactccttctccaagagaagaactgatgaccaccccaattttacagcccactgaggccctgtccccagaagatggagccagcacagcactcattgcaggtaatagactctgagccaactccaagggaccttctggatcaagggcatctctctccagagggagcctgaccaaatccattaatgggctcactctggcttgtaagttatattacacacacacacacacacacacacacacacacacagccataaaagactcggaggcttctgtcagaggcactaccagtaaatgacaggttgggaggtggccgcaaatagatatgcatacggacgttacacttgagtacgtgggtagggacgaggatatatgtggttggttgagtggg

SEQ ID NO: 182176 - DNA, 1518 bp, Homo sapiens
  Payload ID: 15876
  Gene Symbol: SMAGP
  Gene Name: small cell adhesion glycoprotein
  Uniprot ID: Q0VAQ4
  ENST ID: ENST00000603864
  CDS Start-End: 672-965
cggggcgcggggcgcgggctggggcccagtgaggcttggcaggctgtgcgcggaccgcgccctggacggcgaaagcaggcccggagggggcggccagtccggcgtcccagcgtccgaggcgagccagaaggcggcccacggccgtcgcctcccggtcccggcccggctactgcgctgcgcccactccgctctggagcctgggcgcgggtcctgaccttcccggccctctcctgacacctggtggatggcgtcaccagaactcctagctgtggaaccctagggtacctgttaccgcgctttggcgaaactgggttcgctgctgatttgcgaacctttgcctgactttctcaggccttgagagatctaagtaaatttggtggcccattgaaaggacctggagagagcgtatgaaggtaacaccccgtcaaactgcatgcggcctcagacctgctcctgtggagagctgttggtacctggagcctgaggagatattcagggaaaccagaagaggacaagagaaaaaggggaagggacttgggagaacctggcaccagaggctttcctgggacttccaggactcaaagccataggggcccacccgctacattcctgtctttgcccctcttcctacagatctgcctcttctccaagaaactcaaccactagtgacaatgaccagcctcctgactactccttctccaagagaagaactgatgaccaccccaattttacagcccactgaggccctgtccccagaagatggagccagcacagcactcattgcagttgttatcaccgttgtcttcctcaccctgctctcggtcgtgatcttgatcttcttttacctgtacaagaacaaaggcagctacgtcacctatgaacctacagaaggtgagcccagtgccatcgtccagatggagagtgacttggccaagggcagcgagaaagaggaatatttcatctaatgactcccaggccccaaggagcttattcctggctccatcgctaacacgttgactgcttattatgggaaagttttctctgaagccagggagaagcattgattgatgtgggcaaatccaagctccagccaggtcgcagtcccaaatgccgacatcactgactccagggaccagggacatggagaaagctgtttatgatatctttaaccaggccctcttactagagctggtgtttgtgactggccaacaagatgtggctatgccaggggacatctgagtatgtgcccagtcatcttttttcacaggttgaagggagagaaaagattttgagttaaggtcattggctgctctactctgtcccctacctggtcacctagtgatagccccagtggagatactgtccatacaaggtcttcccagaggctggataccacagtaaaaggccaggccaggaggggtaggagactatggagatcttacctcctgataaatgtgctacaccccctaatctgagcccttcctttccgtgttccccaacaacctcatgcttacgtga

SEQ ID NO: 182177 - DNA, 433 bp, Homo sapiens
  Payload ID: 15876
  Gene Symbol: SMAGP
  Gene Name: small cell adhesion glycoprotein
  ENST ID: ENST00000604188
  CDS Start-End: 165-293
ggcaggaaccgaaacccggagcggccgaagctcagcgctccgctggggcagagggtcgcggcggctgggaacgccgctccccgacgcaccggccgcccccagcgcagcgcgctccgcggggtgctgatctgcctcttctccaagaaactcaaccactagtgacaatgaccagcctcctgactactccttctccaagagaagaactgatgaccaccccaattttacagcccactgaggccctgtccccagaagatggagccagcacagcactcattgcaggtaatagactctgagccaactccaagggaccttctggatcaagggcatctctctccagagggagcctgaccaaatccattaatgggctcactctggcttgtaagttatattacacacacacacacacacacacacacacacacacagccataaa

SEQ ID NO: 182178 - DNA, 2350 bp, Homo sapiens
  Payload ID: 15876
  Gene Symbol: SMAGP
  Gene Name: small cell adhesion glycoprotein
  Uniprot ID: Q0VAQ4
  ENST ID: ENST00000603798
  CDS Start-End: 674-967
gtttgaatccaaagtccacggcactcctaaccgctgctcaacgctgccccacaagaacgtccagctggcaagacccgggtggggctcgttgctctccccgcttcacctccctgcttcacggccgggggtgtgctggctaagttcgctcatctgccaagcttcaggacacagacctatgtgagcaagcgataaacaaatgcaaataaatgtaactttccacattagctaaaaattcagagaacgtcaagcccagggaaatgggacggatcccagttagcccgcggctccaatctggtccccccccaaccccgagcctcgcggcgagaaaggaagcggctccggatggagagtaaagtgacaatcggagaagggcaggctgcctttcctcccgggggagccaaggggacctgcagagggcggtttctctccgcttttcctgtcccaccccgtcggcctgccccccaccccctccggcctctgcgccaaccccgcgcgccacccgcggcttcctccgctcggggtcctcgttcggcctctgctggcctccgcgactccgcggtgcccgcccccgttgagttcaaaaggacgcgcggagcggcgccggcccttcaccagcagcccgtccgactggaaagatctgcctcttctccaagaaactcaaccactagtgacaatgaccagcctcctgactactccttctccaagagaagaactgatgaccaccccaattttacagcccactgaggccctgtccccagaagatggagccagcacagcactcattgcagttgttatcaccgttgtcttcctcaccctgctctcggtcgtgatcttgatcttcttttacctgtacaagaacaaaggcagctacgtcacctatgaacctacagaaggtgagcccagtgccatcgtccagatggagagtgacttggccaagggcagcgagaaagaggaatatttcatctaatgactcccaggccccaaggagcttattcctggctccatcgctaacacgttgactgcttattatgggaaagttttctctgaagccagggagaagcattgattgatgtgggcaaatccaagctccagccaggtcgcagtcccaaatgccgacatcactgactccagggaccagggacatggagaaagctgtttatgatatctttaaccaggccctcttactagagctggtgtttgtgactggccaacaagatgtggctatgccaggggacatctgagtatgtgcccagtcatcttttttcacaggttgaagggagagaaaagattttgagttaaggtcattggctgctctactctgtcccctacctggtcacctagtgatagccccagtggagatactgtccatacaaggtcttcccagaggctggataccacagtaaaaggccaggccaggaggggtaggagactatggagatcttacctcctgataaatgtgctacaccccctaatctgagcccttcctttccgtgttccccaacaacctcatgcttacgtgatttttattcaaattaaaaattttcattgctacagaaatcagattctcatgtgcaagaagtaactacattttgacttatttttgcttaaacatttttgacattttcttttccctatttaacgcctttacatatgttctcttccaagcaataagaaccctaggaaagttctagaagtttgcagaactatctcagggatttgagacaaagatggtgcaggaaagcttgttccaggggaacatcattagaaacataccctgggagggccgggttcggtggctcacgcctgtgatcccagcactttgggaggccgaggcaggcggatcacaaggttaggagatcgagaccatcctggctaacacggtgaaaccccgtctctactaaaaatatataaaaaaaatagctgggcgtggtggcgggcgcccatagtcccagctgcttgggaggctgaggcaggagaatggcttgaacccaggaggcggagcttgcagtgagctgagattgcaccactatactccagcctgggcaacagagtgagactccgtctcaaaaaaaaaaaaaaaaaaaaaagtaccctgggagatgagttggttcaagcctccatcctggcaagggccagaatttcccagaatcccttctacatatatacagaaggaaccagaaaaaatcaacctaccacctttcccagtgtatcctcagaatcaagccaagaagcttcttggattttagtctcaagataagttgtgtttaaaaggcacattttggtataaattattagctcatcagatattgttcactttggaattaaagctagatctcctttgaagtcttaa

SEQ ID NO: 182179 - DNA, 577 bp, Homo sapiens
  Payload ID: 15876
  Gene Symbol: SMAGP
  Gene Name: small cell adhesion glycoprotein
  ENST ID: ENST00000605627
  CDS Start-End: 130-381
cttcaccagcagcccgtccgactggaaagatctgcctcttctccaagaaactcaaccactagtgacaatgaccagcctcctgactactccttctccaagagaatttccttcctctttaaggaagaactgatgaccaccccaattttacagcccactgaggccctgtccccagaagatggagccagcacagcactcattgcagttgttatcaccgttgtcttcctcaccctgctctcggtcgtgatcttgatcttcttttacctgtacaagaacaaaggcagctacgtcacctatgaacctacagaaggtgagcccagtgccatcgtccagatggagagtgacttggccaagggcagcgagaaagaggaatatttcatctaatgactcccaggccccaaggagcttattcctggctccatcgctaacacgttgactgcttattatgggaaagttttctctgaagccagggagaagcattgattgatgtgggcaaatccaagctccagccaggtcgcagtcccaaatgccgacatcactgactccagggaccagggacatggagaaagctgtttatgat

SEQ ID NO: 182180 - DNA, 963 bp, Homo sapiens
  Payload ID: 15877
  Gene Symbol: SERF1A
  Gene Name: small EDRK-rich factor 1A (telomeric)
  Uniprot ID: O75920
  ENST ID: ENST00000317633
  CDS Start-End: 206-394
gcgcagtgacgcgccggccatgccggcggctgttgtcgggcctccagcgggcggggccgttggcggagcagaggggaggcgcagccgggcggagggcccacgagggctcagccttcccggtcagcggtggtgacggtatcccagagtgccagagaaccgttgcttttccgagttgctcttcttccaggctccgttggtggtcggcatggcccgtggaaatcaacgagaacttgcccgccagaaaaacatgaagaaaacccaggaaattagcaagggaaagaggaaagaggatagcttgactgcctctcagagaaagcagagggactctgagatcatgcaagaaaagcagaaggcagctaatgagaagaagtctatgcagacaagagaaaagtgatgactggctatttggaaaacctgggtgctactgccaactgggtgtatcataagctctaagatcaagattttgtagagtggacagtcattacatatgttataacttatcctttaaaaactattttaaactttatcctttcagctttacttagtgcgatgttttagaagcagtcttcaaagaataaaacactaaccatgcatgtgacatattggtgaacattatttttattattgaacattcatatataatttattaggtaatatgatcagataataggatctcttatataataaagaatctttgtcatcagctttgttaacatagtttttttttcctcacagtttctaaggataaggataaaatagatctttgaagtaaacttaaatatataatagaagttagggtccatttgtataattttgctttgaaatcaagttaaagggccaggtgcggtggcttatgcccacaatcccagcactttgggaggccgaggcgggcggatcacttgaggtcaggagtttgagaccagcctgaccaacatgatgaaacctcatctttactaaaaatac

SEQ ID NO: 182181 - DNA, 1889 bp, Homo sapiens
  Payload ID: 15877
  Gene Symbol: SERF1A
  Gene Name: small EDRK-rich factor 1A (telomeric)
  Uniprot ID: O75920
  ENST ID: ENST00000354833
  CDS Start-End: 184-516
ccggcggctgttgtcgggcctccagcgggcggggccgttggcggagcagaggggaggcgcagccgggcggagggcccacgagggctcagccttcccggtcagcggtggtgacggtatcccagagtgccagagaaccgttgcttttccgagttgctcttcttccaggctccgttggtggtcggcatggcccgtggaaatcaacgagaacttgcccgccagaaaaacatgaagaaaacccaggaaattagcaagggaaagaggaaagaggatagcttgactgcctctcagagaaagcagagttctggaggccagaaatctgagagcaagatgtcagctgggccacacctccctctgaaggctccaagggagaatccttgctttcctcttccagctgctggtggctccaggtattacttggcttatggcagcataactcctatctctgcctttgtctttgtggtcttcttttctgtcttcttcccttctttttatgaggacttttgctgttggatttaggttccattctaacctaggatgatctcatttggaaatccttaatttcatctacaaaaactgttttcccaaataggtcacattcacgcatatcagatggacagatgtatcattttggggtccaccattcaacccactacaaggagttttttaaacaaaaataggaaacttagatgtaacttagcactttttttttttttttttgagatggagtctcactctgtcaccagactggagtgcagtggtgccatctcagctccatgcaacctctgcctcctgggttcaagcagttctcttgcctcagcctcctgggtagctgggattacaggcacgcgctgccacacccaggtaatttatttattttttttttgagacagagtctcgcactgttgcccaggctggactgcagtggcgtgatctctgctcactgcaacctccgcctcccgggttcaagcgattctccagcctcagcttcctgagtagatgggattacaggcgcctgccaccacgcccagctaattttttgtattcttagtagagatggggtttcaccatgttggccaggctggtctccatctcctgacctcgtgattcacccgcctcggcctcccaaagtgctgggattacaggcgtgagtcacagcccccggccataatttagcactttaaaaaataatagccatgttgggccaggcgtggtggctcatgcctgtaatctgagcactttgggagaccaaggcgggtagatcccttgtgcccaggagttcaagaccagcctgggcaacatggcgaaaccccatttctactaaaaatacaaaaattagctggggcgaggggataggccgagttccgggtgtaagggggccattagggagagcagagcgaggcagctgatcttccggattgggggccttgcccggaagctggacctcacggagatgaaacggaagatgcacgaggatatgatctccatacagaactttctcatctacgtggccctgctgcgagtcactccatttatcttaaagaaattggacagcatatgaagattggacatcacatgtgaatgcatgatatgaagagcctggttacagtttctactgttctctgcaagtaaataggcccagaaaggtataagagactctttgaatggacataaaaattctgcttgttaagaacaagttgagctctggtaactgatcttaatagctaaaatataaaaatatttgggaagtctgaaatgaggtctcctggccctggtgtgcccttaatgcctgtgacagttggcctctgtgaatattggtataattgtaaataatgtcaaactccattttctagcaagtattaataattaagggaagtatgtctgaaatggca

SEQ ID NO: 182182 - DNA, 1693 bp, Homo sapiens
  Payload ID: 15877
  Gene Symbol: SERF1A
  Gene Name: small EDRK-rich factor 1A (telomeric)
  ENST ID: ENST00000513436
  CDS Start-End: 107-352
acgagggctcagccttcccggtcagcggtggtgacggtatcccagagtgccagagaaccgttgcttttccgagttgctcttcttccaggctccgttggtggtcggcatggcccgtggaaatcaacgagaacttgcccgccagaaaaacatgaagaaaacccaggaaattagcaagggaaagaggaaagaggatagcttgactgcctctcagagaaagcagagttctggaggccagaaatctgagagcaagatgtcagctgggccacacctccctctgaaggctccaagggagaatccttgctttcctcttccagctgctggtggctccaggttccattctaacctaggatgatctcatttggaaatccttaatttcatctacaaaaactgttttcccaaataggtcacattcacgcatatcagatggacagatgtatcattttggggtccaccattcaacccactacaaggagttttttaaacaaaaataggaaacttagatgtaacttagcactttttttttttttttttgagatggagtctcactctgtcaccagactggagtgcagtggtgccatctcagctccatgcaacctctgcctcctgggttcaagcagttctcttgcctcagcctcctgggtagctgggattacaggcacgcgctgccacacccaggtaatttatttattttttttttgagacagagtctcgcactgttgcccaggctggactgcagtggcgtgatctctgctcactgcaacctccgcctcccgggttcaagcgattctccagcctcagcttcctgagtagatgggattacaggcgcctgccaccacgcccagctaattttttgtattcttagtagagatggggtttcaccatgttggccaggctggtctccatctcctgacctcgtgattcacccgcctcggcctcccaaagtgctgggattacaggcgtgagtcacagcccccggccataatttagcactttaaaaaataatagccatgttgggccaggcgtggtggctcatgcctgtaatctgagcactttgggagaccaaggcgggtagatcccttgtgcccaggagttcaagaccagcctgggcaacatggcgaaaccccatttctactaaaaatacaaaaattagctggggcgaggggataggccgagttccgggtgtaagggggccattagggagagcagagcgaggcagctgatcttccggattgggggccttgcccggaagctggacctcacggagatgaaacggaagatgcacgaggatatgatctccatacagaactttctcatctacgtggccctgctgcgagtcactccatttatcttaaagaaattggacagcatatgaagattggacatcacatgtgaatgcatgatatgaagagcctggttacagtttctactgttctctgcaagtaaataggcccagaaaggtataagagactctttgaatggacataaaaattctgcttgttaagaacaagttgagctctggtaactgatcttaatagctaaaatataaaaatatttgggaagtctgaaatgaggtctcctggccctggtgtgcccttaatgcctgtgacagttggcctctgtgaatattggtataattgtaaataatgtcaaactccattttctagcaagtattaataattaagggaagtatgtc

SEQ ID NO: 182183 - DNA, 569 bp, Homo sapiens
  Payload ID: 15877
  Gene Symbol: SERF1A
  Gene Name: small EDRK-rich factor 1A (telomeric)
  ENST ID: ENST00000504458
  CDS Start-End: 97-324
agccttcccggtcagcggtggtgacggtatcccagagtgccagagaaccgttgcttttccgagttgctcttcttccaggctccgttggtggtcggcatggcccgtggaaatcaacgagaacttgcccgccagaaaaacatgaagaaaacccaggaaattagcaagggaaagaggaaagaggatagcttgactgcctctcagagaaagcagagatatggcgtcttactctgtgacccagactggagtgcagtgccacagtctcggttcactgcaagctctgcctcccaggctcaagtgaccctcccacctcagccttctgagtagctgggactacaagggcacaccaccaagcccagatagtttttatattttttgtagaaacggggtttcatcatgttgtccaggcaggtcttgaacttctggggtcaagtgatttgcccacctcagtcccccaaagtgctggaattacaggtgtgagccactatgcccggccctaacatttattattaaagtgataagctttgtcttcaatttctgttgactcacattagagtaaaaatgaacatggt

SEQ ID NO: 182184 - DNA, 663 bp, Homo sapiens
  Payload ID: 15877
  Gene Symbol: SERF1A
  Gene Name: small EDRK-rich factor 1A (telomeric)
  ENST ID: ENST00000507348
  CDS Start-End: 208-354
gtcgcgcagtgcggggatccccgcttcagtcggcagagagagagctcgcgggtggttccggtccggcttttcaggccggacgggtgcctgcccctcaggtgcgagtttgtgcggtaaagaacacaccccggagatgtggacacggccgccccaggagggtccttgtttggaggtggaaatcaacgagaacttgcccgccagaaaaacatgaagaaaacccaggaaattagcaagggaaagaggaaagaggatagcttgactgcctctcagagaaagcagagggactctgagatcatgcaagaaaagcagaaggcagctaatgagaagaagtctatgcagacaagagaaaagtgatgactggctatttggaaaacctgggtgctactgccaactgggtgtatcataagctctaagatcaagattttgtagagtggacagtcattacatatgttataacttatcctttaaaaactattttaaactttatcctttcagctttacttagtgcgatgttttagaagcagtcttcaaagaataaaacactaaccatgcatgtgacatattggtgaacattatttttattattgaacattcatatataatttattaggtaatatgatcagataataggatctcttatataataaagaatctttgtcatca

SEQ ID NO: 182185 - DNA, 328 bp, Homo sapiens
  Payload ID: 15877
  Gene Symbol: SERF1A
  Gene Name: small EDRK-rich factor 1A (telomeric)
  ENST ID: ENST00000511162
  CDS Start-End: 267-328
agtgacgcgccggccatgccggcggctgttgtcgggcctccagcgggcggggccgttggcggagcagaggggaggcgcagccgggcggagggcccacgagggctcagccttcccggtcagcggtggtgacggtatcccagagtgccagagaaccgttgcttttccgagttgctcttcttccaggctccgttggtggtcggcatggcccagcatgactgtttgactttgtaggtggaaatcaacgagaacttgcccgccagaaaaacatgaagaaaacccaggaaattagcaagggaaagaggaaagaggatagcttgactgcctctca

SEQ ID NO: 182186 - DNA, 532 bp, Homo sapiens
  Payload ID: 15877
  Gene Symbol: SERF1A
  Gene Name: small EDRK-rich factor 1A (telomeric)
  ENST ID: ENST00000512868
  CDS Start-End: 265-532
gcgcagtgcggggatccccgcttcagtcggcagagagagagctcgcgggtggttccggtccggcttttcaggccggacgggtgcctgcccctcaggtgcgagtttgtgcggtaaagaacacaccccggagatgtggacacggccgccccaggagggtccttgtttggagacttaccttcaatctgttcagtctccatccacccctctccgcctctgcatggggataaaggtggaaatcaacgagaacttgcccgccagaaaaacatgaagaaaacccaggaaattagcaagggaaagaggaaagaggatagcttgactgcctctcagagaaagcagagttctggaggccagaaatctgagagcaagatgtcagctgggccacacctccctctgaaggctccaagggagaatccttgctttcctcttccagctgctggtggctccaggtattacttggcttatggcagcataactcctatctctgcctttgtctttgtggtcttcttttctgtcttcttcccttctttttatg

SEQ ID NO: 182187 - DNA, 846 bp, Homo sapiens
  Payload ID: 15877
  Gene Symbol: SERF1A
  Gene Name: small EDRK-rich factor 1A (telomeric)
  ENST ID: ENST00000512649
  CDS Start-End: 192-482
atccccgcttcagtcggcagagagagagctcgcgggtggttccggtccggcttttcaggccggacgggtgcctgcccctcaggtgcgagtttgtgcggtaaagaacacaccccggagatgtggacacggccgccccaggagggtccttgtttggaggtggaaatcaacgagaacttgcccgccagaaaaacatgaagaaaacccaggaaattagcaagggaaagaggaaagaggatagcttgactgcctctcagagaaagcagagttctggaggccagaaatctgagagcaagatgtcagctgggccacacctccctctgaaggctccaagggagaatccttgctttcctcttccagctgctggtggctccaggtattacttggcttatggcagcataactcctatctctgcctttgtctttgtggtcttcttttctgtcttcttcccttctttttatgaggacttttgctgttggatttaggttccattctaacctaggatgatctcatttggaaatccttaatttcatctacaaaaactgttttcccaaataggtcacattcacgcatatcagatggacagatgtatcattttggggtccaccattcaacccactacaaggagttttttaaacaaaaataggaaacttagatgtaacttagcactttttttttttttttttgagatggagtctcactctgtcaccagactggagtgcagtggtgccatctcagctccatgcaacctctgcctcctgggttcaagcagttctcttgcctcagcctcctgggtagctgggattacaggcacgcgctgccacacccaggtaatttatttattttttt

SEQ ID NO: 182188 - DNA, 1889 bp, Homo sapiens
  Payload ID: 15877
  Gene Symbol: SERF1A
  Gene Name: small EDRK-rich factor 1A (telomeric)
  Uniprot ID: O75920
  ENST ID: ENST00000614527
  CDS Start-End: 184-516
ccggcggctgttgtcgggcctccagcgggcggggccgttggcggagcagagcggaggcgcagccgggcggagggcccacgagggctcagccttcccggtcagcggtggtgacggtatcccagagtgccagagaaccgttgcttttccgagttgctcttcttccaggctccgttggtggtcggcatggcccgtggaaatcaacgagaacttgcccgccagaaaaacatgaagaaaacccaggaaattagcaagggaaagaggaaagaggatagcttgactgcctctcagagaaagcagagttctggaggccagaaatctgagagcaagatgtcagctgggccacacctccctctgaaggctccaagggagaatccttgctttcctcttccagctgctggtggctccaggtattacttggcttatggcagcataactcctatctctgcctttgtctttgtggtcttcttttctgtcttcttcccttctttttatgaggacttttgctgttggatttaggttccattctaacctaggatgatctcatttggaaatccttaatttcatctacaaaaactgttttcccaaataggtcacattcacgcatatcagatggacagatgtatcattttggggtccaccattcaacccactacaaggagttttttaaacaaaaataggaaacttagatgtaacttagcactttttttttttttttttgagatggagtctcactctgtcaccagactggagtgcagtggcgccatctcagctccatgcaacctctgcctcctgggttcaagcagttctcttgcctcagcctcctgggtagctgggattacaggcacgcgctgccacacccaggtaatttatttattttttttttgagacagagtctcgcactgttgcccaggctggactgcagtggcgtgatctctgctcactgcaacctccgcctcccgggttcaagcgattctccagcctcagcttcctgagtagatgggattacaggcgcctgccaccacgcccagctaattttttgtattcttagtagagatggggtttcaccatgttggccaggctggtctccatctcctgacctcgtgattcacccgcctcggcctcccaaagtgctgggattacaggcgtgagtcacagcccccggccataatttagcactttaaaaaataatagccatgttgggccaggcgtggtggctcatgcctgtaatctgagcactttgggagaccaaggcgggtagatcccttgtgcccaggagttcaagaccagcctgggcaacatggcgaaaccccatttctactaaaaatacaaaaattagctggggcgaggggataggccgagttccgggtgtaagggggccattagggagagcagagcgaggcagctgatcttccggattgggggccttgcccggaagctggacctcacggagatgaaacggaagatgcacgaggatatgatctccatacagaactttctcatctacgtggccctgctgcgagtcactccatttatcttaaagaaattggacagcatatgaagattggacatcacatgtgaatgcatgatatgaagagcctggttacagtttctactgttctctgcaagtaaataggcccagaaaggtataagagactctttgaatggacataaaaattctgcttgttaagaacaagttgagctctggtaactgatcttaatagctaaaatataaaaatatttgggaagtctgaaatgaggtctcctggccctggtgtgcccttaatgcctgtgacagttggcctctgtgaatattggtataattgtaaataatgtcaaactccattttctagcaagtattaataattaagggaagtatgtctgaaatggca

SEQ ID NO: 182189 - DNA, 632 bp, Homo sapiens
  Payload ID: 15877
  Gene Symbol: SERF1A
  Gene Name: small EDRK-rich factor 1A (telomeric)
  ENST ID: ENST00000614310
  CDS Start-End: 179-325
agatctaggagcaccatcaatctgttactctgctagtttatctatgaaaacacaaactaaagatgcatttaaataaggcctgtttattggaattattaataattttggagatgggaaaagagcatgactgtttgactttgtaggtggaaatcaacgagaacttgcccgccagaaaaacatgaagaaaacccaggaaattagcaagggaaagaggaaagaggatagcttgactgcctctcagagaaagcagagggactctgagatcatgcaagaaaagcagaaggcagctaatgagaagaagtctatgcagacaagagaaaagtgatgactggctatttggaaaacctgggtgctactgccaactgggtgtatcataagctctaagatcaagattttgtagagtggacagtcattacatatgttataacttatcctttaaaaactattttaaactttatcctttcagctttacttagtgcgatgttttagaagcagtcttcaaagaataaaacactaaccatgcatgtgacatattggtgaacattatttttattattgaacattcatatataatttattaggtaatatgatcagataataggatctcttatataataaagaatctttgtcat

SEQ ID NO: 182190 - DNA, 569 bp, Homo sapiens; identical to SEQ ID NO: 182183
  Payload ID: 15877
  Gene Symbol: SERF1A
  Gene Name: small EDRK-rich factor 1A (telomeric)
  ENST ID: ENST00000628888
  CDS Start-End: 97-324

SEQ ID NO: 182191 - DNA, 663 bp, Homo sapiens; identical to SEQ ID NO: 182184
  Payload ID: 15877
  Gene Symbol: SERF1A
  Gene Name: small EDRK-rich factor 1A (telomeric)
  ENST ID: ENST00000630603
  CDS Start-End: 208-354

SEQ ID NO: 182192 - DNA, 532 bp, Homo sapiens; identical to SEQ ID NO: 182186
  Payload ID: 15877
  Gene Symbol: SERF1A
  Gene Name: small EDRK-rich factor 1A (telomeric)
  ENST ID: ENST00000627451
  CDS Start-End: 265-532

SEQ ID NO: 182193 - DNA, 892 bp, Homo sapiens
  Payload ID: 15877
  Gene Symbol: SERF1A
  Gene Name: small EDRK-rich factor 1A (telomeric)
  ENST ID: ENST00000629958
  CDS Start-End: 238-528
aggcggagtccggctggagaatccccctgggtcgcgcagtgcggggatccccgcttcagtcggcagagagagagctcgcgggtggttccggtccggcttttcaggccggacgggtgcctgcccctcaggtgcgagtttgtgcggtaaagaacacaccccggagatgtggacacggccgccccaggagggtccttgtttggaggtggaaatcaacgagaacttgcccgccagaaaaacatgaagaaaacccaggaaattagcaagggaaagaggaaagaggatagcttgactgcctctcagagaaagcagagttctggaggccagaaatctgagagcaagatgtcagctgggccacacctccctctgaaggctccaagggagaatccttgctttcctcttccagctgctggtggctccaggtattacttggcttatggcagcataactcctatctctgcctttgtctttgtggtcttcttttctgtcttcttcccttctttttatgaggacttttgctgttggatttaggttccattctaacctaggatgatctcatttggaaatccttaatttcatctacaaaaactgttttcccaaataggtcacattcacgcatatcagatggacagatgtatcattttggggtccaccattcaacccactacaaggagttttttaaacaaaaataggaaacttagatgtaacttagcactttttttttttttttttgagatggagtctcactctgtcaccagactggagtgcagtggcgccatctcagctccatgcaacctctgcctcctgggttcaagcagttctcttgcctcagcctcctgggtagctgggattacaggcacgcgctgccacacccaggtaatttatttattttttt

SEQ ID NO: 182194 - DNA, 703 bp, Homo sapiens
  Payload ID: 15877
  Gene Symbol: SERF1A
  Gene Name: small EDRK-rich factor 1A (telomeric)
  Uniprot ID: O75920
  ENST ID: ENST00000627372
  CDS Start-End: 206-394
gcgcagtgacgcgccggccatgccggcggctgttgtcgggcctccagcgggcggggccgttggcggagcagagcggaggcgcagccgggcggagggcccacgagggctcagccttcccggtcagcggtggtgacggtatcccagagtgccagagaaccgttgcttttccgagttgctcttcttccaggctccgttggtggtcggcatggcccgtggaaatcaacgagaacttgcccgccagaaaaacatgaagaaaacccaggaaattagcaagggaaagaggaaagaggatagcttgactgcctctcagagaaagcagagggactctgagatcatgcaagaaaagcagaaggcagctaatgagaagaagtctatgcagacaagagaaaagtgatgactggctatttggaaaacctgggtgctactgccaactgggtgtatcataagctctaagatcaagattttgtagagtggacagtcattacatatgttataacttatcctttaaaaactattttaaactttatcctttcagctttacttagtgcgatgttttagaagcagtcttcaaagaataaaacactaaccatgcatgtgacatattggtgaacattatttttattattgaacattcatatataatttattaggtaatatgatcagataataggatctcttatataataaagaatctttgtcatca

SEQ ID NO: 182195 - DNA, 984 bp, Homo sapiens
  Payload ID: 15877
  Gene Symbol: SERF1A
  Gene Name: small EDRK-rich factor 1A (telomeric)
  ENST ID: ENST00000625868
  CDS Start-End: 107-352
acgagggctcagccttcccggtcagcggtggtgacggtatcccagagtgccagagaaccgttgcttttccgagttgctcttcttccaggctccgttggtggtcggcatggcccgtggaaatcaacgagaacttgcccgccagaaaaacatgaagaaaacccaggaaattagcaagggaaagaggaaagaggatagcttgactgcctctcagagaaagcagagttctggaggccagaaatctgagagcaagatgtcagctgggccacacctccctctgaaggctccaagggagaatccttgctttcctcttccagctgctggtggctccaggttccattctaacctaggatgatctcatttggaaatccttaatttcatctacaaaaactgttttcccaaataggtcacattcacgcatatcagatggacagatgtatcattttggggtccaccattcaacccactacaaggagttttttaaacaaaaataggaaacttagatgtaacttagcactttttttttttttttttgagatggagtctcactctgtcaccagactggagtgcagtggcgccatctcagctccatgcaacctctgcctcctgggttcaagcagttctcttgcctcagcctcctgggtagctgggattacaggcacgcgctgccacacccaggtaatttatttattttttttttgagacagagtctcgcactgttgcccaggctggactgcagtggcgtgatctctgctcactgcaacctccgcctcccgggttcaagcgattctccagcctcagcttcctgagtagatgggattacaggcgcctgccaccacgcccagctaattttttgtattcttagtagagatggggtttcaccatgttggccaggctggtctccatctcctgacctcgtgattcacccgcctcggcctcccaaagtgctgggattacaggcgtgagtcacagcccccggccataatt

SEQ ID NO: 182196 - DNA, 591 bp, Homo sapiens
  Payload ID: 15877
  Gene Symbol: SERF1A
  Gene Name: small EDRK-rich factor 1A (telomeric)
  Uniprot ID: O75920
  ENST ID: ENST00000630567
  CDS Start-End: 1-333
atggcccgtggaaatcaacgagaacttgcccgccagaaaaacatgaagaaaacccaggaaattagcaagggaaagaggaaagaggatagcttgactgcctctcagagaaagcagagttctggaggccagaaatctgagagcaagatgtcagctgggccacacctccctctgaaggctccaagggagaatccttgctttcctcttccagctgctggtggctccaggtattacttggcttatggcagcataactcctatctctgcctttgtctttgtggtcttcttttctgtcttcttcccttctttttatgaggacttttgctgttggatttaggttccattctaacctaggatgatctcatttggaaatccttaatttcatctacaaaaactgttttcccaaataggtcacattcacgcatatcagatggacagatgtatcattttggggtccaccattcaacccactacaaggagttttttaaacaaaaataggaaaccccatttctactaaaaatacaaaaattagctggggcgaggggataggccgagttccgggtgtaagggggccattagggagagcagagcgagg

SEQ ID NO: 182197 - DNA, 1889 bp, Homo sapiens
  Payload ID: 15878
  Gene Symbol: SERF1B
  Gene Name: small EDRK-rich factor 1B (centromeric)
  Uniprot ID: O75920
  ENST ID: ENST00000380750
  CDS Start-End: 184-516
ccggcggctgttgtcgggcctccagcgggcggggccgttggcggagcagaggggaggcgcagccgggcggagggcccacgagggctcagccttcccggtcagcggtggtgacggtatcccagagtgccagagaaccgttgcttttccgagttgctcttcttccaggctccgttggtggtcggcatggcccgtggaaatcaacgagaacttgcccgccagaaaaacatgaagaaaacccaggaaattagcaagggaaagaggaaagaggatagcttgactgcctctcagagaaagcagagttctggaggccagaaatctgagagcaagatgtcagctgggccacacctccctctgaaggctccaagggagaatccttgctttcctcttccagctgctggtggctccaggtattacttggcttatggcagcataactcctatctctgcctttgtctttgtggtcttcttttctgtcttcttcccttctttttatgaggacttttgctgttggatttaggttccattctaacctaggatgatctcatttggaaatccttaatttcatctacaaaaactgttttcccaaataggtcacattcacgcatatcagatggacagatgtatcattttggggtccaccattcaacccactacaaggagttttttaaacaaaaataggaaacttagatgtaacttagcactttttttttttttttttgagatggagtctcactctgtcaccagactggagtgcagtggcgccatctcagctccatgcaacctctgcctcctgggttcaagcagttctcttgcctcagcctcctgggtagctgggattacaggcacgcgctgccacacccaggtaatttatttattttttttttgagacagagtctcgcactgttgcccaggctggactgcagtggcgtgatctctgctcactgcaacctccgcctcccgggttcaagcgattctccagcctcagcttcctgagtagatgggattacaggcgcctgccaccacgcccagctaattttttgtattcttagtagagatggggtttcaccatgttggccaggctggtctccatctcctgacctcgtgattcacccgcctcggcctcccaaagtgctgggattacaggcgtgagtcacagcccccggccataatttagcactttaaaaaataatagccatgttgggccaggcgtggtggctcatgcctgtaatctgagcactttgggagaccaaggcgggtagatcccttgtgcccaggagttcaagaccagcctgggcaacatggcgaaaccccatttctactaaaaatacaaaaattagctggggcgaggggataggccgagttccgggtgtaagggggccattagggagagcagagcgaggcagctgatcttccggattgggggccttgcccggaagctggacctcacggagatgaaacggaagatgcacgaggatatgatctccatacagaactttctcatctacgtggccctgctgcgagtcactccatttatcttaaagaaattggacagcatatgaagattggacatcacatgtgaatgcatgatatgaagagcctggttacagtttctactgttctctgcaagtaaataggcccagaaaggtataagagactctttgaatggacataaaaattctgcttgttaagaacaagttgagctctggtaactgatcttaatagctaaaatataaaaatatttgggaagtctgaaatgaggtctcctggccctggtgtgcccttaatgcctgtgacagttggcctctgtgaatattggtataattgtaaataatgtcaaactccattttctagcaagtattaataattaagggaagtatgtctgaaatggca

SEQ ID NO: 182198 - DNA, 703 bp, Homo sapiens
  Payload ID: 15878
  Gene Symbol: SERF1B
  Gene Name: small EDRK-rich factor 1B (centromeric)
  Uniprot ID: O75920
  ENST ID: ENST00000380751
  CDS Start-End: 206-394
gcgcagtgacgcgccggccatgccggcggctgttgtcgggcctccagcgggcggggccgttggcggagcagaggggaggcgcagccgggcggagggcccacgagggctcagccttcccggtcagcggtggtgacggtatcccagagtgccagagaaccgttgcttttccgagttgctcttcttccaggctccgttggtggtcggcatggcccgtggaaatcaacgagaacttgcccgccagaaaaacatgaagaaaacccaggaaattagcaagggaaagaggaaagaggatagcttgactgcctctcagagaaagcagagggactctgagatcatgcaagaaaagcagaaggcagctaatgagaagaagtctatgcagacaagagaaaagtgatgactggctatttggaaaacctgggtgctactgccaactgggtgtatcataagctctaagatcaagattttgtagagtggacagtcattacatatgttataacttatcctttaaaaactattttaaactttatcctttcagctttacttagtgcgatgttttagaagcagtcttcaaagaataaaacactaaccatgcatgtgacatattggtgaacattatttttattattgaacattcatatataatttattaggtaatatgatcagataataggatctcttatataataaagaatctttgtcatca

SEQ ID NO: 182199 - DNA, 1666 bp, Homo sapiens
  Payload ID: 15878
  Gene Symbol: SERF1B
  Gene Name: small EDRK-rich factor 1B (centromeric)
  ENST ID: ENST00000506542
  CDS Start-End: 80-325
gtggtgacggtatcccagagtgccagagaaccgttgcttttccgagttgctcttcttccaggctccgttggtggtcggcatggcccgtggaaatcaacgagaacttgcccgccagaaaaacatgaagaaaacccaggaaattagcaagggaaagaggaaagaggatagcttgactgcctctcagagaaagcagagttctggaggccagaaatctgagagcaagatgtcagctgggccacacctccctctgaaggctccaagggagaatccttgctttcctcttccagctgctggtggctccaggttccattctaacctaggatgatctcatttggaaatccttaatttcatctacaaaaactgttttcccaaataggtcacattcacgcatatcagatggacagatgtatcattttggggtccaccattcaacccactacaaggagttttttaaacaaaaataggaaacttagatgtaacttagcactttttttttttttttttgagatggagtctcactctgtcaccagactggagtgcagtggcgccatctcagctccatgcaacctctgcctcctgggttcaagcagttctcttgcctcagcctcctgggtagctgggattacaggcacgcgctgccacacccaggtaatttatttattttttttttgagacagagtctcgcactgttgcccaggctggactgcagtggcgtgatctctgctcactgcaacctccgcctcccgggttcaagcgattctccagcctcagcttcctgagtagatgggattacaggcgcctgccaccacgcccagctaattttttgtattcttagtagagatggggtttcaccatgttggccaggctggtctccatctcctgacctcgtgattcacccgcctcggcctcccaaagtgctgggattacaggcgtgagtcacagcccccggccataatttagcactttaaaaaataatagccatgttgggccaggcgtggtggctcatgcctgtaatctgagcactttgggagaccaaggcgggtagatcccttgtgcccaggagttcaagaccagcctgggcaacatggcgaaaccccatttctactaaaaatacaaaaattagctggggcgaggggataggccgagttccgggtgtaagggggccattagggagagcagagcgaggcagctgatcttccggattgggggccttgcccggaagctggacctcacggagatgaaacggaagatgcacgaggatatgatctccatacagaactttctcatctacgtggccctgctgcgagtcactccatttatcttaaagaaattggacagcatatgaagattggacatcacatgtgaatgcatgatatgaagagcctggttacagtttctactgttctctgcaagtaaataggcccagaaaggtataagagactctttgaatggacataaaaattctgcttgttaagaacaagttgagctctggtaactgatcttaatagctaaaatataaaaatatttgggaagtctgaaatgaggtctcctggccctggtgtgcccttaatgcctgtgacagttggcctctgtgaatattggtataattgtaaataatgtcaaactccattttctagcaagtattaataattaagggaagtatgtc

SEQ ID NO: 182200 - DNA, 569 bp, Homo sapiens; identical to SEQ ID NO: 182183
  Payload ID: 15878
  Gene Symbol: SERF1B
  Gene Name: small EDRK-rich factor 1B (centromeric)
  ENST ID: ENST00000503931
  CDS Start-End: 97-324

SEQ ID NO: 182201 - DNA, 792 bp, Homo sapiens
  Payload ID: 15878
  Gene Symbol: SERF1B
  Gene Name: small EDRK-rich factor 1B (centromeric)
  ENST ID: ENST00000515588
  CDS Start-End: 234-524
ggagtccggctggagaatccccctgggtcgcgcagtgcggggatccccgcttcagtcggcagagagagagctcgcgggtggttccggtccggcttttcaggccggacgggtgcctgcccctcaggtgcgagtttgtgcggtaaagaacacaccccggagatgtggacacggccgccccaggagggtccttgtttggaggtggaaatcaacgagaacttgcccgccagaaaaacatgaagaaaacccaggaaattagcaagggaaagaggaaagaggatagcttgactgcctctcagagaaagcagagttctggaggccagaaatctgagagcaagatgtcagctgggccacacctccctctgaaggctccaagggagaatccttgctttcctcttccagctgctggtggctccaggtattacttggcttatggcagcataactcctatctctgcctttgtctttgtggtcttcttttctgtcttcttcccttctttttatgaggacttttgctgttggatttaggttccattctaacctaggatgatctcatttggaaatccttaatttcatctacaaaaactgttttcccaaataggtcacattcacgcatatcagatggacagatgtatcattttggggtccaccattcaacccactacaaggagttttttaaacaaaaataggaaacttagatgtaacttagcactttttttttttttttttgagatggagtctcactctgtcaccagactggagtgcagtggcgccatctcagctccatgcaacctct

SEQ ID NO: 182202 - DNA, 1666 bp, Homo sapiens
  Payload ID: 15878
  Gene Symbol: SERF1B
  Gene Name: small EDRK-rich factor 1B (centromeric)
  ENST ID: ENST00000614330
  CDS Start-End: 80-325
gtggtgacggtatcccagagtgccagagaaccgttgcttttccgagttgctcttcttccaggctccgttggtggtcggcatggcccgtggaaatcaacgagaacttgcccgccagaaaaacatgaagaaaacccaggaaattagcaagggaaagaggaaagaggatagcttgactgcctctcagagaaagcagagttctggaggccagaaatctgagagcaagatgtcagctgggccacacctccctctgaaggctccaagggagaatccttgctttcctcttccagctgctggtggctccaggttccattctaacctaggatgatctcatttggaaatccttaatttcatctacaaaaactgttttcccaaataggtcacattcacgcatatcagatggacagatgtatcattttggggtccaccattcaacccactacaaggagttttttaaacaaaaataggaaacttagatgtaacttagcactttttttttttttttttgagatggagtctcactctgtcaccagactggagtgcagtggcgccatctcagctccatgcaacctctgcctcctgggttcaagcagttctcttgcctcagcctcctgggtagctgggattacaggcacgcgctgccacacccaggtaatttatttattttttttttgagacagagtctcgcactgttgcccaggctggactgcagtggcgtgatctctgctcactgcaacctccgcctcccgggttcaagcgattctccagcctcagcttcctgagtagatgggattacaggcgcctgccaccacgcccagctaattttttgtattcttagtagagatggggtttcaccatgttggccaggctggtctccatctcctgacctcgtgattcacccgcctcggcctcccaaagtgctgggattacaggcgtgagtcacagcccccggccataatttagcactttaaaaaataatagccatgttgggccaggcgtggtggctcatgcctgtaatctgagcactttgggagaccaaggcgggtagatcccttgtgcccaggagttcaagaccagcctgggcaacatggcgaaaccccatttctactaaaaatacaaaaattagctggggcgaggggataggccgagttccgggtgtaagggggccattagggagagcagagtgaggcagctgatcttccggattgggggccttgcccggaagctggacctcacggagatgaaacggaagatgcacgaggatatgatctccatacagaactttctcatctacgtggccctgctgcgagtcactccatttatcttaaagaaattggacagcatatgaagattggacatcacatgtgaatgcatgatatgaagagcctggttacagtttctactgttctctgcaagtaaataggcccagaaaggtataagagactctttgaatggacataaaaattctgcttgttaagaacaagttgagctctggtaactgatcttaatagctaaaatataaaaatatttgggaagtctgaaatgaggtctcctggccctggtgtgcccttaatgcctgtgacagttggcctctgtgaatattggtataattgtaaataatgtcaaactccattttctagcaagtattaataattaagggaagtatgtc

SEQ ID NO: 182203 - DNA, 792 bp, Homo sapiens; identical to SEQ ID NO: 182201
  Payload ID: 15878
  Gene Symbol: SERF1B
  Gene Name: small EDRK-rich factor 1B (centromeric)
  ENST ID: ENST00000613176
  CDS Start-End: 234-524

SEQ ID NO: 182204 - DNA, 1889 bp, Homo sapiens
  Payload ID: 15878
  Gene Symbol: SERF1B
  Gene Name: small EDRK-rich factor 1B (centromeric)
  Uniprot ID: O75920
  ENST ID: ENST00000622553
  CDS Start-End: 184-516
ccggcggctgttgtcgggcctccagcgggcggggccgttggcggagcagagcggaggcgcagccgggcggagggcccacgagggctcagccttcccggtcagcggtggtgacggtatcccagagtgccagagaaccgttgcttttccgagttgctcttcttccaggctccgttggtggtcggcatggcccgtggaaatcaacgagaacttgcccgccagaaaaacatgaagaaaacccaggaaattagcaagggaaagaggaaagaggatagcttgactgcctctcagagaaagcagagttctggaggccagaaatctgagagcaagatgtcagctgggccacacctccctctgaaggctccaagggagaatccttgctttcctcttccagctgctggtggctccaggtattacttggcttatggcagcataactcctatctctgcctttgtctttgtggtcttcttttctgtcttcttcccttctttttatgaggacttttgctgttggatttaggttccattctaacctaggatgatctcatttggaaatccttaatttcatctacaaaaactgttttcccaaataggtcacattcacgcatatcagatggacagatgtatcattttggggtccaccattcaacccactacaaggagttttttaaacaaaaataggaaacttagatgtaacttagcactttttttttttttttttgagatggagtctcactctgtcaccagactggagtgcagtggcgccatctcagctccatgcaacctctgcctcctgggttcaagcagttctcttgcctcagcctcctgggtagctgggattacaggcacgcgctgccacacccaggtaatttatttattttttttttgagacagagtctcgcactgttgcccaggctggactgcagtggcgtgatctctgctcactgcaacctccgcctcccgggttcaagcgattctccagcctcagcttcctgagtagatgggattacaggcgcctgccaccacgcccagctaattttttgtattcttagtagagatggggtttcaccatgttggccaggctggtctccatctcctgacctcgtgattcacccgcctcggcctcccaaagtgctgggattacaggcgtgagtcacagcccccggccataatttagcactttaaaaaataatagccatgttgggccaggcgtggtggctcatgcctgtaatctgagcactttgggagaccaaggcgggtagatcccttgtgcccaggagttcaagaccagcctgggcaacatggcgaaaccccatttctactaaaaatacaaaaattagctggggcgaggggataggccgagttccgggtgtaagggggccattagggagagcagagtgaggcagctgatcttccggattgggggccttgcccggaagctggacctcacggagatgaaacggaagatgcacgaggatatgatctccatacagaactttctcatctacgtggccctgctgcgagtcactccatttatcttaaagaaattggacagcatatgaagattggacatcacatgtgaatgcatgatatgaagagcctggttacagtttctactgttctctgcaagtaaataggcccagaaaggtataagagactctttgaatggacataaaaattctgcttgttaagaacaagttgagctctggtaactgatcttaatagctaaaatataaaaatatttgggaagtctgaaatgaggtctcctggccctggtgtgcccttaatgcctgtgacagttggcctctgtgaatattggtataattgtaaataatgtcaaactccattttctagcaagtattaataattaagggaagtatgtctgaaatggca

SEQ ID NO: 182205 - DNA, 703 bp, Homo sapiens; identical to SEQ ID NO: 182194
  Payload ID: 15878
  Gene Symbol: SERF1B
  Gene Name: small EDRK-rich factor 1B (centromeric)
  Uniprot ID: O75920
  ENST ID: ENST00000621283
  CDS Start-End: 206-394

SEQ ID NO: 182206 - DNA, 338 bp, Homo sapiens
  Payload ID: 15878
  Gene Symbol: SERF1B
  Gene Name: small EDRK-rich factor 1B (centromeric)
  ENST ID: ENST00000621240
  CDS Start-End: 265-338
gcgcagtgcggggatccccgcttcagtcggcagagagagagctcgcgggtggttccggtccggcttttcaggccggacgggtgcctgcccctcaggtgcgagtttgtgcggtaaagaacacaccccggagatgtggacacggccgccccaggagggtccttgtttggagacttaccttcaatctgttcagtctccatccacccctctccgcctctgcatggggataaaggtggaaatcaacgagaacttgcccgccagaaaaacatgaagaaaacccaggaaattagcaagggaaagaggaaagaggatagcttgactgcctctcagagaaagcagag

SEQ ID NO: 182207 - DNA, 703 bp, Homo sapiens; identical to SEQ ID NO: 182194
  Payload ID: 15878
  Gene Symbol: SERF1B
  Gene Name: small EDRK-rich factor 1B (centromeric)
  Uniprot ID: O75920
  ENST ID: ENST00000611616
  CDS Start-End: 206-394

SEQ ID NO: 182208 - DNA, 433 bp, Homo sapiens
  Payload ID: 15878
  Gene Symbol: SERF1B
  Gene Name: small EDRK-rich factor 1B (centromeric)
  ENST ID: ENST00000622047
  CDS Start-End: 181-327
agtcggcagagagagagctcgcgggtggttccggtccggcttttcaggccggacgggtgcctgcccctcaggtgcgagtttgtgcggtaaagaacacaccccggagatgtggacacggccgccccaggagggtccttgtttggaggtggaaatcaacgagaacttgcccgccagaaaaacatgaagaaaacccaggaaattagcaagggaaagaggaaagaggatagcttgactgcctctcagagaaagcagagggactctgagatcatgcaagaaaagcagaaggcagctaatgagaagaagtctatgcagacaagagaaaagtgatgactggctatttggaaaacctgggtgctactgccaactgggtgtatcataagctctaagatcaagattttgtagagtggacagtcattacatatgttataactta

SEQ ID NO: 182209 - DNA, 1889 bp, Homo sapiens; identical to SEQ ID NO: 182188
  Payload ID: 15878
  Gene Symbol: SERF1B
  Gene Name: small EDRK-rich factor 1B (centromeric)
  Uniprot ID: O75920
  ENST ID: ENST00000613172
  CDS Start-End: 184-516

SEQ ID NO: 182210 - DNA, 632 bp, Homo sapiens; identical to SEQ ID NO: 182189
  Payload ID: 15878
  Gene Symbol: SERF1B
  Gene Name: small EDRK-rich factor 1B (centromeric)
  ENST ID: ENST00000611277
  CDS Start-End: 179-325

SEQ ID NO: 182211 - DNA, 569 bp, Homo sapiens; identical to SEQ ID NO: 182183
  Payload ID: 15878
  Gene Symbol: SERF1B
  Gene Name: small EDRK-rich factor 1B (centromeric)
  ENST ID: ENST00000611952
  CDS Start-End: 97-324

SEQ ID NO: 182212 - DNA, 328 bp, Homo sapiens
  Payload ID: 15878
  Gene Symbol: SERF1B
  Gene Name: small EDRK-rich factor 1B (centromeric)
  ENST ID: ENST00000628627
  CDS Start-End: 267-328
agtgacgcgccggccatgccggcggctgttgtcgggcctccagcgggcggggccgttggcggagcagagcggaggcgcagccgggcggagggcccacgagggctcagccttcccggtcagcggtggtgacggtatcccagagtgccagagaaccgttgcttttccgagttgctcttcttccaggctccgttggtggtcggcatggcccagcatgactgtttgactttgtaggtggaaatcaacgagaacttgcccgccagaaaaacatgaagaaaacccaggaaattagcaagggaaagaggaaagaggatagcttgactgcctctca

SEQ ID NO: 182213 - DNA, 1693 bp, Homo sapiens
  Payload ID: 15878
  Gene Symbol: SERF1B
  Gene Name: small EDRK-rich factor 1B (centromeric)
  ENST ID: ENST00000625862
  CDS Start-End: 107-352
acgagggctcagccttcccggtcagcggtggtgacggtatcccagagtgccagagaaccgttgcttttccgagttgctcttcttccaggctccgttggtggtcggcatggcccgtggaaatcaacgagaacttgcccgccagaaaaacatgaagaaaacccaggaaattagcaagggaaagaggaaagaggatagcttgactgcctctcagagaaagcagagttctggaggccagaaatctgagagcaagatgtcagctgggccacacctccctctgaaggctccaagggagaatccttgctttcctcttccagctgctggtggctccaggttccattctaacctaggatgatctcatttggaaatccttaatttcatctacaaaaactgttttcccaaataggtcacattcacgcatatcagatggacagatgtatcattttggggtccaccattcaacccactacaaggagttttttaaacaaaaataggaaacttagatgtaacttagcactttttttttttttttttgagatggagtctcactctgtcaccagactggagtgcagtggcgccatctcagctccatgcaacctctgcctcctgggttcaagcagttctcttgcctcagcctcctgggtagctgggattacaggcacgcgctgccacacccaggtaatttatttattttttttttgagacagagtctcgcactgttgcccaggctggactgcagtggcgtgatctctgctcactgcaacctccgcctcccgggttcaagcgattctccagcctcagcttcctgagtagatgggattacaggcgcctgccaccacgcccagctaattttttgtattcttagtagagatggggtttcaccatgttggccaggctggtctccatctcctgacctcgtgattcacccgcctcggcctcccaaagtgctgggattacaggcgtgagtcacagcccccggccataatttagcactttaaaaaataatagccatgttgggccaggcgtggtggctcatgcctgtaatctgagcactttgggagaccaaggcgggtagatcccttgtgcccaggagttcaagaccagcctgggcaacatggcgaaaccccatttctactaaaaatacaaaaattagctggggcgaggggataggccgagttccgggtgtaagggggccattagggagagcagagcgaggcagctgatcttccggattgggggccttgcccggaagctggacctcacggagatgaaacggaagatgcacgaggatatgatctccatacagaactttctcatctacgtggccctgctgcgagtcactccatttatcttaaagaaattggacagcatatgaagattggacatcacatgtgaatgcatgatatgaagagcctggttacagtttctactgttctctgcaagtaaataggcccagaaaggtataagagactctttgaatggacataaaaattctgcttgttaagaacaagttgagctctggtaactgatcttaatagctaaaatataaaaatatttgggaagtctgaaatgaggtctcctggccctggtgtgcccttaatgcctgtgacagttggcctctgtgaatattggtataattgtaaataatgtcaaactccattttctagcaagtattaataattaagggaagtatgtc

SEQ ID NO: 182214 - DNA, 663 bp, Homo sapiens; identical to SEQ ID NO: 182184
  Payload ID: 15878
  Gene Symbol: SERF1B
  Gene Name: small EDRK-rich factor 1B (centromeric)
  ENST ID: ENST00000628126
  CDS Start-End: 208-354

SEQ ID NO: 182215 - DNA, 569 bp, Homo sapiens; identical to SEQ ID NO: 182183
  Payload ID: 15878
  Gene Symbol: SERF1B
  Gene Name: small EDRK-rich factor 1B (centromeric)
  ENST ID: ENST00000626049
  CDS Start-End: 97-324

SEQ ID NO: 182216 - DNA, 532 bp, Homo sapiens; identical to SEQ ID NO: 182186
  Payload ID: 15878
  Gene Symbol: SERF1B
  Gene Name: small EDRK-rich factor 1B (centromeric)
  ENST ID: ENST00000627838
  CDS Start-End: 265-532

SEQ ID NO: 182217 - DNA, 846 bp, Homo sapiens
  Payload ID: 15878
  Gene Symbol: SERF1B
  Gene Name: small EDRK-rich factor 1B (centromeric)
  ENST ID: ENST00000630348
  CDS Start-End: 192-482
atccccgcttcagtcggcagagagagagctcgcgggtggttccggtccggcttttcaggccggacgggtgcctgcccctcaggtgcgagtttgtgcggtaaagaacacaccccggagatgtggacacggccgccccaggagggtccttgtttggaggtggaaatcaacgagaacttgcccgccagaaaaacatgaagaaaacccaggaaattagcaagggaaagaggaaagaggatagcttgactgcctctcagagaaagcagagttctggaggccagaaatctgagagcaagatgtcagctgggccacacctccctctgaaggctccaagggagaatccttgctttcctcttccagctgctggtggctccaggtattacttggcttatggcagcataactcctatctctgcctttgtctttgtggtcttcttttctgtcttcttcccttctttttatgaggacttttgctgttggatttaggttccattctaacctaggatgatctcatttggaaatccttaatttcatctacaaaaactgttttcccaaataggtcacattcacgcatatcagatggacagatgtatcattttggggtccaccattcaacccactacaaggagttttttaaacaaaaataggaaacttagatgtaacttagcactttttttttttttttttgagatggagtctcactctgtcaccagactggagtgcagtggcgccatctcagctccatgcaacctctgcctcctgggttcaagcagttctcttgcctcagcctcctgggtagctgggattacaggcacgcgctgccacacccaggtaatttatttattttttt

SEQ ID NO: 182218 - DNA, 1537 bp, Homo sapiens
  Payload ID: 15879
  Gene Symbol: SERF2
  Gene Name: small EDRK-rich factor 2
  Uniprot ID: P84101
  ENST ID: ENST00000249786
  CDS Start-End: 536-715
agcgagctgtgaacaactcgtgtccaaataagtggctgagaggtggtcctaagtaagcacaagtttagtagtagagtactcgtaacacagaactggctgaaaccccgccctcttgtctacgggcgttctttcagggcgactttgtcagtaccccaaactgtccccgcatgaggtcactctgcacggtcacgtgctcgagcccgcgggagcgccacatcgccagccgcacccctccacccccaacctgcccacgtgacccggcctagtttctccaggcccgtccctacgtctcactcgggaagccccgccccacgctgagcgctccgcctgcgaccctccgccacttacccaccccggctcaagcacgacccgtggatccacgtgctttttcttgtccaatgggagccggctcccgggcgcgaaggggcggggaggaaaggaacgactgtgctacgttgccagaaggggcgggacctgcaacgtccgacagaacgaggggacgtaacggaggcaggttggagccgctgccgtcgccatgacccgcggtaaccagcgtgagctcgcccgccagaagaatatgaaaaagcagagcgactcggttaagggaaagcgccgagatgacgggctttctgctgccgcccgcaagcagagggactcggagatcatgcagcagaagcagaaaaaggcaaacgagaagaaggaggaacccaagtagctttgtggcttcgtgtccaaccctcttgcccttcgcctgtgtgcctggagccagtcccaccacgctcgcgtttcctcctgtagtgctcacaggtcccagcaccgatggcattccctttgccctgagtctgcagcgggtcccttttgtgcttccttcccctcaggtagcctctctccccctgggccactcccgggggtgagggggttaccccttcccagtgttttttattcctgtggggctcaccccaaagtattaaaagtagctttgtaattccttgagcgcctggtttgactggggacttggggggatggggttggaagaatgactgccctttcccaccaaaaaagggagaactctttagattcagattgtgggtatgtagacttaataagtgaaacatcacagaagaagcctttattatacaatgacaaccaaacaagtactccggatatgcagtagaggaatcctctaagaaccatagagacttcttttctgtgatttttgttccccacccttgaacaccatctctaggatggagttggcctaagagtgaatgctgcaagatctgtgtttatgcctcttttcctcattcttcctcagtttgttcgtctgcttgaaagttggccaaaaaatcctgctgctcaccgacttcccgtggtcagctgctgtcaagcgttcactttctcttctgtcattcctcatggaatgagggtggttttgtcttcccgcttcccttgacctcaaaatcaggattaaaacctggggtagcctctgtgctcctttcttctatgccctggtttgttctgtggttctgggcttctt

SEQ ID NO: 182219 - DNA, 506 bp, Homo sapiens
  Payload ID: 15879
  Gene Symbol: SERF2
  Gene Name: small EDRK-rich factor 2
  Uniprot ID: P84101
  ENST ID: ENST00000339624
  CDS Start-End: 31-432
cggaggcaggttggagccgctgccgtcgccatgacccgcggtaaccagcgtgagctcgcccgccagaagaatatgaaaaagcagagcgactcggttaagggaaagcgccgagatgacgggctttctgctgccgcccgcaagcagagtgccccatcatctctacccccagggactcggagatcatgcagcagaagcagaaaaaggcaaacgagaagaaggaggaacccaagtagctttgtggcttcgtgtccaaccctcttgcccttcgcctgtgtgcctggagccagtcccaccacgctcgcgtttcctcctgtagtgctcacaggtcccagcaccgatggcattccctttgccctgagtctgcagcgggtcccttttgtgcttccttcccctcaggtagcctctctccccctgggccactcccgggggtgagggggttaccccttcccagtgttttttattcctgtggggctcaccccaaagtattaaaagtagctttgtaattc

SEQ ID NO: 182220 - DNA, 1931 bp, Homo sapiens
  Payload ID: 15879
  Gene Symbol: SERF2
  Gene Name: small EDRK-rich factor 2
  Uniprot ID: P84101
  ENST ID: ENST00000381359
  CDS Start-End: 930-1109
ggccaaccgcccggacctcggcgctttcttctaggatccgcatgaatcgctttgggctatcggaagagctatccccagttctcgggagaaagagtccgcgaccagcgtctgacctctcactcagagtccccagtcctgccttagtttccccagcgaccctgaatttggagttgctgtctctaagtgaaagctgaacctgcaaccccttgagggtttcagccgcagaggggcgggagaaagggcctggttggtaggcgggctcagcggttcgcgcccagttagccccgagcttcggagacccgagagaccagaggatggctgacacgaaggggcacccgagacagcgcctgggctttttcccgcccgcggttccaccgctctgaaaccgatttctaacagagagagacatagtcttgctctgttacccatgctggagtacggtggcgagatcacgactcactacaactttgaattcctggattcaagcaatcctcccatctcagcctcctgagtagctaaggactacagggcgactttgtcagtaccccaaactgtccccgcatgaggtcactctgcacggtcacgtgctcgagcccgcgggagcgccacatcgccagccgcacccctccacccccaacctgcccacgtgacccggcctagtttctccaggcccgtccctacgtctcactcgggaagccccgccccacgctgagcgctccgcctgcgaccctccgccacttacccaccccggctcaagcacgacccgtggatccacgtgctttttcttgtccaatgggagccggctcccgggcgcgaaggggcggggaggaaaggaacgactgtgctacgttgccagaaggggcgggacctgcaacgtccgacagaacgaggggacgtaacggaggcaggttggagccgctgccgtcgccatgacccgcggtaaccagcgtgagctcgcccgccagaagaatatgaaaaagcagagcgactcggttaagggaaagcgccgagatgacgggctttctgctgccgcccgcaagcagagggactcggagatcatgcagcagaagcagaaaaaggcaaacgagaagaaggaggaacccaagtagctttgtggcttcgtgtccaaccctcttgcccttcgcctgtgtgcctggagccagtcccaccacgctcgcgtttcctcctgtagtgctcacaggtcccagcaccgatggcattccctttgccctgagtctgcagcgggtcccttttgtgcttccttcccctcaggtagcctctctccccctgggccactcccgggggtgagggggttaccccttcccagtgttttttattcctgtggggctcaccccaaagtattaaaagtagctttgtaattccttgagcgcctggtttgactggggacttggggggatggggttggaagaatgactgccctttcccaccaaaaaagggagaactctttagattcagattgtgggtatgtagacttaataagtgaaacatcacagaagaagcctttattatacaatgacaaccaaacaagtactccggatatgcagtagaggaatcctctaagaaccatagagacttcttttctgtgatttttgttccccacccttgaacaccatctctaggatggagttggcctaagagtgaatgctgcaagatctgtgtttatgcctcttttcctcattcttcctcagtttgttcgtctgcttgaaagttggccaaaaaatcctgctgctcaccgacttcccgtggtcagctgctgtcaagcgttcactttctcttctgtcattcctcatggaatgagggtggttttgtcttcccgcttcccttgacctcaaaatcaggattaaaacctggggtagcctctgtgctcctttcttctatgccctggtttgttctgtggttctgggcttctt

SEQ ID NO: 182221 - DNA, 690 bp, Homo sapiens
  Payload ID: 15879
  Gene Symbol: SERF2
  Gene Name: small EDRK-rich factor 2
  Uniprot ID: P84101
  ENST ID: ENST00000403425
  CDS Start-End: 280-417
gccgtcgccatgacccgtgagcaccgagcccccttctccttgcccttttctttccgttcaccctaaacaccaccggcgaggcgccggctttgaccttccgtagcttccctagcaaggcgtttctctgggcgcgctctgtggccaccctcacactcggtgcccggaaatcgagccctttgcccacggctacttcacgggaccaccctcccgggttaggcataggccctcccggatcttccgcggtgcggtaaccagcgtgagctcgcccgccagaagaatatgaaaaagcagagcgactcggttaagggaaagcgccgagatgacgggctttctgctgccgcccgcaagcagagggactcggagatcatgcagcagaagcagaaaaaggcaaacgagaagaaggaggaacccaagtagctttgtggcttcgtgtccaaccctcttgcccttcgcctgtgtgcctggagccagtcccaccacgctcgcgtttcctcctgtagtgctcacaggtcccagcaccgatggcattccctttgccctgagtctgcagcgggtcccttttgtgcttccttcccctcaggtagcctctctccccctgggccactcccgggggtgagggggttaccccttcccagtgttttttattcctgtggggctcaccccaaagtattaaaagtagctttgtaattc

SEQ ID NO: 182222 - DNA, 586 bp, Homo sapiens
  Payload ID: 15879
  Gene Symbol: SERF2
  Gene Name: small EDRK-rich factor 2
  Uniprot ID: P84101
  ENST ID: ENST00000402131
  CDS Start-End: 247-384
gccgtcgccatgacccgtgagcaccgagcccccttctccttgcccttttctttccgttcaccctaaacaccaccggcgaggcgccggctttgaccttccgtagcttccctagcaaggcgtttctctgggcgcgctctgtggccaccctcacactcggtgcccggaaatcgagccctttgcccacggctacttcacgggaccaccctcccgggcggtaaccagcgtgagctcgcccgccagaagaatatgaaaaagcagagcgactcggttaagggaaagcgccgagatgacgggctttctgctgccgcccgcaagcagagggactcggagatcatgcagcagaagcagaaaaaggcaaacgagaagaaggaggaacccaagtagctttgtggcttcgtgtccaaccctcttgcccttcgcctgtgtgcctggagccagtcccaccacgctcgcgtttcctcctgtagtgctcacaggtcccagcaccgatggcattccctttgccctgagtctgcagcgggtcccttttgtgcttccttcccctcaggtagcctctctccccctgggccactcccgggggtgaggg

SEQ ID NO: 182223 - DNA, 700 bp, Homo sapiens
  Payload ID: 15879
  Gene Symbol: SERF2
  Gene Name: small EDRK-rich factor 2
  ENST ID: ENST00000409617
  CDS Start-End: 24-146
aggttggagccgctgccgtcgccatgacccgcggtaaccagcgtgagctcgcccgccagaagaatatgaaaaagcagagcgactcggttaagggaaagcgccgagatgacgggctttctgctgccgcccgcaagcagagcttctagaactggagcagaaagaaggtgtggcccagggccagccccgcctcctccccgggcggaagctgtgtcagttgccggaagtcggcgtgaggtggggcttatgcggcggcgtggtgaaatagatatggcgaccgagggggatgtggagctggagttggagactgagaccagtggaccagagcggcctccggagaagccacggaaacatgacagcggtgcggcggacttggagcgggtcaccgactatgcagaggagaaggagatccagagttccaatctggagacggccatgtctgtgattggagacagaaggtcccgggagcagaaagccaaacaggagcgggagaaagaactggcaaaagtcactatcaagaaggaagatctggagctaataatgactgagatggagatatctcgagcagcagcagaacgcagtttgcgggaacacatgggcaacgtggtagaggcgcttattgccctaaccaactgatgcgtgctttctcaaatatacctactggattaatttatggcaataaaatttttttttgtctttttca

SEQ ID NO: 182224 - DNA, 559 bp, Homo sapiens
  Payload ID: 15879
  Gene Symbol: SERF2
  Gene Name: small EDRK-rich factor 2
  ENST ID: ENST00000409646
  CDS Start-End: 48-299
agaacgaggggacgtaacggaggcaggttggagccgctgccgtcgccatgacccgcggtaaccagcgtgagctcgcccgccagaagaatatgaaaaagcagagcgactcggttaagggaaagcgccgagatgacgggctttctgctgccgcccgcaagcagagaaagtacacacaaacctattatgcagctgtgcccgcgggctggtgggggagtggaggtggaccagcaacacagcctgcagcaggtggaaggtggcggttcctgcacatactcggtacacagccccagagccactgagcactggacagtcagagaggccaaacaggttctgtttcaagctgattccagccatttgggattgccgcccactgacaacttagtagggctttcattataagcaggcttgagatatctgacctttctctcgacctaaacacctggggctggaaacatggcgggagagatttacagattatacctggggcaacgaaccagaacgacattagaggagaaaagaggcctgtcgtttttattggcttctgcacgtcttcctcccc

SEQ ID NO: 182225 - DNA, 582 bp, Homo sapiens
  Payload ID: 15879
  Gene Symbol: SERF2
  Gene Name: small EDRK-rich factor 2
  Uniprot ID: P84101
  ENST ID: ENST00000409614
  CDS Start-End: 172-309
ggcctcgatgggccgttgtcggggcccggagattgaagtggtgttggatcctgctgctggccgcgctggggtagaagggtcgccggtgtgtgggcagagcggcccccgcgtctcacctttaattttctttccttaggcggtaaccagcgtgagctcgcccgccagaagaatatgaaaaagcagagcgactcggttaagggaaagcgccgagatgacgggctttctgctgccgcccgcaagcagagggactcggagatcatgcagcagaagcagaaaaaggcaaacgagaagaaggaggaacccaagtagctttgtggcttcgtgtccaaccctcttgcccttcgcctgtgtgcctggagccagtcccaccacgctcgcgtttcctcctgtagtgctcacaggtcccagcaccgatggcattccctttgccctgagtctgcagcgggtcccttttgtgcttccttcccctcaggtagcctctctccccctgggccactcccgggggtgagggggttaccccttcccagtgttttttattcctgtggggctcaccccaaagtattaaaagtagctttgtaattc

SEQ ID NO: 182226 - DNA, 807 bp, Homo sapiens
  Payload ID: 15879
  Gene Symbol: SERF2
  Gene Name: small EDRK-rich factor 2
  ENST ID: ENST00000409291
  CDS Start-End: 73-201
cggaggcaggttggagccgctgccgtcgccatgacccgcggtaaccagcgtgagctcgcccgccagaagaatatgaaaaagcagagcgactcggttaagggaaagcgccgagatgacgggctttctgctgccgcccgcaagcagaggttctgtttcaagctgattccagccatttgggattgccgcccactgacaacttagtagggctttcattataagcaggcttgagatatctgacctttctctcgacctaaacacctggggctggaaacatggcgggagagatttacagattatacctggggcaacgaaccagaacgacattagaggagaaaagaggcctgtcgtttttattggcttctgcacgtcttcctccccagcttcggccactctccccttcgcaccctctcacctgacagaagggacttttcactaggacactgctgcctccgctgtgctgctgtgccaggcccagggaggtgccggggctggggccggccttggcacccaccatccttgtcccagggattaggcttaggtccaccagatggaaggcagatgagagcagcagttgcttctgtcctcagcccattggactgccactgtgttggggctgagcacccggtcccgggcagaatggagacgtccggaagagaacactgacctccaggttgcggtaaatgcaaatgccctgtgaaggagctttgtccttagggcctcaacactgcggccactcaggctgttctctccagattagggggcagtttgtctatctggccccctgtggattagcattctttattggtt

SEQ ID NO: 182227 - DNA, 1032 bp, Homo sapiens
  Payload ID: 15879
  Gene Symbol: SERF2
  Gene Name: small EDRK-rich factor 2
  Uniprot ID: P84101
  ENST ID: ENST00000409960
  CDS Start-End: 48-560
agaacgaggggacgtaacggaggcaggttggagccgctgccgtcgccatgacccgcggtaaccagcgtgagctcgcccgccagaagaatatgaaaaagcagagcgactcggttaagggaaagcgccgagatgacgggctttctgctgccgcccgcaagcagagggtgggagtacagcagccaaacgctgaacttagtcccatccacttccatcttatcctttgtgcccttcatccccctgcatcttgtcctttttgccctctggtacctcccagtgccccatcatctctacccccagggactcggagatcatgcagcagaagcagaaaaaggcaaacgagaagaaggaggaacccaagtagctttgtggcttcgtgtccaaccctcttgcccttcgcctgtgtgcctggagccagtcccaccacgctcgcgtttcctcctgtagtgctcacaggtcccagcaccgatggcattccctttgccctgagtctgcagcgggtcccttttgtgcttccttcccctcaggtagcctctctccccctgggccactcccgggggtgagggggttaccccttcccagtgttttttattcctgtggggctcaccccaaagtattaaaagtagctttgtaattccttgagcgcctggtttgactggggacttggggggatggggttggaagaatgactgccctttcccaccaaaaaagggagaactctttagattcagattgtgggtatgtagacttaataagtgaaacatcacagaagaagcctttattatacaatgacaaccaaacaagtactccggatatgcagtagaggaatcctctaagaaccatagagacttcttttctgtgatttttgttccccacccttgaacaccatctctaggatggagttggcctaagagtgaatgctgcaagatctgtgtttatgcctcttttcctcattcttcctcagtttgttcgtctgcttgaaagttggccaaaaaatcctgctgctcaccgacttcccgtggtcagctgctgtca

SEQ ID NO: 182228 - DNA, 2792 bp, Homo sapiens
  Payload ID: 15879
  Gene Symbol: SERF2
  Gene Name: small EDRK-rich factor 2
  ENST ID: ENST00000448830
  CDS Start-End: 24-350
aggttggagccgctgccgtcgccatgacccgcggtaaccagcgtgagctcgcccgccagaagaatatgaaaaagcagagcgactcggttaagggaaagcgccgagatgacgggctttctgctgccgcccgcaagcagagtgctattacttcatcccggaatttcctttacccagcctatgtctactttccctcctctgtcccctccccacccagaaagtacacacaaacctattatgcagctgtgcccgcgggctggtgggggagtggaggtggaccagcaacacagcctgcagcaggtggaaggtggcggttcctgcacatactcggtacacagccccagagccactgagcactggacagtcagagaggccaaacaggaggcagcagattgctgaggcccccacatggaggaggatgtagaacaggcggctgcaagtggatgcggtgagagagggccacctagagtggcagcagctggcacaaggagcaggcccacagcagcacacctgggagtagagcagatgcaaggcagcgaggtggagacttgctgaggaaaggcatacgttaatgtatgtgtgaggttaacccaggaggttgaattccaaaatttccccttcccctttcttccttttactcaggttctgtttcaagctgattccagccatttgggattgccgcccactgacaacttagtagggctttcattataagcaggcttgagatatctgacctttctctcgacctaaacacctggggctggaaacatggcgggagagatttacagattatacctggggcaacgaaccagaacgacattagaggagaaaagaggcctgtcgtttttattggcttctgcacgtcttcctccccagcttcggccactctccccttcgcaccctctcacctgacagaagggacttttcactaggacactgctgcctccgctgtgctgctgtgccaggcccagggaggtgccggggctggggccggccttggcacccaccatccttgtcccagggattaggcttaggtccaccagatggaaggcagatgagagcagcagttgcttctgtcctcagcccattggactgccactgtgttggggctgagcacccggtcccgggcagaatggagacgtccggaagagaacactgacctccaggttgcggtaaatgcaaatgccctgtgaaggagctttgtccttagggcctcaacactgcggccactcaggctgttctctccagattagggggcagtttgtctatctggccccctgtggattagcattctttattggtttaggattagacgtcattcaggttgaacggagttccctgaggtgggtgggtgcgtgtttatgtgttgaggggactattcctagtttatgaggtggttaaggatatcggtggggtgggctggagcggtgtcgggttaggtctgagagaaggcctcgcacaaaacactgtacaaacccgaaaggaagtctgagagacgaaccgccttcctccctgaagcttctagaactggagcagaaagaaggtgtggcccagggccagccccgcctcctccccgggcggaagctgtgtcagttgccggaagtcggcgtgaggtggggcttatgcggcggcgtggtgaaatagatatggcgaccgagggggatgtggagctggagttggagactgagaccagtggaccagagcggcctccggagaagccacggaaacatgacagcggtgcggcggacttggagcgggtcaccgactatgcagaggagaaggagatccagagttccaatctggagacggccatgtctgtgattggagacagaaggtcccgggagcagaaagccaaacaggagcgggagaaagaactggcaaaagtcactatcaagaaggaagatctggagctaataatgactgagatggagatatctcgagcagcagcagaacgcagtttgcgggaacacatgggcaacgtggtagaggcgcttattgccctaaccaactgatgcgtgctttctcaaatatacctactggattaatttatggcaataaaatttttttttgtctttttcagttttatcatcttgggtcaagtagagtgtatactatatcctatgttgtggagaatttatatgttggagactaactgaatttaagtgacccattaaaatctagcacacctgtatgaaaaatcagtgtagaagaatacctcatgtgcagatgctaggtggcaggccagtctcattcatctgactagctctcaacagtattcaaggtacatctggagtctcagcagagttactgtactcaaatggcatgtgtctccaagacagcttatgaatatctaaaaggccagctacctgcctaggagccactatatatatagatagatgtaggttatgaacccagttcataggccaccttgagttagaattttggtacctacaacatgcttgattttgagtgattaaaaaaaaataatttggctgggtgctgtggctcacacctctaatcccagcactttgggaggtcgaggcaggtagatcacgaggtcaggaattcaagaccagcctggccaacatgtgaaaccccgtctccactgaaaatagaaaaattagctgggcatggtggtgggcgcctataatcccagctattctggaggctgaggcaggaatcgcttgaaattggaaagcagaggttgcagtgagctgagatcacactactgtactactgtactccagcctgggggaaagagtgaaactccatctcaaaaaaaaaaaaaaaaaaaa

SEQ ID NO: 182229 - DNA, 483 bp, Homo sapiens
  Payload ID: 15879
  Gene Symbol: SERF2
  Gene Name: small EDRK-rich factor 2
  ENST ID: ENST00000430901
  CDS Start-End: 271-483
atgacccgtgagcaccgagcccccttctccttgcccttttctttccgttcaccctaaacaccaccggcgaggcgccggctttgaccttccgtagcttccctagcaaggcgtttctctgggcgcgctctgtggccaccctcacactcggtgcccggaaatcgagccctttgcccacggctacttcacgggaccaccctcccgggttaggcataggccctcccggatcttccgcggtgcggtaaccagcgtgagctcgcccgccagaagaatatgaaaaagcagagcgactcggttaagggaaagcgccgagatgacgggctttctgctgccgcccgcaagcagagtgctattacttcatcccggaatttcctttacccagcctatgtctactttccctcctctgtcccctccccacccagaaagtacacacaaacctattatgcagctgtgcccgcgggctggtgggggagtggaggtggacca

SEQ ID NO: 182230 - DNA, 2099 bp, Homo sapiens
  Payload ID: 15879
  Gene Symbol: SERF2
  Gene Name: small EDRK-rich factor 2
  Uniprot ID: P84101
  ENST ID: ENST00000445816
  CDS Start-End: 41-220
ggggacgtaacggaggcaggttggagccgctgccgtcgccatgacccgcggtaaccagcgtgagctcgcccgccagaagaatatgaaaaagcagagcgactcggttaagggaaagcgccgagatgacgggctttctgctgccgcccgcaagcagagggactcggagatcatgcagcagaagcagaaaaaggcaaacgagaagaaggaggaacccaagtagctttgtggcttcgtgtccaaccctcttgcccttcgcctgtgtgcctggagccagtcccaccacgctcgcgtttcctcctgtagtgctcacaggtcccagcaccgatggcattccctttgccctgagtctgcagcgggtcccttttgtgcttccttcccctcagtttgttcgtctgcttgaaagttggccaaaaaatcctgctgctcaccgacttcccgtggtcagctgctgtcaagcgttcactttctcttctgtcattcctcatggaatgagggtggttttgtcttcccgcttcccttgacctcaaaatcaggattaaaacctggggtagcctctgtgctcctttcttctatgccctggtttgttctgtggttctgggcttcttatatccgtgtgcccagggctgaactccttattttcctttctccaagggcagagccgagtcttcagtccctgttggtctttccccacccccacttccagcccaagagccaggaaagggctggtgccacactgtctgctgggatcagcggtggttctttgagctgctgatttgggtgttaggctcttgagctgggatgcagatgtaacagtagctccagtgagtcagacactctgcccagcacattagactgtgtttgaccacttcttccagttcatagtattgacttcagcccaaacggagataactccctgtgtgtccttgaggtattgagctgggctggacagctccccttgagccaactctaggagtacaatgtcaggggaaccccagtttgtgaaaaggacttagactggaggatatttgttatctggggatatgatgcggtggcggcggcgcctcaagataaggggctggggtttctgggtggggggccaacagagtggtgccagtaacagccccagatagaggagtacgcaggcccagcatgaggcaaccttgacccagaaggtggcccagctacccttgatgaaggtcttttccagttctgctccctcatagctgtgtaaccaaaggctctggttagagaatatgaagggccttagcttttagacctgttctacctcctcaccaaatataatggcagacccatgtgtgtctggaatggccttgaattgctctttccttaaaatagctagctcttcaggagagtatctaaggcccactccatcttacctgaaccagttggtaagggtaaccatgacatagagtgaggcaaggaagaagacgaagtggaaggcagaatagttgtaggaaagatgctggacttggactggaggagctggaggggtttcttggtcagctggcctcgcagccccacccctttgccctggagagaggaaatggctgctgggagcagagctgctgaaacacctcttcccctctcccccaactacctttgttaaggctcttgagggttcttatggcactccacagagatctaccacttcttatggttcctcacttggcactcacctttgtctgcctccactgtttcagggcagcagaaacacagtgagggcttctgcaaaacagaacgcaggttttggaatggtcttaaaagatgtgagggtgttaatctaggaaacttcccccgtgaaaagattggtctagtattaaaaagtggaggcacacctgggttcaaattctagctccagcatataagtggctgtgcagactttggtaagatgtttaatcttttgtgcctcgatttctccatttgtaaaatggagcaaatacctacctcacagggttgttgtgagggttaaattaaatgagattatgtaaaagtatctagcacagttgcctagcacattgtgggtactcaataaaaggtaacagcagctataatctgagcattctgggtagaggttggta

SEQ ID NO: 182231 - DNA, 862 bp, Homo sapiens
  Payload ID: 15879
  Gene Symbol: SERF2
  Gene Name: small EDRK-rich factor 2
  ENST ID: ENST00000630046
  CDS Start-End: 536-862
agcgagctgtgaacaactcgtgtccaaataagtggctgagaggtggtcctaagtaagcacaagtttagtagtagagtactcgtaacacagaactggctgaaaccccgccctcttgtctacgggcgttctttcagggcgactttgtcagtaccccaaactgtccccgcatgaggtcactctgcacggtcacgtgctcgagcccgcgggagcgccacatcgccagccgcacccctccacccccaacctgcccacgtgacccggcctagtttctccaggcccgtccctacgtctcactcgggaagccccgccccacgctgagcgctccgcctgcgaccctccgccacttacccaccccggctcaagcacgacccgtggatccacgtgctttttcttgtccaatgggagccggctcccgggcgcgaaggggcggggaggaaaggaacgactgtgctacgttgccagaaggggcgggacctgcaacgtccgacagaacgaggggacgtaacggaggcaggttggagccgctgccgtcgccatgacccgcggtaaccagcgtgagctcgcccgccagaagaatatgaaaaagcagagcgactcggttaagggaaagcgccgagatgacgggctttctgctgccgcccgcaagcagagtgctattacttcatcccggaatttcctttacccagcctatgtctactttccctcctctgtcccctccccacccagaaagtacacacaaacctattatgcagctgtgcccgcgggctggtgggggagtggaggtggaccagcaacacagcctgcagcaggtggaaggtggcggttcctgcacatactcggtacacagccccagagccactga

SEQ ID NO: 182232 - DNA, 6643 bp, Homo sapiens
  Payload ID: 15880
  Gene Symbol: SGSM1
  Gene Name: small G protein signaling modulator 1
  Uniprot ID: Q2NKQ1
  ENST ID: ENST00000400358
  CDS Start-End: 58-3339
ctaccgccgccaccgccgccaccgcctcctgggactcggaacgcagcgctcggagccatggcctcggcccccgcggaggcggagacccgacagaggctgctacgcaccgtcaagaaggaggtgaagcagatcatggaggaggctgtgacacgcaagtttgtccacgaagacagcagccacatcatctccttctgtgcggctgtggaggcctgcgttctgcacgggcttcggcggcgggcggctggcttcctacgcagcaataagattgcagccctctttatgaaagtgggcaagaacttcccgccggctgaggatctgagccgcaaggtgcaagacctggagcagctgatcgagagcgcgagaaaccagattcaaggcctccaggagaatgtgcggaagctgccgaagctgcccaacttgtccccacttgccatcaagcatctgtggattcgcacagccttgtttgagaaggtcctggacaaaattgtgcattaccttgtggaaaacagcagtaaatactatgagaaggaagctctcctgatggaccctgtggacggccccatccttgcatctttgttggtggggccctgtgccctagagtacaccaagatgaagactgcagatcacttctggaccgatccctcggctgacgaacttgtccagaggcaccgcatccacagctcccacgtgcggcaggactcgcccaccaagcgtcctgccctctgtatccagaagaggcattccagtggcagcatggatgaccggccatccctctctgcccgcgactacgtggagtccctgcatcagaactcccgtgccacccttctctatggcaaaaacaacgttcttgttcagccgagggacgacatggaggctgtgccagggtacctgtccctgcaccagacggctgacgtcatgaccttgaagtggacacccaaccagctgatgaacgggtctgtgggggacctggactatgagaagagcgtctactgggactatgccatgaccatccgcttggaggagattgtctacctgcactgccaccagcaagttgacagcggcgggacagtggtattggtcagccaggacgggatccagaggccgcccttccgcttccccaagggcgggcacctcctgcagttcctctcgtgcctggagaatgggctgctcccacatgggcagttggacccgccactgtggtcccagaggggtaagggcaaagtgtttcctaaactgcgcaagcgaagccctcagggttctgccgagtccacatcttcagacaaagatgatgatgaggccacggattatgtgttcaggatcatctaccctggcatgcagtcggaattcgtgccccaggatctgatggacgtctctgtaagcaacctcccatccctgtggcagcccagtccccggaagtcctcctgttcatcctgttcacagagtggctcggctgatggtagctcgaccaatggctgcaaccatgagagggctcccctgaaacttctctgtgacaatatgaagtaccagatcctctccagagccttctatggatggctggcctactgcagacacctgtccaccgtgagaacccacctatcagccctggtcaatcacatgatcgtgtctccagacttgccctgcgatgctggacagggactgacagccaggatctgggagcagtaccttcacgacagcacaagttacgaggagcaggagctgctgcgcctcatctactacgggggcatccagcctgagatccgcaaggccgtgtggcccttcctcctgggccactaccagttcgggatgacggaaacagaaaggaaagaggtggacgagcagattcatgcctgctatgcacagaccatggctgagtggctgggctgcgaggcgatcgtgcggcagagggagcgggagtcccatgcggccgccctggccaaatgctcatccggggccagcttggacagccacctgcaccggatgttgcacagggactcaaccatcagcaatgagtcctcccagagctgcagttcgggccgccagaacatccgcctgcacagcgactccagcagcagcacacaggtgtttgagtctgtggatgaggtggagcaggtggaggctgaaggcagattggaggagaaacagcccaagatccccaatgggaacctagtgaacggcacttgttccccagactcgggtcatccttcctcccataacttctcctcgggcctctcagagcactcagagcccagtctgagcacagaagacagtgtcttggacgcccagcggaacacccccacggtgctgcgacctagggatggcagcgtggatgacaggcagagcagcgaggccaccacatctcaggatgaggctccccgggaggagctggccgtgcaggacagcctggagagtgacctcctggccaacgagagcatggacgagttcatgtccatcacgggcagcctggacatggccctgcctgaaaaggacgatgttgtgatggagggctggaggagcagcgagacagagaaacatggccaggcggacagtgaggacaacctctcggaggagcctgagatggaaagtctcttccctgccctggcttctctggctgtgactacttctgccaacgaggtgtcccctgtgtcttccagcggcgtcacctactctccagagctgctggatctgtacacggtgaacctgcaccgcatcgagaaggatgtgcagaggtgcgaccgcaactactggtacttcacgcccgccaacttggagaagctgcgtaacatcatgtgcagctacatctggcagcacattgagatcggctatgtccagggcatgtgtgatcttctggctccactgctggtcattctggatgatgaggcccttgccttcagctgcttcacggagctcatgaagaggatgaaccagaacttcccccacggaggcgccatggacacgcactttgcaaacatgagatcgttgatccagatcctggactcagagctgtttgagctgatgcatcagaacggggactatactcacttctacttctgctaccgctggttcctgctggatttcaagcgagaactcgtctatgatgacgtcttcttggtctgggagaccatctgggcagccaaacacgtctcctctgcgcactacgtcctgttcattgcgctggctctggtggaagtctaccgtgacatcattttggagaacaacatggatttcacagacatcatcaaattctttaatgaaatggctgagcgacacaacaccaagcaagtcctgaagctggcgcgggacctcgtgtacaaggtgcagactctgattgagaacaagtgaggggcacctcaccccggcagcctcagccaagctgcccctgccccgctcctctgcttacttttcctcctggctggatgggcaccccgggagcggggtcctggtgtctgttcacaagcgtggagttcagtgcgcaaagaaactaccctgacttttacttctgggcagatggggtggagggagtaccccttcaattcagccttacattttcctgtttgaccaaagattgcccaagtctggcgttcctcccttgcaggaggtggaggttgttggtggaggaggagccatctttgtttgctggtgcccggaatggtctcctcttcttctttccctatccctccaaactgtcttgtaagatgagacctggggaggaaacttctttttggaaattggtgtagaagaggtgtgtggggctacctctatgctcctctgcaaggggcctttggcgatgttctggacatggctgaagattgacttagagattgaccctccacctcgacattactgacatttggggccaggtgattctttttgaggggactgtcccctgcattgtaggatgctgagcagcatcccgggcctcaccagatgccagtagtgccatcccccaaccatacccctggttgtgacagcccccaaaaatgtctctagacattgcgaaatgttccctgcagggcaaaattgcccccatttgagaaccactggcttggagaagggactacaaatgtacttcctcccccattcttttgacgctaagccaccctggtcctgacgcctcccctcacttagaaaaggcatacaggaggccgggcatggtggctcacacctgtaatcccagcactttgggaggctaaggtgggcggatcacaaggtcaggagttttgagaccagcctggccaacatggtgaaaccccatctctactaaaaatacaaaaattagctgggtgtggtggcgggtgcctgtaatcccagctacttgggaggctgaggcaggagaatcacttgaacctgggaggtggaggttgcagtgagttgagatcacgccactgcactccagcccgggcgacagttcaagactccatctcaaaaaaaaaaagaaaaggcacacaagagtccctcacacatctctcttggagtctgggattccatctgttgtattttctccttttttctcctctgtctgatgccagaagatacttgttttcttcttttcaagaaaagtatctccccacataggcggtggacccaaaaagtgtaggcatgagacggtcagagctctttggggtcctgctcagagtcccccaggcagggcagagtctgtatcctgctgccatcttgcaagggaaaaccgcctctccttccaagtattgggtcttggaaaggtgtgtgtttggtgaaagccacttaatggtggtggggtgcagcttttctctaagtgcagttactcactcaggacaaaggaggaaaaggaaggcagaggtcagccagggtagagggtgatgtctgttttccttgggaaacatctgctgatgaactgggtccagggccgtgctaggtctgggaacaatcctctccaggtcttcacacagagtatcaccaatccacaaacagacccgaagtgaactagtttactctgcctacctgtcctttcaatagagcagtctttcccgctcttctgttctgagaatgcacccggaatgggggaaacccagcaagcagcagagagaaaggctcttcccgggagacctgccgcctctagggtggtcagagaatagcagctgggattttggagagggagaggataggtaaagcagcgtattgaagcatttgcggaggggtgtattagtcctcccaccctgagcacaccaggacggggatgcatccttgccttgtgtgcttgtaaaggcttctttcccttggtatagcaacttcaactgcacctgaacctccaacctctgcccagcctctggtgcagggtggatagaggtctagccagcccttacttcctgaagagagctctgtgggaaactcgaggctacagtagcttcccggctcccagctcctaccctacccccaccaaagcagaaacgggagacggcaacgttctggctgccattagacttacgtctccctcccctacgtcccctagcttcccaagacaggaagaaatgtgcaaaaggcccctccggagaaaactattttgccgttcagctgttctttacagaggatgttattttagtgagacccaggtcctagaccttctgattcctatttatttttttaacagactagtctcaaagtacagcacaaaatctcttctctgccttctcttgtgatgttccagagagcatctgtggttgtgatttggaataagtcatatttatttggtttactgtgcctattcagatctctgtatgttgtgtgtgtttctgtgtcctggaattggatgcgtgggactcgttctgtccgcggagtgcactctttttttcagtgtggcccacatatcttgtaaatgtttgctgaagagttgtgtctatatatagagaaaatatatataaacagagaaatatgtgaatctgtttttttttgtctttttttttttaatttgaaagaaaaaaatgcttgcttctgaggactgtgtcctcccactcacaccccagtgaccctatatggggtcagatttttgtaatagctgcctggccttttcccagaaaaggtgaatcacttctgacttcttgtattagctggctcttaccacaagtaatgctgcattacaaatgacccaaaaagtagtggtttaaaacagccatgtatttacctcataattctgtgggtcagcatcccaggctaggttcagctaggaggttcttctgttctcagacttcttcatgtgtctgtggtcagctgatgtccagataggcaactctgcttctgatggttgtctggctgttgactagggcagtgggggaaactggattccgtatcttgcatcctccagcaggctagcttaggcttgtttacatggctatgatagcagatcccagaaggtaagcagaaacacacactgtctcttggtctcagcttctctggcataaagtcatttctgccacattctgttggtcagagtaagtcacatgactcagcccagcttcatagggtagggaaatagactgtacttcctgatgagaatctttggaaagtgacactgaaaaggagcatgggccaggcacagtggcttacccctgtaatcccagcactttgggaggccaaagcaggaggatcacttgaggccaagagttcaagatca

SEQ ID NO: 182233 - DNA, 4317 bp, Homo sapiens
  Payload ID: 15880
  Gene Symbol: SGSM1
  Gene Name: small G protein signaling modulator 1
  Uniprot ID: Q2NKQ1
  ENST ID: ENST00000400359
  CDS Start-End: 8-3454
cggagccatggcctcggcccccgcggaggcggagacccgacagaggctgctacgcaccgtcaagaaggaggtgaagcagatcatggaggaggctgtgacacgcaagtttgtccacgaagacagcagccacatcatctccttctgtgcggctgtggaggcctgcgttctgcacgggcttcggcggcgggcggctggcttcctacgcagcaataagattgcagccctctttatgaaagtgggcaagaacttcccgccggctgaggatctgagccgcaaggtgcaagacctggagcagctgatcgagagcgcgagaaaccagattcaaggcctccaggagaatgtgcggaagctgccgaagctgcccaacttgtccccacttgccatcaagcatctgtggattcgcacagccttgtttgagaaggtcctggacaaaattgtgcattaccttgtggaaaacagcagtaaatactatgagaaggaagctctcctgatggaccctgtggacggccccatccttgcatctttgttggtggggccctgtgccctagagtacaccaagatgaagactgcagatcacttctggaccgatccctcggctgacgaacttgtccagaggcaccgcatccacagctcccacgtgcggcaggactcgcccaccaagcgtcctgccctctgtatccagaagaggcattccagtggcagcatggatgaccggccatccctctctgcccgcgactacgtggagtccctgcatcagaactcccgtgccacccttctctatggcaaaaacaacgttcttgttcagccgagggacgacatggaggctgtgccagggtacctgtccctgcaccagacggctgacgtcatgaccttgaagtggacacccaaccagctgatgaacgggtctgtgggggacctggactatgagaagagcgtctactgggactatgccatgaccatccgcttggaggagattgtctacctgcactgccaccagcaagttgacagcggcgggacagtggtattggtcagccaggacgggatccagaggccgcccttccgcttccccaagggcgggcacctcctgcagttcctctcgtgcctggagaatgggctgctcccacatgggcagttggacccgccactgtggtcccagaggggtaagggcaaagtgtttcctaaactgcgcaagcgaagccctcagggttctgccgagtccacatcttcagacaaagatgatgatgaggccacggattatgtgttcaggatcatctaccctggcatgcagtcggaattcgttgcccccgacttcttgggcagcacttcctccgtctctgtgggccctgcctggatgatggttcctgcaggccggtccatgctggtggtggccagagggagtcagtgggagccagccagatgggacactactctccccacgccaagcccgaaggagcagccccccatgccccaggatctgatggacgtctctgtaagcaacctcccatccctgtggcagcccagtccccggaagtcctcctgttcatcctgttcacagagtggctcggctgatggtagctcgaccaatggctgcaaccatgagagggctcccctgaaacttctctgtgacaatatgaagtaccagatcctctccagagccttctatggatggctggcctactgcagacacctgtccaccgtgagaacccacctatcagccctggtcaatcacatgatcgtgtctccagacttgccctgcgatgctggacagggactgacagccaggatctgggagcagtaccttcacgacagcacaagttacgaggagcaggagctgctgcgcctcatctactacgggggcatccagcctgagatccgcaaggccgtgtggcccttcctcctgggccactaccagttcgggatgacggaaacagaaaggaaagaggtggacgagcagattcatgcctgctatgcacagaccatggctgagtggctgggctgcgaggcgatcgtgcggcagagggagcgggagtcccatgcggccgccctggccaaatgctcatccggggccagcttggacagccacctgcaccggatgttgcacagggactcaaccatcagcaatgagtcctcccagagctgcagttcgggccgccagaacatccgcctgcacagcgactccagcagcagcacacaggtgtttgagtctgtggatgaggtggagcaggtggaggctgaaggcagattggaggagaaacagcccaagatccccaatgggaacctagtgaacggcacttgttccccagactcgggtcatccttcctcccataacttctcctcgggcctctcagagcactcagagcccagtctgagcacagaagacagtgtcttggacgcccagcggaacacccccacggtgctgcgacctagggatggcagcgtggatgacaggcagagcagcgaggccaccacatctcaggatgaggctccccgggaggagctggccgtgcaggacagcctggagagtgacctcctggccaacgagagcatggacgagttcatgtccatcacgggcagcctggacatggccctgcctgaaaaggacgatgttgtgatggagggctggaggagcagcgagacagagaaacatggccaggcggacagtgaggacaacctctcggaggagcctgagatggaaagtctcttccctgccctggcttctctggctgtgactacttctgccaacgaggtgtcccctgtgtcttccagcggcgtcacctactctccagagctgctggatctgtacacggtgaacctgcaccgcatcgagaaggatgtgcagaggtgcgaccgcaactactggtacttcacgcccgccaacttggagaagctgcgtaacatcatgtgcagctacatctggcagcacattgagatcggctatgtccagggcatgtgtgatcttctggctccactgctggtcattctggatgatgaggcccttgccttcagctgcttcacggagctcatgaagaggatgaaccagaacttcccccacggaggcgccatggacacgcactttgcaaacatgagatcgttgatccagatcctggactcagagctgtttgagctgatgcatcagaacggggactatactcacttctacttctgctaccgctggttcctgctggatttcaagcgagaactcgtctatgatgacgtcttcttggtctgggagaccatctgggcagccaaacacgtctcctctgcgcactacgtcctgttcattgcgctggctctggtggaagtctaccgtgacatcattttggagaacaacatggatttcacagacatcatcaaattctttaatgaaatggctgagcgacacaacaccaagcaagtcctgaagctggcgcgggacctcgtgtacaaggtgcagactctgattgagaacaagtgaggggcacctcaccccggcagcctcagccaagctgcccctgccccgctcctctgcttacttttcctcctggctggatgggcaccccgggagcggggtcctggtgtctgttcacaagcgtggagttcagtgcgcaaagaaactaccctgacttttacttctgggcagatggggtggagggagtaccccttcaattcagccttacattttcctgtttgaccaaagattgcccaagtctggcgttcctcccttgcaggaggtggaggttgttggtggaggaggagccatctttgtttgctggtgcccggaatggtctcctcttcttctttccctatccctccaaactgtcttgtaagatgagacctggggaggaaacttctttttggaaattggtgtagaagaggtgtgtggggctacctctatgctcctctgcaaggggcctttggcgatgttctggacatggctgaagattgacttagagattgaccctccacctcgacattactgacatttggggccaggtgattctttttgaggggactgtcccctgcattgtaggatgctgagcagcatcccgggcctcaccagatgccagtagtgccatcccccaaccatacccctggttgtgacagcccccaaaaatgtctctagacattgcgaaatgttccctgcagggcaaaattgcccccatttgagaaccactggcttggagaagggactacaaatgtacttcctcccccattcttttgacgctaagccaccctggtcctgacgcctcccctcacttagaaaaggcatacaggaggccgggcatggtggctcacacctgtaatcccagcactttgggaggctaaggtgggcggatc

SEQ ID NO: 182234 - DNA, 5991 bp, Homo sapiens
  Payload ID: 15880
  Gene Symbol: SGSM1
  Gene Name: small G protein signaling modulator 1
  ENST ID: ENST00000610372
  CDS Start-End: 158-3421
gcggccgcctcgggtcctgacgtcgggcgccctccggccgtcactcagcgctcggccccgccccgccgcggctgcagcagcagcgccgcggccggaggagctaccgccgccaccgccgccaccgcctcctgggactcggaacgcagcgctcggagccatggcctcggcccccgcggaggcggagacccgacagaggctgctacgcaccgtcaagaaggaggtgaagcagatcatggaggaggctgtgacacgcaagtttgtccacgaagacagcagccacatcatctccttctgtgcggctgtggaggcctgcgttctgcacgggcttcggcggcgggcggctggcttcctacgcagcaataagattgcagccctctttatgaaagtgggcaagaacttcccgccggctgaggatctgagccgcaaggtgcaagacctggagcagctgatcgagagcgcgagaaaccagattcaaggcctccaggagaatgtgcggaagctgccgaagctgcccaacttgtccccacttgccatcaagcatctgtggattcgcacagccttgtttgagaaggtcctggacaaaattgtgcattaccttgtggaaaacagcagtaaatactatgagaaggaagctctcctgatggaccctgtggacggccccatccttgcatctttgttggtggggccctgtgccctagagtacaccaagatgaagactgcagatcacttctggaccgatccctcggctgacgaacttgtccagaggcaccgcatccacagctcccacgtgcggcaggactcgcccaccaagcgtcctgccctctgtatccagaagaggcattccagtggcagcatggatgaccggccatccctctctgcccgcgactacgtggagtccctgcatcagaactcccgtgccacccttctctatggcaaaaacaacgttcttgttcagccgagggacgacatggaggctgtgccagggtacctgtccctgcaccagacggctgacgtcatgaccttgaagtggacacccaaccagctgatgaacgggtctgtgggggacctggactatgagaagagcgtctactgggactatgccatgaccatccgcttggaggagattgtctacctgcactgccaccagcaagttgacagcggcgggacagtggtattggtcagccaggacgggatccagaggccgcccttccgcttccccaagggcgggcacctcctgcagttcctctcgtgcctggagaatgggctgctcccacatgggcagttggacccgccactgtggtcccagaggggtaagggcaaagtgtttcctaaactgcgcaagcgaagccctcagggttctgccgagtccacatcttcagacaaagatgatgatgaggccacggattatgtgttcaggatcatctaccctggcatgcagtcggaattcgttgcccccgacttcttgggcagcacttcctccgtctctgtgggccctgcctggatgatggttcctgcaggccggtccatgctggtggtggccagagggagtcagtgggagccagccagatgggacactactctccccacgccaagcccgaaggagcagccccccatgccccaggatctgatggacgtctctgtaagcaacctcccatccctgtggcagcccagtccccggaagtcctcctgttcatcctgttcacagagtggctcggctgatggtagctcgaccaatggctgcaaccatgagagggctcccctgaaacttctctgtgacaatatgaagtaccagatcctctccagagccttctatggatggctggcctactgcagacacctgtccaccgtgagaacccacctatcagccctggtcaatcacatgatcgtgtctccagacttgccctgcgatgctggacagggactgacagccaggatctgggagcagtaccttcacgacagcacaagttacgaggagcaggagctgctgcgcctcatctactacgggggcatccagcctgagatccgcaaggccgtgtggcccttcctcctgggccactaccagttcgggatgacggaaacagaaaggaaagagtcctcccagagctgcagttcgggccgccagaacatccgcctgcacagcgactccagcagcagcacacaggtgtttgagtctgtggatgaggtggagcaggtggaggctgaaggcagattggaggagaaacagcccaagatccccaatgggaacctagtgaacggcacttgttccccagactcgggtcatccttcctcccataacttctcctcgggcctctcagagcactcagagcccagtctgagcacagaagacagtgtcttggacgcccagcggaacacccccacggtgctgcgacctagggatggcagcgtggatgacaggcagagcagcgaggccaccacatctcaggatgaggctccccgggaggagctggccgtgcaggacagcctggagagtgacctcctggccaacgagagcatggacgagttcatgtccatcacgggcagcctggacatggccctgcctgaaaaggacgatgttgtgatggagggctggaggagcagcgagacagagaaacatggccaggcggacagtgaggacaacctctcggaggagcctgagatggaaagtctcttccctgccctggcttctctggctgtgactacttctgccaacgaggtgtcccctgtgtcttccagcggcgtcacctactctccagagctgctggatctgtacacggtgaacctgcaccgcatcgagaaggatgtgcagaggtgcgaccgcaactactggtacttcacgcccgccaacttggagaagctgcgtaacatcatgtgcagctacatctggcagcacattgagatcggctatgtccagggcatgtgtgatcttctggctccactgctggtcattctggatgatgaggcccttgccttcagctgcttcacggagctcatgaagaggatgaaccagaacttcccccacggaggcgccatggacacgcactttgcaaacatgagatcgttgatccagatcctggactcagagctgtttgagctgatgcatcagaacggggactatactcacttctacttctgctaccgctggttcctgctggatttcaagcgagaactcgtctatgatgacgtcttcttggtctgggagaccatctgggcagccaaacacgtctcctctgcgcactacgtcctgttcattgcgctggctctggtggaagtctaccgtgacatcattttggagaacaacatggatttcacagacatcatcaaattctttaatgaaatggctgagcgacacaacaccaagcaagtcctgaagctggcgcgggacctcgtgtacaaggtgcagactctgattgagaacaagtgaggggcacctcaccccggcagcctcagccaagctgcccctgccccgctcctctgcttacttttcctcctggctggatgggcaccccgggagcggggtcctggtgtctgttcacaagcgtggagttcagtgcgcaaagaaactaccctgacttttacttctgggcagatggggtggagggagtaccccttcaattcagccttacattttcctgtttgaccaaagattgcccaagtctggcgttcctcccttgcaggaggtggaggttgttggtggaggaggagccatctttgtttgctggtgcccggaatggtctcctcttcttctttccctatccctccaaactgtcttgtaagatgagacctggggaggaaacttctttttggaaattggtgtagaagaggtgtgtggggctacctctatgctcctctgcaaggggcctttggcgatgttctggacatggctgaagattgacttagagattgaccctccacctcgacattactgacatttggggccaggtgattctttttgaggggactgtcccctgcattgtaggatgctgagcagcatcccgggcctcaccagatgccagtagtgccatcccccaaccatacccctggttgtgacagcccccaaaaatgtctctagacattgcgaaatgttccctgcagggcaaaattgcccccatttgagaaccactggcttggagaagggactacaaatgtacttcctcccccattcttttgacgctaagccaccctggtcctgacgcctcccctcacttagaaaaggcatacaggaggccgggcatggtggctcacacctgtaatcccagcactttgggaggctaaggtgggcggatcacaaggtcaggagttttgagaccagcctggccaacatggtgaaaccccatctctactaaaaatacaaaaattagctgggtgtggtggcgggtgcctgtaatcccagctacttgggaggctgaggcaggagaatcacttgaacctgggaggtggaggttgcagtgagttgagatcacgccactgcactccagcccgggcgacagttcaagactccatctcaaaaaaaaaaagaaaaggcacacaagagtccctcacacatctctcttggagtctgggattccatctgttgtattttctccttttttctcctctgtctgatgccagaagatacttgttttcttcttttcaagaaaagtatctccccacataggcggtggacccaaaaagtgtaggcatgagacggtcagagctctttggggtcctgctcagagtcccccaggcagggcagagtctgtatcctgctgccatcttgcaagggaaaaccgcctctccttccaagtattgggtcttggaaaggtgtgtgtttggtgaaagccacttaatggtggtggggtgcagcttttctctaagtgcagttactcactcaggacaaaggaggaaaaggaaggcagaggtcagccagggtagagggtgatgtctgttttccttgggaaacatctgctgatgaactgggtccagggccgtgctaggtctgggaacaatcctctccaggtcttcacacagagtatcaccaatccacaaacagacccgaagtgaactagtttactctgcctacctgtcctttcaatagagcagtctttcccgctcttctgttctgagaatgcacccggaatgggggaaacccagcaagcagcagagagaaaggctcttcccgggagacctgccgcctctagggtggtcagagaatagcagctgggattttggagagggagaggataggtaaagcagcgtattgaagcatttgcggaggggtgtattagtcctcccaccctgagcacaccaggacggggatgcatccttgccttgtgtgcttgtaaaggcttctttcccttggtatagcaacttcaactgcacctgaacctccaacctctgcccagcctctggtgcagggtggatagaggtctagccagcccttacttcctgaagagagctctgtgggaaactcgaggctacagtagcttcccggctcccagctcctaccctacccccaccaaagcagaaacgggagacggcaacgttctggctgccattagacttacgtctccctcccctacgtcccctagcttcccaagacaggaagaaatgtgcaaaaggcccctccggagaaaactattttgccgttcagctgttctttacagaggatgttattttagtgagacccaggtcctagaccttctgattcctatttatttttttaacagactagtctcaaagtacagcacaaaatctcttctctgccttctcttgtgatgttccagagagcatctgtggttgtgatttggaataagtcatatttatttggtttactgtgcctattcagatctctgtatgttgtgtgtgtttctgtgtcctggaattggatgcgtgggactcgttctgtccgcggagtgcactctttttttcagtgtggcccacatatcttgtaaatgtttgctgaagagttgtgtctatatatagagaaaatatatataaacagagaaatatgtg

SEQ ID NO: 182235 - DNA, 4863 bp, Homo sapiens
  Payload ID: 15881
  Gene Symbol: SGSM2
  Gene Name: small G protein signaling modulator 2
  Uniprot ID: O43147
  ENST ID: ENST00000268989
  CDS Start-End: 178-3333
ggaagatggctgcggagccgagcaccgggcagtggctgcggcggcggcggcggcggcgggccgggagcgcggcgggcgggggctccgccttgcgcgtggggcgctgagccgagaggcgcggaggcggcgagggcgcgggggctctgaggaccgctcggcgccgcctcctgccacaccatgggcagcgcagaggacgcagtcaaagagaaactgctgtggaacgtgaagaaggaggtgaagcaaatcatggaggaggctgtcaccaggaagtttgtgcatgaagacagcagccacatcattgctttatgtggtgcagtggaggcttgcctcttgcatcagctgagacgccgtgccgctggcttcctgcgcagtgacaagatggcagccctgttcaccaaggtggggaagacgtgcccagtggcgggggagatttgccacaaggtacaggagctgcagcaacaagcagagggcaggaaaccctcaggggtcagccaggaggccctgcggagacagggctcagccagcgggaaggccccggccctcagccctcaggccttgaaacacgtatgggtacgcacggcgctcatcgagaaagttctggacaaggtcgtgcaatacctggcggaaaactgcagcaagtactacgagaaggaggcactgctggcagaccctgtgttcggcccgatcctggcctctcttctagtgggaccctgtgccttggaatacactaagctcaagacagccgatcactactggactgacccctctgctgatgagctggtccagcggcaccgcatccggggtccacctactcgccaggactcccctgcaaagcgcccagccctggggatccggaaacggcactcaagcggcagcgcgtcggaggacaggctggctgcctgtgcccgcgagtgtgtggagtccctgcaccagaactcacggacgcggctgctctatggcaagaaccacgtgctggtgcagccgaaggaggatatggaggcggtccctggctacctctccctgcaccagtctgcagagagcctgactctgaagtggacccccaaccagctcatgaatgggactctgggggactccgagctggaaaagagcgtttactgggactatgccctcgtggtgcccttcagccaggtcgtgtgcatccactgccaccagcaaaagagcggtggcacgcttgtgctggtgagccaggatggcatccagaggccgccgctgcatttcccacagggaggacacctgctgtcctttctgtcctgtctggagaatgggctgctgcctcggggacagctagagcccccgctgtggacccagcaagggaaggggaaagtgttccccaagctacggaaacgaagcagcattcgctccgtggatatggaggagatgggcacggggcgggccaccgactatgtgttccggatcatctaccccggccacaggcacgagcacatcactattaactaccaccacctagcggccagccgcgcggcctcggtggacgatgatgaggaagaggaggataaactgcacgcgatgctctcaatgatctgctcgcggaacctcacagctcccaatccgatgaaagacgctggtgacatgatcgagatgcagggctttgggcccagcctgccagcctggcacctggagcccctgtgcagtcagggctcctcctgcctctcctgctcctccagcagctccccacatgcaacccccagccactgtagctgcatccccgaccggttgccgctcaggctactgtgtgagagtatgaagaggcagatcgtgtcccgggccttctacggctggctggcacactgccgccacctgtccacggtgcggacccacctgtcggcgctggtgcaccatagcgttatcccacctgaccggcccccgggggcctccgcgggcctcaccaaggacgtgtggagcaagtatcagaaggacaaaaagaactacaaagagctggagctgctgcggcaagtttactacggaggcatagagcacgagatccgcaaggacgtctggccctttctgcttggccactacaagttcggcatgagcaagaaggagatggagcaggtggacgcagtggtggcagcaaggtaccagcaggtgttggcagagtggaaggcctgcgaggtggtggtgaggcagcgggagcgggaggcccacccagccacacgcaccaagttctcctcaggcagcagcatcgacagccacgtgcagcgcctcatccaccgagactccaccatcagcaacgatgtgtttatctcagtggatgatctggaacccccggagccccaggaccctgaagattccagaccaaaacctgagcaggaagcaggacccgggactccgggcaccgccgtggtggagcagcagcattccgtggagttcgactctccagactcaggactgccctcctctcgcaattactccgtggcctcgggcatccagtcaagcctagatgaggggcagagcgtgggcttcgaagaggaggacggcggtggggaggaaggctccagtgggcccggccctgcagctcacactttgagggagccccaggatcccagccaggagaagcctcaggccggagaactggaggccggagaggagcttgcggctgtgtgtgcggctgcctacactatagaattactggacactgtggccttaaacctgcaccgcatagacaaggatgtgcagaggtgtgaccgcaactactggtacttcacgccccccaacctcgagaggctcagagacgtcatgtgcagctacgtgtgggagcacctggacgtgggctatgtgcagggcatgtgcgatctgctggcgcctctcctggtcaccctcgacaatgatcagctggcctacagctgcttcagccacctcatgaagaggatgagccagaacttccccaacgggggtgccatggacacccactttgccaacatgcgctccctcatccagatcctggactcagagctgtttgagctgatgcatcagaatggagactacacccacttctacttctgttatcgctggttcctgctggattttaagagagaactgctgtatgaggatgtgtttgctgtgtgggaggtgatctgggcagccaggcacatctcatcggagcactttgtcctgttcatcgccctcgccctggtggaggcctaccgagagatcatccgtgacaacaacatggacttcactgacatcatcaagtttttcaatgaacgtgctgagcatcacgatgcccaggagatcctgcggattgcccgggacctcgtccacaaggtgcagatgctcatagagaacaagtgagctggggccaggaggcagcagccgtgcagagcctgggctccggcagggagaggtgcaggggagtcaccgcccagacctccccagccaccaaccgaccccacctctgttcctaacaaagcggttgtgagcctggatccgactcccggcagtgctgaccctgcagggcaagtcaggggccaggatgccctcggatcagggccgggatgggaggggtcagcctcagggagcagctgccttgggggacacacctactctgctcccctctcacacatctgggagtagccccactgccacctgcagccgcagcctggactgctgcccacgagtgaacctggggccccacaggattaacaggggctatagcggcctgggccctactcagctggggtggcagagggcgagaggctctgtgctgtgtcccttctgagggtccctttgcagtcccagtatattgtgcgtgcaccagccccagctggagcaaccaaaactgcttctggtttaggcacacgtcacgggtgcgggagacccgggcacgggagacccgggccgccttcaggccgctcccccgagattctggggcagtcggaagatgtgggccctgggtgggagcagcccacttcagcagcactgccactgcctttggccacctgaggtgacccccaggcctccccggccttgtacagtgtacctctgtgtatctgtacagcctcgctcctgccaccccacccttgcgttctgcattaggtacttccctgaaaaccacgtgtaagaagtgatgcttttgccagtggatgatctggaatgcgaccggagcacttgctctgaggaatcccagggtgactctgtcggggaagaatccggtcacagcctcccctcagagacaggcctcagttcgagggcagcccattatctgtcgcagacatctgccatgtccctgagactgcgggaggcaggggatgcatgggtgtccccatctgtccctggtgagaagcaaggctagctctgccttccacatgcttctcaggatgccaagaggcctaggaacccagaaacccccttggaggagctgtgtatgcgggggtgccaggaagggcatagctcctgcccccaggcctaggcatgctgcttgctcggccatccccacttcctcctctaccccaacacatgcaggctaggccttgccctggaacatggaggccctgcccggggctggggcctagtccagcagccaccaaagtctggcagactttctgcatttgagaaacatgacaaagggccccgcagcccttctgcacccagcacagcctgcccagcccagccctgcccccgggcactgcacagcctgtctgggggccagaccaccccattgtccatccttgttgtccgtgagtccttggcctccaccaagcacgtgtggccattgtgtgcctgccttagtgactccgtggttttgtgaggagcagagtgtgtatgatttttgcctcagaaactatactcttctgtgtaacagaccaataaacaacatttgtc

SEQ ID NO: 182236 - DNA, 4734 bp, Homo sapiens
  Payload ID: 15881
  Gene Symbol: SGSM2
  Gene Name: small G protein signaling modulator 2
  Uniprot ID: O43147
  ENST ID: ENST00000426855
  CDS Start-End: 176-3196
aagatggctgcggagccgagcaccgggcagtggctgcggcggcggcggcggcggcgggccgggagcgcggcgggcgggggctccgccttgcgcgtggggcgctgagccgagaggcgcggaggcggcgagggcgcgggggctctgaggaccgctcggcgccgcctcctgccacaccatgggcagcgcagaggacgcagtcaaagagaaactgctgtggaacgtgaagaaggaggtgaagcaaatcatggaggaggctgtcaccaggaagtttgtgcatgaagacagcagccacatcattgctttatgtggtgcagtggaggcttgcctcttgcatcagctgagacgccgtgccgctggcttcctgcgcagtgacaagatggcagccctgttcaccaaggtggggaagacgtgcccagtggcgggggagatttgccacaaggtacaggagctgcagcaacaagcagagggcaggaaaccctcaggggtcagccaggaggccctgcggagacagggctcagccagcgggaaggccccggccctcagccctcaggccttgaaacacgtatgggtacgcacggcgctcatcgagaaagttctggacaaggtcgtgcaatacctggcggaaaactgcagcaagtactacgagaaggaggcactgctggcagaccctgtgttcggcccgatcctggcctctcttctagtgggaccctgtgccttggaatacactaagctcaagacagccgatcactactggactgacccctctgctgatgagctggtccagcggcaccgcatccggggtccacctactcgccaggactcccctgcaaagcgcccagccctggggatccggaaacggcactcaagcggcagcgcgtcggaggacaggctggctgcctgtgcccgcgagtgtgtggagtccctgcaccagaactcacggacgcggctgctctatggcaagaaccacgtgctggtgcagccgaaggaggatatggaggcggtccctggctacctctccctgcaccagtctgcagagagcctgactctgaagtggacccccaaccagctcatgaatgggactctgggggactccgagctggaaaagagcgtttactgggactatgccctcgtggtgcccttcagccaggtcgtgtgcatccactgccaccagcaaaagagcggtggcacgcttgtgctggtgagccaggatggcatccagaggccgccgctgcatttcccacagggaggacacctgctgtcctttctgtcctgtctggagaatgggctgctgcctcggggacagctagagcccccgctgtggacccagcaagggaaggggaaagtgttccccaagctacggaaacgaagcagcattcgctccgtggatatggaggagatgggcacggggcgggccaccgactatgtgttccggatcatctaccccggccacaggcacgagcacaacgctggtgacatgatcgagatgcagggctttgggcccagcctgccagcctggcacctggagcccctgtgcagtcagggctcctcctgcctctcctgctcctccagcagctccccacatgcaacccccagccactgtagctgcatccccgaccggttgccgctcaggctactgtgtgagagtatgaagaggcagatcgtgtcccgggccttctacggctggctggcacactgccgccacctgtccacggtgcggacccacctgtcggcgctggtgcaccatagcgttatcccacctgaccggcccccgggggcctccgcgggcctcaccaaggacgtgtggagcaagtatcagaaggacaaaaagaactacaaagagctggagctgctgcggcaagtttactacggaggcatagagcacgagatccgcaaggacgtctggccctttctgcttggccactacaagttcggcatgagcaagaaggagatggagcaggtggacgcagtggtggcagcaaggtaccagcaggtgttggcagagtggaaggcctgcgaggtggtggtgaggcagcgggagcgggaggcccacccagccacacgcaccaagttctcctcaggcagcagcatcgacagccacgtgcagcgcctcatccaccgagactccaccatcagcaacgatgtgtttatctcagtggatgatctggaacccccggagccccaggaccctgaagattccagaccaaaacctgagcaggaagcaggacccgggactccgggcaccgccgtggtggagcagcagcattccgtggagttcgactctccagactcaggactgccctcctctcgcaattactccgtggcctcgggcatccagtcaagcctagatgaggggcagagcgtgggcttcgaagaggaggacggcggtggggaggaaggctccagtgggcccggccctgcagctcacactttgagggagccccaggatcccagccaggagaagcctcaggccggagaactggaggccggagaggagcttgcggctgtgtgtgcggctgcctacactatagaattactggacactgtggccttaaacctgcaccgcatagacaaggatgtgcagaggtgtgaccgcaactactggtacttcacgccccccaacctcgagaggctcagagacgtcatgtgcagctacgtgtgggagcacctggacgtgggctatgtgcagggcatgtgcgatctgctggcgcctctcctggtcaccctcgacaatgatcagctggcctacagctgcttcagccacctcatgaagaggatgagccagaacttccccaacgggggtgccatggacacccactttgccaacatgcgctccctcatccagatcctggactcagagctgtttgagctgatgcatcagaatggagactacacccacttctacttctgttatcgctggttcctgctggattttaagagagaactgctgtatgaggatgtgtttgctgtgtgggaggtgatctgggcagccaggcacatctcatcggagcactttgtcctgttcatcgccctcgccctggtggaggcctaccgagagatcatccgtgacaacaacatggacttcactgacatcatcaagtttttcaatgaacgtgctgagcatcacgatgcccaggagatcctgcggattgcccgggacctcgtccacaaggtgcagatgctcatagagaacaagtgagctggggccaggaggcagcagccgtgcagagcctgggctccggcagggagaggtgcaggggagtcaccgcccagacctccccagccaccaaccgaccccacctctgttcctaacaaagcggttgtgagcctggatccgactcccggcagtgctgaccctgcagggcaagtcaggggccaggatgccctcggatcagggccgggatgggaggggtcagcctcagggagcagctgccttgggggacacacctactctgctcccctctcacacatctgggagtagccccactgccacctgcagccgcagcctggactgctgcccacgagtgaacctggggccccacaggattaacaggggctatagcggcctgggccctactcagctggggtggcagagggcgagaggctctgtgctgtgtcccttctgagggtccctttgcagtcccagtatattgtgcgtgcaccagccccagctggagcaaccaaaactgcttctggtttaggcacacgtcacgggtgcgggagacccgggcacgggagacccgggccgccttcaggccgctcccccgagattctggggcagtcggaagatgtgggccctgggtgggagcagcccacttcagcagcactgccactgcctttggccacctgaggtgacccccaggcctccccggccttgtacagtgtacctctgtgtatctgtacagcctcgctcctgccaccccacccttgcgttctgcattaggtacttccctgaaaaccacgtgtaagaagtgatgcttttgccagtggatgatctggaatgcgaccggagcacttgctctgaggaatcccagggtgactctgtcggggaagaatccggtcacagcctcccctcagagacaggcctcagttcgagggcagcccattatctgtcgcagacatctgccatgtccctgagactgcgggaggcaggggatgcatgggtgtccccatctgtccctggtgagaagcaaggctagctctgccttccacatgcttctcaggatgccaagaggcctaggaacccagaaacccccttggaggagctgtgtatgcgggggtgccaggaagggcatagctcctgcccccaggcctaggcatgctgcttgctcggccatccccacttcctcctctaccccaacacatgcaggctaggccttgccctggaacatggaggccctgcccggggctggggcctagtccagcagccaccaaagtctggcagactttctgcatttgagaaacatgacaaagggccccgcagcccttctgcacccagcacagcctgcccagcccagccctgcccccgggcactgcacagcctgtctgggggccagaccaccccattgtccatccttgttgtccgtgagtccttggcctccaccaagcacgtgtggccattgtgtgcctgccttagtgactccgtggttttgtgaggagcagagtgtgtatgatttttgcctcagaaactatactcttctgtgtaacagaccaataaacaacatttgtcaacactgg

SEQ ID NO: 182237 - DNA, 3410 bp, Homo sapiens
  Payload ID: 15881
  Gene Symbol: SGSM2
  Gene Name: small G protein signaling modulator 2
  Uniprot ID: O43147
  ENST ID: ENST00000574563
  CDS Start-End: 68-3031
gagaggcgcggaggcggcgagggcgcgggggctctgaggaccgctcggcgccgcctcctgccacaccatgggcagcgcagaggacgcagtcaaagagaaactgctgtggaacgtgaagaaggaggtgaagcaaatcatggaggaggctgtcaccaggaagtttgtgcatgaagacagcagccacatcattgctttatgtggtgcagtggaggcttgcctcttgcatcagctgagacgccgtgccgctggcttcctgcgcagtgacaagatggcagccctgttcaccaaggtggggaagacgtgcccagtggcgggggagatttgccacaaggtacaggagctgcagcaacaagcagagggcaggaaaccctcaggggtcagccaggaggccctgcggagacagggctcagccagcgggaaggccccggccctcagccctcaggccttgaaacacgtatgggtacgcacggcgctcatcgagaaagttctggacaaggtcgtgcaatacctggcggaaaactgcagcaagtactacgagaaggaggcactgctggcagaccctgtgttcggcccgatcctggcctctcttctagtgggaccctgtgccttggaatacactaagctcaagacagccgatcactactggactgacccctctgctgatgagctggtccagcggcaccgcatccggggtccacctactcgccaggactcccctgcaaagcgcccagccctggggatccggaaacggcactcaagcggcagcgcgtcggaggacaggctggctgcctgtgcccgcgagtgtgtggagtccctgcaccagaactcacggacgcggctgctctatggcaagaaccacgtgctggtgcagccgaaggaggatatggaggcggtccctggctacctctccctgcaccagtctgcagagagcctgactctgaagtggacccccaaccagctcatgaatgggactctgggggactccgagctggaaaagagcgtttactgggactatgccctcgtggtgcccttcagccaggtcgtgtgcatccactgccaccagcaaaagagcggtggcacgcttgtgctggtgagccaggatggcatccagaggccgccgctgcatttcccacagggaggacacctgctgtcctttctgtcctgtctggagaatgggctgctgcctcggggacagctagagcccccgctgtggacccagcaagggaaggggaaagtgttccccaagctacggaaacgaagcagcattcgctccgtggatatggaggagatgggcacggggcgggccaccgactatgtgttccggatcatctaccccggccacaggcacgagcacaacgctggtgacatgatcgagatgcagggctttgggcccagcctgccagcctggcacctggagcccctgtgcagtcagggctcctcctgcctctcctgctcctccagcagctccccacatgcaacccccagccactgtagctgcatccccgaccggttgccgctcaggctactgtgtgagagtatgaagaggcagatcgtgtcccgggccttctacggctggctggcacactgccgccacctgtccacggtgcggacccacctgtcggcgctggtgcaccatagcgttatcccacctgaccggcccccgggggcctccgcgggcctcaccaaggacgtgtggagcaagtatcagaaggacaaaaagaactacaaagagctggagctgctgcggcaagtttactacggaggcatagagcacgagatccgcaaggacgtctggccctttctgcttggccactacaagttcggcatgagcaagaaggagatggagcaggtggacgcagtggtggcagcaaggtaccagcaggtgttggcagagtggaaggcctgcgaggtggtggtgaggcagcgggagcgggaggcccacccagccacacgcaccaagttctcctcaggcagcagcatcgacagccacgtgcagcgcctcatccaccgagactccaccatcagcaacgatgtgtttatctcagtggatgatctggaacccccggagccccaggaccctgaagattccagaccaaaacctgagcaggaagcaggacccgggactccgggcaccgccgtggtggagcagcagcattccgtggagttcgactctccagactcaggactgccctcctctcgcaattactccgtggcctcgggcatccagtcaagcctagatgaggggcagagcgtgggcttcgaagaggaggacggcggtggggaggaaggctccagtgggcccggccctgcagctcacactttgagggagccccaggatcccagccaggagaagcctcaggccggagaactggaggccggagaggagcttgcggctgtgtgtgcggctgcctacactatagaattactggacactgtggccttaaacctgcaccgcatagacaaggatgtgcagaggtgtgaccgcaactactggtacttcacgccccccaacctcgagaggctcagagacgtcatgtgcagctacgtgtgggagcacctggacgtgggctatgtgcagggcatgtgcgatctgctggcgcctctcctggtcaccctcgacaatgatcagctggcctacagctgcttcagccacctcatgaagaggatgagccagaacttccccaacgggggtgccatggacacccactttgccaacatgcgctccctcatccagatcctggactcagagctgtttgagctgatgcatcagaatggagactacacccacttctacttctgttatcgctggttcctgctggattttaagagagaactgctgtatgaggatgtgtttgctgtgtgggaggtgatctgggcagccaggcacatctcatcggagcactttgtcctgttcatcgccctcgccctggtggaggcctaccgagagatcatccgtgacaacaacatggacttcactgacatcatcaagtttttcaatggtacttccctgaaaaccacgtgtaagaagtgatgcttttgccagtggatgatctggaatgcgaccggagcacttgctctgaggaatcccagggtgactctgtcggggaagaatccggtcacagcctcccctcagagacaggcctcagttcgagggcagcccattatctgtcgcagacatctgccatgtccctgagactgcgggaggcaggggatgcatgggtgtccccatctgtccctggtgagaagcaaggctagctctgccttccacatgcttctcaggatgccaagaggcctaggaacccagaaacccccttggaggagctgtgtatgcgggggtgccaggaagggcatagctcctgcccccaggcctaggcatgctgcttgctcggccatccccacttcctcctcta

SEQ ID NO: 182238 - DNA, 460 bp, Homo sapiens
  Payload ID: 15881
  Gene Symbol: SGSM2
  Gene Name: small G protein signaling modulator 2
  ENST ID: ENST00000572875
  CDS Start-End: 192-281
tctgtgcggggctcggaagatggctgcggagccgagcaccgggcagtggctgcggcggcggcggcggcggcgggccgggagcgcggcgggcgggggctccgccttgcgcgtggggcgctgagccgagaggcgcggaggcggcgagggcgcgggggctctgaggaccgctcggcgccgcctcctgccacaccatgggcagcgcagaggacgcagtcaaagagaaactgctgtggaacgtgaagaaggaggtgcagtggaggcttgcctcttgcatcagctgagacgccgtgccgctggcttcctgcgcagtgacaagatggcagccctgttcaccaaggtggggaagacgtgcccagtggcgggggagatttgccacaaggtacaggagctgcagcaacaagcagagggcaggaaaccctcaggggtcagccaggaggccctgcggagacagggctcagcc

SEQ ID NO: 182239 - DNA, 392 bp, Homo sapiens
  Payload ID: 15881
  Gene Symbol: SGSM2
  Gene Name: small G protein signaling modulator 2
  ENST ID: ENST00000570431
  CDS Start-End: 107-392
ggctgctctatggcaagaaccacgtgctggtgcagccggccatccctgagagcctctcagcccttcatcgtcggtcttccggtgtctcccgctgtagaaggaggatatggaggcggtccctggctacctctccctgcaccagtctgcagagagcctgactctgaagtggacccccaaccagctcatgaatgggactctgggggactccgagctggaaaagagcgtttactgggactatgccctcgtggtgcccttcagccaggtcgtgtgcatccactgccaccagcaaaagagcggtggcacgcttgtgctggtgagccaggatggcatccagaggccgccgctgcatttcccacagggaggacacctgctgtcctttctgtcctgtctgg

SEQ ID NO: 182240 - DNA, 644 bp, Homo sapiens
  Payload ID: 15881
  Gene Symbol: SGSM2
  Gene Name: small G protein signaling modulator 2
  ENST ID: ENST00000572925
  CDS Start-End: 1-110
acatggacttcactgacatcatcaagtttttcaatgaacgtgctgagcatcacgatgcccaggagatcctgcggattgcccgggacctcgtccacaaggtacttccctgaaaaccacgtgtaagaagtgatgcttttgccagtggatgatctggaatgcgaccggagcacttgctctgaggaatcccagggtgactctgtcggggaagaatccggtcacagcctcccctcagagacaggcctcagttcgagggcagcccattatctgtcgcagacatctgccatgtccctgagactgcgggaggcaggggatgcatgggtgtccccatctgtccctggtgagaagcaaggctagctctgccttccacatgcttctcaggatgccaagaggcctaggaacccagaaacccccttggaggagctgtgtatgcgggggtgccaggaagggcatagctcctgcccccaggcctaggcatgctgcttgctcggccatccccacttcctcctctaccccaacacatgcaggctaggccttgccctggaacatggaggccctgcccggggctggggcctagtccagcagccaccaaagtctggcagactttctgcatttgagaaacatgacaaagggccccgcagcccttc

SEQ ID NO: 182241 - DNA, 571 bp, Homo sapiens
  Payload ID: 15881
  Gene Symbol: SGSM2
  Gene Name: small G protein signaling modulator 2
  ENST ID: ENST00000573851
  CDS Start-End: 1-343
ctacttctgttatcgctggttcctgctggattttaagagagaactgctgtatgaggatgtgtttgctgtgtgggaggtgatctgggcagccaggcacatctcatcggagcactttgtcctgttcatcgccctcgccctggtggaggcctaccgagagatcatccgtgacaacaacatggacttcactgacatcatcaagtttttcaatggtacgagctggtccagccatccaggctgccctgagcagaggtgtggaggcccccacctctgccccgcacacagctggagggttctcaggaatcctgggggcccttccccaaaggccgggatgtcaagaatctagcagagcagatggaaacagagcagggtagtcagccacctcctagcctgctgccctttctctgggcctctctacagctcttcacgtttccccccagaacgtgctgagcatcacgatgcccaggagatcctgcggattgcccgggacctcgtccacaaggtgcagatgctcatagagaacaagtgagctggggccaggaggcagcagccgtgcagagcctgggctccggca

SEQ ID NO: 182242 - DNA, 242 bp, Homo sapiens
  Payload ID: 15881
  Gene Symbol: SGSM2
  Gene Name: small G protein signaling modulator 2
  ENST ID: ENST00000574650
  CDS Start-End: 1-213
ctgcagcaacaagcagagggcaggaaaccctcaggggtcagccaggaggccctgcggagacagggctcagccagcgggaaggccccggccctcagccctcaggccttgaaacacgtatgggtacgcacggcgctcatcgagaaagttctggacaaggtcgtgcaatacctggcggaaaactgcagtgggaccctgtgccttggaatacactaagctcaagacagccgatcactactggactg

SEQ ID NO: 182243 - DNA, 1335 bp, Homo sapiens
  Payload ID: 15881
  Gene Symbol: SGSM2
  Gene Name: small G protein signaling modulator 2
  ENST ID: ENST00000573062
  CDS Start-End: 184-1134
gggctcggaagatggctgcggagccgagcaccgggcagtggctgcggcggcggcggcggcggcgggccgggagcgcggcgggcgggggctccgccttgcgcgtggggcgctgagccgagaggcgcggaggcggcgagggcgcgggggctctgaggaccgctcggcgccgcctcctgccacaccatgggcagcgcagaggacgcagtcaaagagaaactgctgtggaacgtgaagaaggaggtgaagcaaatcatggaggaggctgtcaccaggaagtttgtgcatgaagacagcagccacatcattgctttatgtggtgcagtggaggcttgcctcttgcatcagctgagacgccgtgccgctggcttcctgcgcagtgacaagatggcagccctgttcaccaaggtggggaagacgtgcccagtggcgggggagatttgccacaaggtacaggagctgcagcaacaagcagagggcaggaaaccctcaggggtcagccaggaggccctgcggagacagggctcagccagcgggaaggccccggccctcagccctcaggccttgaaacacgtatgggtacgcacggcgctcatcgagaaagttctggacaaggtcgtgcaatacctggcggaaaactgcagcaagtactacgagaaggaggcactgctggcagaccctgtgttcggcccgatcctggcctctcttctaggtgagcctgagagcacaggcacagtgggtacggggcaggtgctgagggagcatcgtctgggctggctgtctctgtctccacagtgggaccctgtgccttggaatacactaagctcaagacagccgatcactactggactgacccctctgctgatgagctggtccagcggcaccgcatccggggtccacctactcgccaggactcccctgcaaagcgcccagccctggggatccggaaacggcactcaagcggcagcgcgtcggaggacaggctggctgcctgtgcccgcgagtgtgtggagtccctgcaccagaactcacggacgcggctgctctatggcaagaaccacgtgctggtgcagccgaaggaggatatggaggcggtccctggctacctctccctgcaccagtctgcagagagcctgactctgaagtggacccccaaccagctcatgaatgggactctgggggactccgagctggaaaagagcgtttactgggactatgccctcgtggtgcccttcagccaggtcgtgtgcatccactgccaccagcaaaagagcggtggcacgcttgtgctggtgagccaggatggcatccagaggccgccgctgcatttcccacagg

SEQ ID NO: 182244 - DNA, 2969 bp, Homo sapiens
  Payload ID: 15882
  Gene Symbol: SGSM3
  Gene Name: small G protein signaling modulator 3
  Uniprot ID: Q96HU1
  ENST ID: ENST00000248929
  CDS Start-End: 190-2439
ccgctgagcgctgactgggtgcgagtggggaagctgctaacccgacccggattggcgctgaggtggcccgtggggcagggcagatgattctggaccagatgaagcctgaggagccttccagctctaagatagcaggataggagacttctaagattggagctgcagaagacttgccagcccaccagcacaatgtcaggaagccatacacctgcctgtggccctttctcagccctgactccgagcatatggccccaggagatcttggccaagtacacgcagaaggaagagtcagcagagcaaccagagttctactacgatgagtttggtttccgtgtgtacaaggaagaaggtgatgagcctggctccagtctgctggcgaactcccctctgatggaggatgctccacagaggctgcggtggcaggcccacctggagttcacccataaccacgatgtgggggatctcacctgggacaagattgccgtctccctaccccgctctgagaagctccgctccctggtgctggccggcatcccacatggcatgaggccacagctgtggatgcggctctctggggccctgcagaagaagaggaactctgagctgtcctaccgcgagattgtgaagaacagctccaacgatgagaccatcgctgccaagcagatcgagaaggacctgctccgcaccatgcccagcaacgcctgcttcgccagcatgggtagcatcggggtgccccgcctgcgcagggtgctccgggccctggcctggctctacccagagatcggctactgccagggcaccggcatggtggccgcctgcctcctgctgttcctggaggaggaggacgccttctggatgatgtctgccatcatcgaggacctgctccccgcctcctacttcagcaccaccctgctgggtgtccagactgaccagcgggtcctgcgccacctcattgtccagtacctgcctcgcctggacaagctgctccaggagcatgacattgagctgtccctgatcacactgcactggttcctcacggccttcgccagcgtggtggacatcaagctgctcctgcgcatctgggacctgtttttctacgagggctcccgggtgctgttccagctcacgctgggcatgctgcacctcaaggaggaagagctgatccagtcagagaactcggcctccatcttcaacacgctatcggatatcccgtcgcagatggaggacgcggagctgcttctgggggtggccatgcggctggccggctccctcaccgatgtggccgtggagactcagcgccgcaagcacctggcctatctcattgcagaccagggccagctcctgggggccggcaccctcaccaacctctctcaggttgttcgccgcaggacccagcggaggaagtccaccatcactgctctgctcttcggggaggatgacctggaggcactcaaggccaagaacatcaagcagacggaactggtggctgacctccgggaagccatcctgcgcgtggcacgccacttccagtgcacagaccccaaaaactgcagcgtggagctgactccagactatagcatggagagccaccagcgggaccacgagaactacgtggcgtgctcacgcagccaccggcgccgagccaaggccctgctggactttgagcggcacgacgacgacgagctgggcttccgcaagaacgacatcatcacaatcgtgtctcagaaggacgagcactgctgggtgggggagctcaacggcctgcgaggctggtttccagccaagttcgtggaagtcctggatgagcgcagcaaagagtactccatcgcgggggatgactcggtgacggagggggtcacagacctcgtgcgagggaccctctgcccggcccttaaggccctgttcgaacatggactgaagaagccatccctgcttgggggcgcctgccacccctggctgtttatcgaggaggctgcaggccgggaggtcgagagagactttgcctccgtgtattcccgtctggtgctctgtaagaccttcaggttggatgaagatggcaaagtcctgaccccggaggagctgctctaccgggctgtgcagtctgtgaacgtgacccacgatgcagtgcatgcacaaatggatgtgaagctccgctcactgatctgcgtggggctcaatgagcaggtgctgcacctgtggctggaggtgctctgctccagcctgcccaccgtggagaagtggtaccagccctggtccttcctgcgcagcccgggctgggtccagatcaagtgtgagctccgagtcctctgctgctttgccttcagcctctcccaggactgggagctccctgcgaagagagaggcgcagcagcccctgaaggagggcgtccgggacatgctggtgaagcaccacctcttcagctgggatgtggacgggtgaccccctcctccccagcccaacctcgggcctgcgtctgaggtggcccaggaccccaagctgcagagcccagggaagagcagctccagagccctggccggggccgcgggatatcaatatcaggctgccccactccacgttccccagcacatcccaggtggtgggagcagagggtaccctgccccaccagggtccttagggatgctctaggccaaaccacagtttgtaccaaaaaccttgtgaggaggtgggggagccatgtctgtgctcaggaagagggaaggggatgggggtggctagtaggctcctggcctctttggtttataaataaactgtgtctgtctttgagaaagcacctacctgtcttctgtgcagctagggctgcagagctgtattcaggtccaaggttctgcccttccttgagtggtctagaaggcactgcgtggcccctcagatgctgggacacaacagacccgggacccagctgtgctacccaccccttccatggactgaataagatggactaacaggcc

SEQ ID NO: 182245 - DNA, 1086 bp, Homo sapiens
  Payload ID: 15882
  Gene Symbol: SGSM3
  Gene Name: small G protein signaling modulator 3
  ENST ID: ENST00000457767
  CDS Start-End: 328-1086
gccacgcgtgcgcttaggcgccgctgagcgctgactgggtgcgagtggggaagctgctaacccgacccggattggcgctgaggtggcccgtggggcagggcagatgattctggaccagatgaagcctgaggagccttccagctctaagatagcaggataggagacttctaagattggagctgcagaagacttgccagcccaccagcacaatgtcagaaggaagagtcagcagagcaaccagagttctactacgatgagtttggtttccgtgtgtacaaggaagaaggtgatgagcctggctccagtctgctggcgaactcccctctgatggaggatgctccacagaggctgcggtggcaggcccacctggagttcacccataaccacgatgtgggggatctcacctgggacaagattgccgtctccctaccccgctctgagaagctccgctccctggtgctggccggcatcccacatggcatgaggccacagctgtggatgcggctctctggggccctgcagaagaagaggaactctgagctgtcctaccgcgagattgtgaagaacagctccaacgatgagaccatcgctgccaagcagatcgagaaggacctgctccgcaccatgcccagcaacgcctgcttcgccagcatgggtagcatcggggtgccccgcctgcgcagggtgctccgggccctggcctggctctacccagagatcggctactgccagggcaccggcatggtggccgcctgcctcctgctgttcctggaggaggaggacgccttctggatgatgtctgccatcatcgaggacctgctccccgcctcctacttcagcaccaccctgctgggtgtccagactgaccagcgggtcctgcgccacctcattgtccagtacctgcctcgcctggacaagctgctccaggagcatgacattgagctgtccctgatcacactgcactggttcctcacggccttcgccagcgtggtggacatcaagctgctcctgcgcatctgggacctgtttttctacgagggctcccgggtgctgttccagctcacgctgggcatgctgcacctcaag

SEQ ID NO: 182246 - DNA, 793 bp, Homo sapiens
  Payload ID: 15882
  Gene Symbol: SGSM3
  Gene Name: small G protein signaling modulator 3
  ENST ID: ENST00000427834
  CDS Start-End: 1-639
gtcacagacctcgtgcgagggaccctctgcccggcccttaaggccctgttcgaacatggactgaagaagccatccctgcttgggggcgcctgccacccctggctgtttatcgaggaggctgcaggccgggaggtcgagagagactttgcctccgtgtattcccgtctggtgctctgtaagaccttcaggttggatgaagatggcaaagtcctgaccccggaggagctgctctaccgggctgtgcagtctgtgaacgtgacccacgatgcagtgcatgcacaaatggatgtgaagctccgctcactgatctgcgtggggctcaatgagcaggtgctgcacctgtggctggaggtgctctgctccagcctgcccaccgtggagaagtggtaccagccctggtccttcctgcgcagcccgggctgggtccagatcaagtgtgagctccgagtcctctgctgctttgccttcagcctctcccaggactgggagctccctgcgaagagagaggtgggtggtgtgggcctcgtagggcctgcactgatggagctgcccaaaccgttcgcggggtggctaaggtgggaacccgaagtgctggtgtcagcggttaggaactaccccagccatgcccaaggcctgtgaggtgaggggctgccctgtttgcaggcgcagcagcccctgaaggagggcgtccgggacatgctggtgaagcaccacctcttcagctgggatgtggacgggtgaccccctcctccccagcccaacctcgggcctgcgtctgaggtggcccaggacc

SEQ ID NO: 182247 - DNA, 666 bp, Homo sapiens
  Payload ID: 15882
  Gene Symbol: SGSM3
  Gene Name: small G protein signaling modulator 3
  ENST ID: ENST00000417424
  CDS Start-End: 1-307
gttggatgaagatggcaaagtcctgaccccggaggagctgctctaccgggctgtgcagtctgtgaacgtgacccacgatgcagtgcatgcacaaatggatgtgaagctccgctcactgatctgcgtggggctcaacccgggctgggtccagatcaagtgtgagctccgagtcctctgctgctttgccttcagcctctcccaggactgggagctccctgcgaagagagaggcgcagcagcccctgaaggagggcgtccgggacatgctggtgaagcaccacctcttcagctgggatgtggacgggtgaccccctcctccccagcccaacctcgggcctgcgtctgaggtggcccaggaccccaagctgcagagcccagggaagagcagctccagagccctggccggggccgcgggatatcaatatcaggctgccccactccacgttccccagcacatcccaggtggtgggagcagagggtaccctgccccaccagggtccttagggatgctctaggccaaaccacagtttgtaccaaaaaccttgtgaggaggtgggggagccatgtctgtgctcaggaagagggaaggggatgggggtggctagtaggctcctggcctctttggtttataaataaactgtgtctgtctttgagaaagcacctacct

SEQ ID NO: 182248 - DNA, 2330 bp, Homo sapiens
  Payload ID: 15883
  Gene Symbol: SGTA
  Gene Name: small glutamine-rich tetratricopeptide repeat (TPR)-containing, alpha
  Uniprot ID: O43765
  ENST ID: ENST00000221566
  CDS Start-End: 163-1104
cattaacgcgcctgtgcagaagggaagcaactccgggcgcctttcttttgcgcaggcgtcgcgccctggggccggggccgggcggcaccgcggtgcgcaagcgcaaccgtcggtgggtcggggatcggtcgcctgagaggtatcacctcttctgggctcaagatggacaacaagaagcgcctggcctacgccatcatccagttcctgcatgaccagctccggcacgggggcctctcgtccgatgctcaggagagcttggaagtcgccatccagtgcctggagactgcgtttggggtgacggtagaagacagtgaccttgcgctccctcagactctgccggagatatttgaagcggctgccacgggcaaggagatgccgcaggacctgaggagccccgcgcgaaccccgccttccgaggaggactcagcagaggcagagcgcctcaaaaccgaaggaaacgagcagatgaaagtggaaaactttgaagctgccgtgcatttctacggaaaagccatcgagctcaacccagccaacgccgtctatttctgcaacagagccgcagcctacagcaaactcggcaactacgcaggcgcggtgcaggactgtgagcgggccatctgcattgacccggcctacagcaaggcctacggcaggatgggcctggcgctctccagcctcaacaagcacgtggaggccgtggcttactacaagaaggctctggagctggaccccgacaacgagacatacaagtccaacctcaagatagcggagctgaagctgcgggaggcccccagccccacgggaggcgtgggcagcttcgacatcgccggcctgctgaacaaccctggcttcatgagcatggcttcgaacctaatgaacaatccccagattcagcagctcatgtccggcatgatttcgggtggcaacaaccccttgggaactcccggcaccagcccctcgcagaacgacctggccagcctcatccaggcgggccagcagtttgcccagcagatgcagcagcagaacccagagttgatagagcagctcaggagccagatccggagtcggacgcccagcgccagcaacgacgaccagcaggagtgacgctgcctgctcccggtgtgaccgcgtccttccctggccgacccgaaggaagccttctggttgtctgccacttcctcctgttggactgcctgagagaggggaagagagagacctcggacctgcatgtcaagatggattttccccttttatctctgccctcctccactccctttttgtaactcccttacagcccccagacccttcttgaaacgagagccagcaagctgagcacagaccagcagcgacctcccttccagcccccagaaagctcggtcacttgagtgttttctagaatcctggggtgctcccgggccgctctcagagaagtggcaggtttcacgttcagccgtgtggcggatcgtgtggcttccaaagccttttacagcccccgccccccatcccgtggtctgtctgcaggaactctcccgtctgtgagaagcctctttccgagtcgacctcccggccaccccggccctgtgcctgctcggaagagctcactgccagctgcggcctgggcaccgcgggccatgtgtgtttgcatgaggaactctttagtggcagacacctaagagacggctgcggtcaccccacgcctccgcggctcaggagccgtcctgggtgcataggaccagtttctgtgacttttctccagttgggcatgttgacagacatgtttcccctcctcccaccctcattttctggtcctcgcgactgagagccaggggcgacatcatgaccttctgtcccggccgccttagccccgggcacagggaaggcagctgggccgtttctgtctgtgtcccatcctgctgtccttctgtcctggatgtttcatgggcccggggccccccagggaagcttacccctcctgtgctgggtggaggccacgggacacctcaggtgccacccaccttggccctaaaacagccaccaggaaagcagccggagagccggacagcaggcagcctgtctgggttcctgaggcctgggggtggcagacgagcccacggcgccgtggtcccagcagcagggttgtcagtcggagcatcctggggctccctggctcctggccgtctgtgaggtaggcgcagtaccgtgtatcgtaggtagcagtaggaacgggggccgccgcggccctgcagccgctcatggcggtgaggtgtgtgccaagcccacccggggtgcagggcgtgacgtgtggggaataaataggcgttgtgacctct

SEQ ID NO: 182249 - DNA, 637 bp, Homo sapiens
  Payload ID: 15883
  Gene Symbol: SGTA
  Gene Name: small glutamine-rich tetratricopeptide repeat (TPR)-containing, alpha
  ENST ID: ENST00000589251
  CDS Start-End: 151-637
cgcaaccgtcggtgggtcggggatcggtcgcctgagagagtcttcttctgcatatcgtgctagaggtgggggaaatctgggattcaggaccgtccaccaccacctcccacccgctgtgtaaacctgggtatcacctcttctgggctcaagatggacaacaagaagcgcctggcctacgccatcatccagttcctgcatgaccagctccggcacgggggcctctcgtccgatgctcaggagagcttggaagtcgccatccagtgcctggagactgcgtttggggtgacggtagaagacagtgaccttgcgctccctcagactctgccggagatatttgaagcggctgccacgggcaaggagatgccgcaggacctgaggagccccgcgcgaaccccgccttccgaggaggactcagcagaggcagagcgcctcaaaaccgaaggaaacgagcagatgaaagtggaaaactttgaagctgccgtgcatttctacggaaaagccatcgagctcaacccagccaacgccgtctatttctgcaacagagccgcagcctacagcaaactcggcaactacgcaggcgcggtgcaggactgtgagcgggccatctgcattgacccggcctacagcaaggcctacg

SEQ ID NO: 182250 - DNA, 841 bp, Homo sapiens
  Payload ID: 15883
  Gene Symbol: SGTA
  Gene Name: small glutamine-rich tetratricopeptide repeat (TPR)-containing, alpha
  ENST ID: ENST00000587866
  CDS Start-End: 637-841
ctctcttcgtgtggccacatggcctcagcctctgcctccgtcttcacgcggccgtctccgtgcggccatgttcaatccctgcattagggccaccacagcgacctcatctccacttgtttccatctgcaaagacacagacaaggtcccgtgctcaggtcccaggtggacgtgactagcccagaacttggctgctccagcggcgggggcgggggcggctgcttctccacgcagcttgttacatctgaatgtttagagtcaccatcgccagccttcgggggaaatggaggcacagtgaggccaagccttcctgagctggcgcctcaaggcagccggccagcctgccccgggggaagctcacgtcggggcttcctgctcagagccgtgaaggtcactgtggccgaggcccctccaagttggcccaggcacccaggaaacctgtgtgaaaggtcttgtactaaaaaaagacctgtccatagactacagctccagattccagaacagcctctcctgatgtcaccatctggcaccctttagagctttggcaggaaactgcagggaccacagacatgagcagaagcagctgtcaagtcctgggaatgaggaacaagacagggtatcacctcttctgggctcaagatggacaacaagaagcgcctggcctacgccatcatccagttcctgcatgaccagctccggcacgggggcctctcgtccgatgctcaggagagcttggaagtcgccatccagtgcctggagactgcgtttggggtgacggtagaagacagtgaccttgcgctccctcagactctgccggagatatttgaagcggctgccacgggca

SEQ ID NO: 182251 - DNA, 5469 bp, Homo sapiens
  Payload ID: 15884
  Gene Symbol: SGTB
  Gene Name: small glutamine-rich tetratricopeptide repeat (TPR)-containing, beta
  Uniprot ID: Q96EQ0
  ENST ID: ENST00000381007
  CDS Start-End: 237-1151
gccccaggggcggtgctggccagaccctgccgcctgagagagagcacagcctggtgggttctggggtctacggcctaggggccggggaagtttgcgccgccgcgaccagtgctgcgatcccgagccgggctccagccccgaggaccaggggtcgggcgggcctgcctacggaaccccgcgggccagcagcagtcgtctcgcgtcctcctgcttggaaaagtgtttaagcttctaaaatgtcatctatcaagcacctggtttatgcagttattcgtttcttacgggaacaaagtcagatggacacttacacctcggatgaacaagaaagtttggaagttgcaattcagtgcttggagacagtttttaagatcagcccagaagatacacacctagcagtttcacagcctttgacagaaatgtttaccagttccttctgtaagaatgacgttctgcccctttcaaactcagtgcctgaagatgtgggaaaagctgaccaattaaaagatgaaggcaataaccacatgaaagaagaaaattatgctgctgcagtggattgttacacacaggcaatagaattggatcccaataatgcagtttactattgcaacagggctgctgctcagagcaaattaggtcactacacagatgcgataaaggattgtgaaaaagcaatagcaattgattcaaagtacagcaaggcctatgggagaatggggctggccctcactgccttgaataaatttgaagaagcagttacaagttatcaaaaggcattagatcttgaccctgaaaatgattcctataagtcaaatctgaaaatagcagaacagaagttaagagaggtatccagtcctacaggaactggactgagctttgacatggctagcttgataaataatccagccttcattagtatggcggcaagtttaatgcagaaccctcaagttcaacagctaatgtcaggaatgatgacaaatgccattgggggacctgctgctggagttgggggcctaactgacctgtcaagcctcatccaagcgggacagcagtttgctcagcagatacagcaacaaaatcctgaacttatagagcaactgagaaatcacatccggagcagatcattcagcagcagcgctgaagagcattcctgatttaaccaggggctcaagcccaagatacaaatggtttatggctatgaatgaagtatttgttgtagatagtaccccctccctccttcaaaaaaccaaacaccatatctgatgtgtgaaaataatggaggaaaacctcttgtgtatattcttaaagaataaatctgtttagacaataggtttatcacaaacaaactcaaaacataacatgactccttttgaaatgatcactagccatgttacgtgccaatatagcactgggataaggttccattttcaaacttctatcatatttgtatattagacttaatagcaaagcatatttattgaactctagtagggctatttgttggtaagctctttagctccaatttcccttaagcaaagttttttgagaagggaaatgacccaaaggaaaggtttcctatgctggttgagaagaagtgtacttgccactgagcagtatgtcaggaaagaaggaatattatctaggtttagctttgataagtgctattagtaatgaatatataacatgggaaccaatgttatctttaatgttgcttgttctggtgaacagagaatcttaagagctgttagaaagtagcacttgatgcaagggatgttttgaaaagaaaaaattggtaatgcgaatgtatagaaagtaaaggtaggatgctcaggttttctgcatagttcttaactaatcttgtctgcagtttggtattgataatattagcatggccacttatgctaaatacacaataagatacatttagaaatccttaatgtactggttaggtcagtggtacaactgtttgacttaattatcacaatttccccaatggtaaccttaccttggaaactatcaaatataaatatactttaactaagccagtgacctggtcctaagttaaggattttctaaatggtatttaattgtgtgcccataaacactgattttttttaaaaagaaaacttagtaattatttgatggataacaaaaagcatctatcactaacattgcttgttcatgtaatcttctgtgataatttggcttggcatgccagtcttataattaacataatttaaatttgatgcaatttaaatataacaggagacttaaaatattttattataaattagatgccatattagttagtggagaaaaggggcattaggtattaattgcatgggtctaactacattgatgatgagagtttaattccaactagagtatattttttgtttattaataatgaaattggtgctgacatgtaatgacttcacaagttttacgagggaaaactgaaaaaggaagtaatataaattttgtggggtttttttgagatggagtcttactcttttgccaggctagagtggtgttgcaatgtcagctcactgcaacctccacctcctggattcaagtgattctcgagccttaagctcccaagtagctgggattacgggcgcccaccaccacgcccagctaattttttttttttttttcttgagatggagtctctctctgtcgccaggctggagtgcagtggcgcaatcgcggctcactgcaacctctgcctcccgggttcaagtgattctcctgcctcagcctcctgagtagctgggattacaggcacgtgtcaccatgcccagctaatttttgtatttttagtagagacggggtttcaccatgtttgccaggattgtctcaatctcttgacctcgtgatccgcctgccttggcctcccaaatgctgggattacaggcgtgagccaccgtgcctggccgctaatttttgtttttaatggagagagttccaccgtatcggccaggctggtctcgaactcctgacctcaagtgatctgcccatcttggcccctcaaagtgctgggattagaggtgtgagccactgtgcctggccaggaagtaatatacaattaaatgagtaataatgcagatgattaggccttatagaacccttatcaaaagactaattggccgggcgctgtggctcatgcctgtaatcccagcactttgggaggccaaggcaggggggatcacctgaggtcaggagtttgagaccagcctggccaacatggtgaaacccacctctactgaaaatacaaaaattagcctggcttggtggcgggcacccgtagtcccagctacttgggaggctgaagcatgagaattgctcgaacctgagaggcagaggttgcagtgagccaagattgcgccactgcactccagcctgggtgacagagcaagactccatttcaaaaaaaaaaaaaaaaagaaaaagagactaagagactaattattttgtatcttgaagtttaaaatccaacttttctctttctcctttgtgacattagaacagtagttctataacttcattgtaagaatcacctggataattcattaaagatgcagattcagggccacgtgttcaattctgatacagtaggtcctgtaataaggcctaggaatggccatttttaaacagtacactaggtggttttgatacagatccaaggactctaatttagaggaacactaggttagaggtttctcagacctgcaaacacctaagcacctgggccaaacaaagctacaacgaagatctgtatgaagatatatagttctgcagaatttaaaaagagcacaatttaagtcttcggccctcagaagttaaattcatattccatctaagccaactttgattttcattaagttagaatgaactcctagtattccagtattacacagaacgaagtactactactaacacatagaagtcattactgtgatataaaaagcaaaatagatccttaattaaaaattagtcactcatattcagtgttgaataagaagttaaagtttctagcataactatcttgagtgcattaaaaatgcttttagagcaataagataagcttctagctgactgcctagaaaaacagaagatacaaattcagtgtcagaaatgaaagggaatacactacagacactatagttattaaaaggctaactagaaaacaccatgaccaactcaaggattgtatatttaacaacttagatgaaacagattccctataggatacaaactagaaagctcactgtagaaacagataacctaaacagaaccatatttattaaggaaattgagtttgtggttaagttaaaaaccttccagtaaagaaaactacaggcccagataacttccgtgatgaattttaccaaacacttaagggagaaataatatcaattctaaacaatctcttccaggaaacagaagaggaggaaatacttcccaactcattttatttgaccagtattacccagacaaagatactataagaaaaaaaactttaaaacaatgtcttcatgtgctaacatctgtagttaaattagccattctttttacatgaaataatgggaattggtatatttcttccatttcatttttctatttctttgctaatataccacctgtaacaaattcaatctagatgctatctgtccacttgcctacatttccattctattcaagccatttttgctcttcaagtaccttgatcactttggaatcatagcattgcaagctatttcaaaaaaagttgcgtggttggattgtgctagctacttttaaatttataaaaaatgccccatatattttcttgcttgtctgggaaatatagttgctatctaactagaaaaataagagggcattattaaagtaactctttaagcatcgtactaaatgtttgacttccattaaccatatttcttgtagtagctgtagctattatgatactgtgtaaaacagaacaggttctatatatgcaaatgacattttcatttaatgtaccaaattgtgtatctaacttttataatataggttaaacagatcctttctaagatggcattatttaatctttacttaaaactatgaaaaatatgtgtaagttattgtttataaacagaagagactataattaaaatatagagcagattccaagtgaccatcattttactttttagatttaaaacagaatgaaacagaagatttagtcataagaagatgcttgaaaaacaatccaagtatccaatgcagtggctataaaatattatttcatcatttaatcttaatcattttgaaacaaagacagacttcaattttacactgcttgcactttattttgtacagacatttcattaattattactcaattttgaggtgcaaaccttctgaatatagctttcattttggaccaaacaatttgttatggcaataaataatgatgcattgaaaaaccaa

SEQ ID NO: 182252 - DNA, 887 bp, Homo sapiens
  Payload ID: 15884
  Gene Symbol: SGTB
  Gene Name: small glutamine-rich tetratricopeptide repeat (TPR)-containing, beta
  ENST ID: ENST00000506816
  CDS Start-End: 302-887
aagcaatccaaaacagcagctcaggctgcccaaagccgtgtccaagcgatcattttctccattttgggccaagtcaatttgcaccggcaagaggcagaatgtttgttttatggggaggaggaaaataaaaaaggaagtcagagagcatggacggaaacaagcaacaccaccaaagaggtttcatctcgggtggatgttaaacgattggaatgctaataatgggcgcgaggagcaaacacaattgttctgagtccacagctgcggcacttttaatgacaggaaaagtgtttaagcttctaaaatgtcatctatcaagcacctggtttatgcagttattcgtttcttacgggaacaaagtcagatggacacttacacctcggatgaacaagaaagtttggaagttgcaattcagtgcttggagacagtttttaagatcagcccagaagatacacacctagcagtttcacagcctttgacagaaatgtttaccagttccttctgtaagaatgacgttctgcccctttcaaactcagtgcctgaagatgtgggaaaagctgaccaattaaaagatgaaggcaataaccacatgaaagaagaaaattatgctgctgcagtggattgttacacacaggcaatagaattggatcccaataatgcagtttactattgcaacagggctgctgctcagagcaaattaggtcactacacagatgcgataaaggattgtgaaaaagcaatagcaattgattcaaagtacagcaaggcctatgggagaatggggctggccctcactgccttgaataaatttgaagaagcagttacaagttatcaaaaggcattagatcttgaccctgaaaatgattcctataagtcaaatctgaaaatag

SEQ ID NO: 182253 - DNA, 491 bp, Homo sapiens
  Payload ID: 15885
  Gene Symbol: SMIM1
  Gene Name: small integral membrane protein 1 (Vel blood group)
  ENST ID: ENST00000561886
  CDS Start-End: 195-308
gctcgaggcgtctgccgcacctcagcccacgacctgccccgctgggaggtgcgggccgctggccaggccctgaccgcaacctggcccagaggccccagccctcaggcaaggttctccggtgaagccacagcctggccacctgtcttgatctccccaccgagaaggccccgcccctcccgctgcagccccacagcatgcagccccaggagagccacgtccactatagtaggtgggaggacggcagcagggacggagtcagcctaggggctgtgtccagcacagaagaggcctcacgctgccgcaggtgaggggcctgagggcagcctgccagccatagcaggctggtgtctccctccagagacgcctgccctaacccctgctaccggccccatcaccctccaccccatcctggctgggagcccacggtccagcagctcagcaaaccgcagcctttggccttccctctggttggctgtgggcggggagagctt

SEQ ID NO: 182254 - DNA, 546 bp, Homo sapiens
  Payload ID: 15885
  Gene Symbol: SMIM1
  Gene Name: small integral membrane protein 1 (Vel blood group)
  Uniprot ID: B2RUZ4
  ENST ID: ENST00000444870
  CDS Start-End: 249-485
ggtgaggcgcgcggggtccgggctgcggcttcccggtgcggccgcagtgggcaggctcgaggcgtctgccgcacctcagcccacgacctgccccgctgggaggtgcgggccgctggccaggccctgaccgcaacctggcccagaggccccagccctcaggcaaggttctccggtgaagccacagcctggccacctgtcttgatctccccaccgagaaggccccgcccctcccgctgcagccccacagcatgcagccccaggagagccacgtccactatagtaggtgggaggacggcagcagggacggagtcagcctaggggctgtgtccagcacagaagaggcctcacgctgccgcaggatctcccagaggctgtgcacgggcaagctgggcatcgccatgaaggtgctgggcggcgtggccctcttctggatcatcttcatcctgggctacctcacaggctactatgtgcacaagtgcaaataaatgctgccccgcatgcacgcggggggctggccgcacacgtgagagcacaggcctggagaca

SEQ ID NO: 182255 - DNA, 447 bp, Homo sapiens
  Payload ID: 15885
  Gene Symbol: SMIM1
  Gene Name: small integral membrane protein 1 (Vel blood group)
  ENST ID: ENST00000452264
  CDS Start-End: 433-447
gcggccgcagtgggcaggtgcgactgtgcgcggcctcgctggctgagaactggcgggggtgggggcgtgccctggactgacccccaccggcctaacccgcggtgcggggccagggccggaactgcccgcccggctccttgcccggctccttgtggctgctggggacccccgacaccagccactttcccttcccggcccttagcaagatcggcttctccggtcacctttatttttttaggctcgaggcgtctgccgcacctcagcccacgacctgccccgctgggaggtgcgggccgctggccaggccctgaccgcaacctggcccagaggccccagccctcaggcaaggttctccggtgaagccacagcctggccacctgtcttgatctccccaccgagaaggccccgcccctcccgctgcagccccacagcatgcagccccaggag

SEQ ID NO: 182256 - DNA, 1536 bp, Homo sapiens
  Payload ID: 15886
  Gene Symbol: SMIM10
  Gene Name: small integral membrane protein 10
  Uniprot ID: Q96HG1
  ENST ID: ENST00000330288
  CDS Start-End: 159-410
ggcagggcgccagtgaccgctggggccagagccctgccgggaaaggagggcttccgccttgcagcgcagctcggatcagcagcagcccaggaggcctcccgcccgtactttcccgcgtccatccctctgtcccacggtcggtgagtcagcggagcctgatggaggccttgggctctgggcactatgtgggaggcagcatcaggtccatggcggcggcggccctgtctggcctggcggtgcggctgtcgcgcccgcaggggacccgcggctcttacggcgccttctgcaagacgctcacgcgcacgctgctcaccttcttcgacctggcctggcggctgcgcaagaacttcttttacttctatattctggcctcggtgattctcaacgtccacctgcaggtatatatttagagccactaactttgtggcatttgggggctcctcgtcaggatggctgacttccacccacctgctcacccaccctagagcaaagcgaccaactccgctcctgcatgcagacttgccactcattctttccattgcctcatcttttagtataaatgggtggcaaaaaaagaaaaaaacagcatttgtggaaagcctgaaatataacccaaatcgtctaagatagaatgaaaaattgactctcaaggaaatatttgaaggaacagaatacagcttaaaaatttgaaaatccttaaaaatatctgagaagtttttgcatccgtaaaacagaaaacagcacgaactttaggaaatgacaatgggcacagaatgcaataaaaaaaaaaaacggggaaaggtaactaaaaacttaaggaaagataaactgaacaagaatggctcagacagcaggcaaatctccccaattagaaacgaagtgaatagacccaattgaatgagatgaattctaagcaatagatggattgaataataagctggaggacattaataacatgttctggaaggcatacatttcttcaacccaaaggaaaaaaaatgacagaaagaaactacagggaagaacattaaaaactgtgcaagaaacttatgtttcacatatgaagcaacctcagatgtggcatggttttgaacagttgccgaaagtgtgagaaagggaatctgtttgaatattggcacatggatcaagactctggagtcggtgatgagaaaatccaatcagagcattccactttgctattcattgaaccaggtagccaacagaagagttaaaaattagtgatatgactatattcagggggaaggagagctgaggggggcggcaggaagtcagcagaaaatgcctcatgtcattaagtcaagaaatagtaataaaggcatgttattgaaaaagggggtgtaatctctaaacaagcacgtgtagaagtttgtgtttctgatttggggaagcaagagttgagaaggagggacagttctattacttttcattatatgtcctttttctactgtttgatttttaaaaactatacacatgtattgcttttgcttcgattaaaaatcaagacattaaaatgaa

SEQ ID NO: 182257 - DNA, 4795 bp, Homo sapiens
  Payload ID: 15887
  Gene Symbol: SMIM10L1
  Gene Name: small integral membrane protein 10 like 1
  ENST ID: ENST00000622602
  CDS Start-End: 136-342
ggcagcggcaagcttgggtgtgagcccgggagccgctttgcttaccgtcctgccggtcccagccgtcgctaggaggtccgcgggccctgcggcaaccctcgctacagacgctgggcgggcggcgacacctggctcatggcccccgcggcggctccgtcctccttggccgtcagggcctcaagccccgccgcgacacccacctcgtacggcgtcttctgcaaggggctctcccgcaccctgctcgccttcttcgagctggcctggcagctgcgcatgaacttcccgtacttctacgtcgcgggctcggtgatcctcaacatccgattgcaggtacatatttagagccatgactaagctaacggcctccggggccagcatgatggccgactcccagggtccgttgcggcgcggcggagcagccaatggcgagccccacagtctcgcgagagtgctcaggcgctcttcgtggctgccctcttagctgctagcggagctcctcagggggcggccgggagcctacaatccctagaaagagaatacgctgttccggaaacagaactgcagttaagaccctcgaaaacatctaagaaagtgtgcatcctaaaacacctgacgaatttcagaatgtgacaaagcgcagaggatgcattatttcaaaacaaaacagaaggctaaaatttgcaggaaaaagaaaatcagtaaaccgggaatcctcggactggattgtaagcaagatttcaatgaataagaagctgaaggtattaaggctgtgatatagaaggtacatatttcatcccacaagagaaaacaataataatcagaaattttcggtgaaaaaaacgcaaaactgtacaggaaaatcatcctccaagtaccagacataaaatgctgcaagcttttgaactaatggcgagagtgtaagaaaatgggctctacttcagtgatcctgtggcaggacgtggatcaagacttggaaccgcagaaaacgaaatcccatagtagcacaaagcttggctgttcagtgaataacatttaaataatcgtaaaatacaaatgttgtttatggtttttattgtttaagggcatacttaattatggttacaaagtggagtgcaaatgttatttaccatgttttaaaaatacagccggaaaatacaagtgggaatgttgaaggagggcgggggaagtaaatggaatgggggttatgtccttataaagtggaaacttgaaaggtactgtctgttgttgagtggggaaagacatttttattacttacagggtagccataaagtttctaaaacggtaatatattaaagagggagagtggtaggggagaacagtatgaagtcaacaggaaatggctaaagatggagagctcaggtagaatagtttaaaaaatgaaaattgatagagtacctggtgtatttgaatacagcctagagagctttcattttccaaagagtgtggggataaattagtgaatgcatatttttcaaaattaagaaaacagaacatataattttgaacgctgagaaaaataaaaatttaaaaactacactgtatacacggtatacctcaactgtgaataatagtagtcatgtaaagtcagtcataattatgtaaatactgaatactgattttacaacaaatgattctataacgctgggaggatgggagaaaagagatgtgtgtgtgtgtaatggtggtgagccaatcaagatctgatatagaaaaatgcagaaaaaggagtatacacatgttttcttcggattaaaaaaactaataataaatcaccaagagtggtaaagttttaaatcaagatctgatatagaaaagtgcagaaaaagtagtatacgcattttttttttcaggaaaaaattaactaataaaccactaagaggggtaaagtgttaaaatagttgcattgttctatattccactcattgtgtccagcaaacagtgttctatggctttaagtagtaagcatcttgccccgtccaacaccatgtctggcctagggtaattgttctttctagtctttattctttgtctccagccaaactccatttgggcacattctcctatagccttttctacctgaagatactctgtgttttaaagctaagcttaggtggcgctttttccattaaatttttcctggattccactgaccatataggagctcacttcttttaatccataaggccattttcataggttgccttatttttccctaatcgtgcatcaactgtctgttttatatacccaagacaggtttcctagactgcgataagccaaaacattttagtctaaaatatcagaagtgtagtttaatcaatgaaatagtaataccaagggatttagaatcgtggacatcactgtttcccagagcactgatgtcccaatttgtaacacaaaagactgtctagtcttaatcctgaaatggtgacagagtaggatgctccatttgggtgactatgtgaacatattcctataacttttttcctcacatcagtcatttgttaaaccgaagatgaagaaacagactttgtatttattacatcctccaacataattggcagctctgtgagggaagacactatatcctattcaattttacacccggtagtaacagtatgtgtgtgtactgtatatatacatatatatatacatacacatatataaatttaagtagtaactatatatgtatatatgtatagttactacttactatatatgtatacagtatataagtatatatgtatagttactacttacaatatatgcataaagttacagcttacatttacctcgtaatatatgtatatatatatattaggagttaaatgtattaggaggtaaatgtaaactctgtggtttatcatttattcacaattgctcttaattcttggggtatagtttgcctcctacatgatgcaattcagtgaaattcccaggagacaaaacaagattttgacctgaataaaccacttattgttgtaattcacaagtgagtttattcttcctggcacacttccaggtaatatccattaggctaaggattttgtttgttcactgttctatccccaagcctagagcactgcccagtgcggaatagctaataaatattgttgaatggatagatgaatggcaattttgttggtatgctctacatagtcagcagtcaataaaggaaacatatattcgttcctgataataagatgattcactttattgcccataaattgggctttttcaggccatcatgcacgttgattgatccagagatccctcaagcatgaaaaagcagagacataggtggtatagttattatcaatagagataagaaatgtagctggcaaaaaaaaaaatgggaaacgatgcgttacagcttattttaactataaaaggaaaacagtgaacatagcaacatatgtaacctaagggataggggaaaagttgtttttttttttttaattctgggtaaaaatacatgtgattacttgacaaatagcatatcattaccatcagcatcatttttaaaatatattgagtttttaataccaggaactatgaaaaactatttatatacatgagctccgtaattctcacatataccctgtgaggaaaacatttttatcatttttcagagaagcaaaccgggatttagagaggttaagtaaattcctaaggtcatgataaccaaccagacctcaaatgaatctccagtaattcctaaagttatatttcataaggagttcaattttcttaaatgtgtagataattacaaataattctgtttctcaaatttctggacagaaatattacctgggtaatagttattttttttaacataactattgagggtctttcatactaaaatataaatatttaacatgatttgatatgtaagttcaagtattttatactctctgcagccttaaacctattggcttattttattagagggttggtgggattgagggatatgggagcaaagggagagagaggaaagaacgttgtcctcagaatggaagggaaacactttcctgtgctacccagagtagagatcagacaatgttaaattttgaagccatgtctgttcctgtcctgaggatccctaactaaattttgttagaaaatcttgcagtttgcttttaatgggagatctttctggcaggacatcaatagcttttgatagcgtcaagaagaaaataaagttacatgcagaagcataaaggggtaggatgaaagttgaggaatatagggacaaaagatgagggaaaggaatatcctaatacttggaagtttgagcatggaaagtagtctaaagacgacttgggaagttccaagaaaatgaaccaagaaaagaacctctgcaagaactatgagaattcccaacaattgggttggattgattcatattagtctattacttgggttaccttgagtgtggggattcttcttgcagttttaacacttgtactatggtctgaatgtgccccccaaaaattcacatgttggcatttaacccccaaagtgatgatctcaggagatgggacctttgggaggtgatcaggtcataaagatgaaaccctcgtgaatgggattagtgcctttataaaggagaccccaaaataattcccttaccccttttgccatgtaaggttatagggaaaagtcatctatgaacaaggaaatgaaccctcaccagataccaaatttgtgaatgcctggatcttggacttcccagcttctagaactataagaaataaatttctgttgttcataagca

SEQ ID NO: 182258 - DNA, 5230 bp, Homo sapiens
  Payload ID: 15888
  Gene Symbol: SMIM10L2A
  Gene Name: small integral membrane protein 10 like 2A
  Uniprot ID: P0DMW4
  ENST ID: ENST00000417443
  CDS Start-End: 190-426
tgtgcgggatcgtggaggtggggccgaggcagcggccgcctgagccccgctcggccttgggaacacgggggcggggcggccgcggctctgggcgacccgctgggtgcactagtgctcgggtcccaccgccctgaggctcgcgctcgagcgggtcagtcggtcggcggggcctgcgcggggcccgggcccatggcggcgtcggcggctctgtctgcagcggcggctgcggcggccctgtctggcctggcggtgcggctgtcgcgctcagctgcggcccgaggctcgtacggcgccttctgcaaggggctcacgcgcacgctgctcaccttcttcgacctggcctggcggctgcgcatgaacttcccctacttctacatcgtggcctcggtgatgcttaacgtccgcctgcaggtgcggatcgagtgagcgccggcggcggcggcggcgaaggcccggctgaaggggcgcccgtgtccccgcccgcccccggccgggtcgccggcatgaaggaaagctgggccgcggcggggggcggaggcggggcggctcggacccctggactctagacctacgccgccagggcacgacggcccagccctggccccggctgcggtctcagcccgggggccctggatcgcgcagaaacgcactgaatgggcccctgccatcgggctccagaaactacctgggctcggccgacctgttgcctcatattggccaaagagggggaaaccagaaggagggaattctgctgcggcgacttgactttccaggcccggagcagaaaggcattggcatttgtaggcggtgacccgccccttctctggccttgccaagagtcacatccctgcccaggggcacctctggccctggaacttgcctgggcagaggcagcgtgaagggcctgaacaagaggagaagaagggccttcctagtagaggcacagcatggacaaaggctcacaggggtgggggtgcccagtgatcgagtcctggcttgggaaggaaggtctgagttccctgggaactgaaatctgctagcagcactgtgagagaggtgtatttccccctcctaatgacagaggaaactgaggcttcagggaggggtggatttgcccttgacatgcagataggaggaggaggaactgcgtgtgcccctgggcctgcaggcccccacacccctccccagtcttcttcaagacctggcatggtgggaggagggagggggaagtggagaggggagcatagggctcctggggcaccaagggagagaggggcccaggggtagggaatctaggaatgtcgctttccttggagcagtacggaaagtcacagggaagatcaggaggacggacagctgagatgggagacaggagagatgagccccaggacccctggggagccaagctgtcccccacatcctagcctctcaccccacctggagcttcaccaagggctcctcagcagtgaagtggcacaagcctcccagtttggtgggcaagtgggggtgatcttggtgttgtggctcctggagacacgacataaccaggagggtgaagggataaacctggggtgggctggggctgagacccatggcatgaccccaattctctctcctcaagctcgaccccccatccccaggatcacacaggagaatctcatcctcacggcttggattgctcctgggggccccctggtgtgctgctaactggtgtacaatgctcaggagcagcccagaggggagccgggaagggaccctcgcccttaccatctatccccatttccgcatctcttgcactggtaccccgggcgccacgttctcagttcctgggactgaaaactgcagcagtctggccagctccagggacagagtggcccagccacctactatgtaccctcctcagctgcccactggactcaggtcctgaatgaagctgtccgcctgcctcatgccagaagcggctggacagtggctgcctcatgacccttgcagtctcccacatccagggcctgatgacatgcccccttgtcccaagtttcttgggaacccctgaccctgctggcccctctcatccaccccaaccctatccaccctggaccacctctgggggtctgtcagcctgctggtccccccaacagatctttgggggcagcctctatgggacaagagtgacacagggctggagaagaggagtgaggagcctccttgtgtctgatgcacagatgtggccctttcaaaccctggtgtcaccctctgggtgactggatccccagctccagcctcttcctgggccagccaggaaggctggaggaaagctctttgctgagtgcatgcatgggagtgtggggggtgactgagccctccccatgcaaggggcttggcctgggaccctggaagctgtttccctactgggataaagttgcgtcagccgcaggggtctctgccctcaaagaccccccactgcagggagccccaccccataagagggtcacggaagtccatgtccgcccacccccagtggcttctggtgtggccgtattggcctagaggggctgactggggagggtcagggccaagccctcagcatctgctcctgtccctgctttttcacccctgctgcctgaagtggtagccccgcctgctgcttctccacctcccctccccacctcttctctcccagatggggcccttgctgcgtgacggggtctccatgcgctttatttatttgcagtctgttttctaggcggtggagctagacactgaccggaatgacatacttttctgtgtgtgattcactgtgtactggtcagcacaggctggccagagagctgttcttgtttctggtgttgtcacgtcttcttgttttctctaagtttaaaaaaaagtccttggtttaatacactaaaatcccaactggaggcctcccgtgtctggtgggggtgatgcagtggccccgggtggagaggccccatggtgaggtcaccagctcccatggccaggagttggcagggagaagcctctgagggctagggctgggggaggctgtggcagggaccgtgtttcctgttcagaggctgtgctgagaaccgacttgacctggaccactgccccatgagaagcaggcagcatcctagcctggccccgagaggtagctgcttgttctgttgacaacctttgttcaacgacccaaaacataagtccctttcctttttagagtctggcgatcaaaagtgtcttaagtcagtagaatcctgagggtggactagggtgaagtgaactgaaacagactcgacacaggtcattttgtgtagcactgagactcctctccctgcctgaggccacctcccactgcctccctaccagcaaggttactgcagaatcttggagaagataaaggacctggccctggaagcctgcttccctttcccaaccttggaagcaaattctgtcccatcagagcccccctccctagtggctcccaccagagacctccctagtggctgctgtaagggttggcaagcaggcaaaaggcgggggagggagggcagagggtagtgttagaggaagccccatagggcccctgggtgggggtggggaggcatcctgaggacacagggctatgctcagacttaggagtgaagactgggtttaggggccctgggggcactcctgttgccaagggctacccaggggtcagagcatcctgacaaggaggacccgtccaaacgcactggtgctaatgccctatggcatctgccaccacaggagaaatggaccccagtccttgatcttccctcccctttgtctagatggtcctctttatccccactccagggatcacatgacttggcaaagcaagatgggaaatgatcctcccagagcctggctccaaggcttcttgaagagggaggatcacccctcccatccctgctacagaggaaaaggcaggaaggccggttctgctccgatgggactccaggagaccaaagccctgagccctgagcccagctcttccacttactactgtgtggtgccaggcaagctgtgcacaacctggagtttttagtaaggttccgttgggatgcttgtaagcagtgaatacgatgatgtctgttcattgtttgtcatcaggtctcacctggagcagccttgttactgtggggaaaaggaaccaagtgaagggaatcggcctctgatgagagcctgccatgtgccaggcaccatactaggtgctttgcattcctaatctcatcattatcacacaaccacctaaccattatccctgttttacagagaaaccaaagacaggaaccaagtctgaaacagagccccaagaagaagctcttttcctgagctaccagtgccccttggagaggcagggaattgggctggaagaatggtggaatggaatagcaaagatggaagatgaccctgtcctttctgggtgaggtccagaagaaatccagggcttggatgaggggtagacctgagagccttctccaaatggaactccccagtgggagcagctgtggccaccctgagatgggtctacctgtcttccttccattccacctccagagattgattgggacctaagagactgagtcaggagagggcaagaaagcagctaagtgggaagtttcaggggcactagagcaaatacattgagaaatgggaaatacaaacagcatgcaaaatcacatcctactcctacccaccccactcccaagggaaattgctgggttttggacgaattttcactttgtgtgcaccttttatgtatgtaaaactacaaacatactactttgaaatctgattccgctatttcatgtttgtcttaccatgttattatgtattttcctacatccaaagctacctagtatctcttttgtatgaaggtttcatcatgtatcccccagtgccctttggttgtttttctttgttgtcatttattttggtgggggttggtttgctttttgttgttgtttttccttgtttttataaatgatacagtgacagatgccgttgtggataaatgctgtggcatagtcatcaattccttgatatatattcctagaaagtgcaccaaagggtatgcatggcttagggcttttgatactctccagagttgggataccaagtcacactactcactggagtcaggatgagagttttttgagacaatggtggcaattctgattcaatagattaaaaaatttattactacctt

SEQ ID NO: 182259 - DNA, 2696 bp, Homo sapiens
  Payload ID: 15889
  Gene Symbol: SMIM10L2B
  Gene Name: small integral membrane protein 10 like 2B
  Uniprot ID: P0DMW5
  ENST ID: ENST00000433425
  CDS Start-End: 2-238
catggcggcgtcggcggctctgtctgcggcggcggcggcggcagccctgtctggcttggcggttcggctgtcgcgctcggcggcggcccgaggctcatacggcgccttctgcaaggggctcacgcgcacgctgctcaccttcttcgacctggcctggcggctgcgcatgaacttcccctacttctacatcgtggcctcggtgatgctcaacgtccgcctgcaagtgcggatcgagtgagcgccggcggcggcggcggccgcggaggcccggctggaggggcgacagtgtccccgcccgcccccggccgggtcgcgggcatgaaggacagctggatcgcggcggggggcggaggtggggcggcccgggcccctggactctagacctacgccgcccgggcacgaaggcccagccctggccctggccgcggtctcagcccgggaccccggatcgcgcagaaatgcactgaacaggcccctacaattgggctccagaaactacctgagctcggactacctgttgcctcacattggcaaaagagggggaaaccagaaggagggaattctgctgcggcgacttgactttccccgccccgagcagaaaggcattgacgtttgtaggcggtgacccgccccttctctggccttgccaagagtctcatccctaccctggggcacctctgaccctggacctgcttgggcagaggcagcgtgaagggcctgaacaagaggagaagaagggccttcctagtagaggcacagcatggacaaaggctcacaggggtgggggtgcccagtgatcgagtcctggcttgggagggaaggtctgagttccctgggaactgaaatcggctagcagcactgtgagagaggtgtatttccccctcctaatgacagaggaaaccgaggcttcggggagggggggatttgcccttgacatgcagataggatgaggaggaactgcgtgtgcccctgggcctgcaggctcccacacccctccccagtcttctccaagacctggcatgatgggaggagggaggggaaagtgaagagggaagcatagggctcctagggcaccaagggagaggggcccaagggtagggaatctggggatctcgctttctttggagcagtacagaagatcacaggaaagattaggacagacagctgagatggcagacaggagagatgggccccaggatccctggggagccaagctttcccccacagcctagcctccccaccccacctggagcttcaccaagggcttttcagcagtgaagtggcacaaacctcccagtttggtgggcaagtggggctgatggtggtgtcatggctcctggagacacgacataaccaggagggtgaagggataaacctggggtgggctggggctgagacccatggcatgaccccaattctctctcctcaagctcgacccccccgccatccccaggatcacacaggagaatctcatcctcacggcttggattggtcctgggggcccccggttgtgctgctaactggtgtacaatgctcaagagcagcccagaggggagccaggaagggaccctcgccctcacctgctatccccatttccgcatctcttgcactggtaccctgagggccacattctcagttcctgggattgaaaactgcagcagtctggccagctccagggacagagtgatccaaccacctaccacgtaccctcctcagcaggccactggacccaggtcctgaatgaagctgtccgcctgcctcaccccagaagaggctggacagtggctgcctcgtgccccctgcagtctcccacagccagggcccgatggggtgcctccttgtcccaagtctcctgagaacccctgaccttgctggcctctctcatccgccccaaccctgtccacccttgaccacctctgggggcctgtcagcctgctggtccccccaacagatctctgggggcagcctctgtgggacaagagtgatacagagctggaggagaagaggagtgaggggcctccttgtgtctgatgcacagatgtggccctttcaaaccctggtgtcaccctctgggtgactggatccctagctccagcctcttcctgggccagccaggaagggtggaggaaagttctttgctgattgcatgtgtgatacagtggggggtgcctgagccctccccatgcaaggggctcatcctgggactctggaagctgcttccctactgggagaaatgtgtgtcggagctgcaggggtccctaccctcagagacccccgactgcagggaacccaccccataagagggtcacggatgtccatgtccgcccaccccccgtggcttctgctgtggctatattggcctagaggggctgactggggaggagcagggctaagccctcagcatttgctcctgtccctgccttttcacccctgctgcctgaagtggtagccccgcctgctgcttctctacctcccctccccacctcttctctcccctacagggcccttgctgcgtgatggggtctccatgcactttatttatttgcagtctgttttctaggcggtggagcttctagacaccgaccggaatgacatacgtttctgtgtgtgattcactgtgtactggtcagcacaggctggccagagagatgttcttgtttctggtgttgtcacgtcttcttgttttctctaagttt

SEQ ID NO: 182260 - DNA, 850 bp, Homo sapiens
  Payload ID: 15890
  Gene Symbol: SMIM11A
  Gene Name: small integral membrane protein 11A
  Uniprot ID: P58511
  ENST ID: ENST00000399292
  CDS Start-End: 146-322
ccccggcaggacggtagaagtcgtggtttgtgcgcggccaggcgctggagcctccgctgccgggagcaatcagaccttccagctgcctctcatgtacttgtctgttgggggcttgtgttgatcaggagtgaattcacagtctaccatgaattggaaggttcttgagcacgtgcccctgctgctgtatatcttggcagcaaaaacattaattctctgcctgacatttgctggggtgaaaatgtatcaaagaaaaaggttggaggcaaaacaacaaaaactggaggctgaaaggaagaagcaatcagagaaaaaagataactgaagattctgccatgtaaatgtcagcttgagtggactccagctgagaagaaagagaagaaagacttaattattgaataatttgtcagaggataaactcccaacctagacctttcacttaaaatagtgtgaatttgtatatgtttttaaaagaaccagtactggccgggtatgctggcttttacctgaaatcccagcactttgggaggccgaggcgagtggatcgcctgagatcgggagtttgagaccagcctggccaacatggtaaaatcctgtctctactaaaaatataaaaattagccaggtgtagtggcgcgcgtctgtaatcccagctactcgggaggctgaggcaggagaattgcttgaatccgggaggtggaggttgcagtgagcctaggtcgtgccactgccctccagcctgggtgacagagcgactgcgtctccaaaaaaaaaaaggtaaaattaaaattaaaaaaaataataataaccagtattttgtttactaaaataaaatgcctttgtaaaaaaagga

SEQ ID NO: 182261 - DNA, 1074 bp, Homo sapiens
  Payload ID: 15890
  Gene Symbol: SMIM11A
  Gene Name: small integral membrane protein 11A
  Uniprot ID: P58511
  ENST ID: ENST00000399295
  CDS Start-End: 371-547
aaattccaaaagctctttgggatgctgcgatgtcgcggccggccccgcgctcgggttttccctcctagacaaaagtctgccggctcccggtcgcgccgggtcggggatccggaaggtgaaggccgccaggccccacctgcggggcgcccctgctggacctggccgtcgggcgccgtcaacccgttgagcagcgtgttccggctggcacgtggcccgggcggggcccaggattggttcaagcctacggtgttggtccccggagagtctagggagacaagcaatcccctggaatgatcagaccttccagctgcctctcatgtacttgtctgttgggggcttgtgttgatcaggagtgaattcacagtctaccatgaattggaaggttcttgagcacgtgcccctgctgctgtatatcttggcagcaaaaacattaattctctgcctgacatttgctggggtgaaaatgtatcaaagaaaaaggttggaggcaaaacaacaaaaactggaggctgaaaggaagaagcaatcagagaaaaaagataactgaagattctgccatgtaaatgtcagcttgagtggactccagctgagaagaaagagaagaaagacttaattattgaataatttgtcagaggataaactcccaacctagacctttcacttaaaatagtgtgaatttgtatatgtttttaaaagaaccagtactggccgggtatgctggcttttacctgaaatcccagcactttgggaggccgaggcgagtggatcgcctgagatcgggagtttgagaccagcctggccaacatggtaaaatcctgtctctactaaaaatataaaaattagccaggtgtagtggcgcgcgtctgtaatcccagctactcgggaggctgaggcaggagaattgcttgaatccgggaggtggaggttgcagtgagcctaggtcgtgccactgccctccagcctgggtgacagagcgactgcgtctccaaaaaaaaaaaggtaaaattaaaattaaaaaaaataataataaccagtattttgtttactaaaataaaatgcctttgtaaaaaaagg

SEQ ID NO: 182262 - DNA, 1033 bp, Homo sapiens
  Payload ID: 15890
  Gene Symbol: SMIM11A
  Gene Name: small integral membrane protein 11A
  ENST ID: ENST00000399299
  CDS Start-End: 146-352
ccccggcaggacggtagaagtcgtggtttgtgcgcggccaggcgctggagcctccgctgccgggagcaatcagaccttccagctgcctctcatgtacttgtctgttgggggcttgtgttgatcaggagtgaattcacagtctaccatgaattggaaggtcctaactgggaccacctactccccttggagggtccggatggagtttcccctctgcggctgcctctcactcatcctccaccactttgccgacaaggaaggaaggacaatcgggaggagggagtcttgcttggcgaccatctggacaatatctcgcccatggcaagctggatccctgtggattactttgagctaaagacatttcataaaatgggcatgaaggattccttcaaatgaagacgtggacaaaatgattggtcaggtcctttgctctactgttgaatggaggaggattttttttttttttccctcacacaggggttttcttggagctcaagtttggatgaccccagacagtaagataatctcatcatggtaaagttaatatgaaatatgtggtctccaaacagcctctcccagaggccaggatcagcaggtttgagtggataattggcttgtggtcattttctcataggatttttcttttagtagtggaaactgtttttcaaatcaaatttggatgccaactatgtggaacagaagtgtggctgctctggtggaagtggcaatggtagtcctagagtctccctgtcagccacaccctttgtctccccctacccaagggaccctgtggcctggaaccgcagtgtgaaatgctatatagtgcaatgaagtcaattcgaagacaagagttctttgcctttctcatctaatttttagttatggatatgagacgcttgttcagaagtatggaaaagtatatataatatgttatcttttagatgtgggtgtaaatatgcttatgtatgcaatatgcttatattttaacgcataaacaacatgaataaagcaaacactctagacttctccaaatgta

SEQ ID NO: 182263 - DNA, 843 bp, Homo sapiens
  Payload ID: 15891
  Gene Symbol: SMIM11B
  Gene Name: small integral membrane protein 11B
  Uniprot ID: P58511
  ENST ID: ENST00000619874
  CDS Start-End: 142-318
ggcaggacggtagaagtcgtggtttgtgcgcggccaggcgctggagcctccgctgccgggagcaatcagaccttccagctgcctctcatgtacttgtctgttgggggcttgtgttgatcaggagtgaattcacagtctaccatgaattggaaggttcttgagcacgtgcccctgctgctgtatatcttggcagcaaaaacattaattctctgcctgacatttgctggggtgaaaatgtatcaaagaaaaaggttggaggcaaaacaacaaaaactggaggctgaaaggaagaagcaatcagagaaaaaagataactgaagattctgccatgtaaatgtcagcttgagtggactccagctgagaagaaagagaagaaagacttaattattgaataatttgtcagaggataaactcccaacctagacctttcacttaaaatagtgtgaatttgtatatgtttttaaaagaaccagtactggccgggtatgctggcttttacctgaaatcccagcactttgggaggccgaggcgagtggatcgcctgagatcgggagtttgagaccagcctggccaacatggtaaaatcctgtctctactaaaaatataaaaattagccaggtgtagtggcgcgcgtctgtaatcccagctactcgggaggctgaggcaggagaattgcttgaatccgggaggtggaggttgcagtgagcctaggtcgtgccactgccctccagcctgggtgacagagcgactgcgtctccaaaaaaaaaaaggtaaaattaaaattaaaaaaaataataataaccagtattttgtttactaaaataaaatgcctttgtaaaaaaa

SEQ ID NO: 182264 - DNA, 1021 bp, Homo sapiens
  Payload ID: 15891
  Gene Symbol: SMIM11B
  Gene Name: small integral membrane protein 11B
  ENST ID: ENST00000612624
  CDS Start-End: 134-340
ggtagaagtcgtggtttgtgcgcggccaggcgctggagcctccgctgccgggagcaatcagaccttccagctgcctctcatgtacttgtctgttgggggcttgtgttgatcaggagtgaattcacagtctaccatgaattggaaggtcctaactgggaccacctactccccttggagggtccggatggagtttcccctctgcggctgcctctcactcatcctccaccactttgccgacaaggaaggaaggacaatcgggaggagggagtcttgcttggcgaccatctggacaatatctcgcccatggcaagctggatccctgtggattactttgagctaaagacatttcataaaatgggcatgaaggattccttcaaatgaagacgtggacaaaatgattggtcaggtcctttgctctactgttgaatggaggaggattttttttttttttccctcacacaggggttttcttggagctcaagtttggatgaccccagacagtaagataatctcatcatggtaaagttaatatgaaatatgtggtctccaaacagcctctcccagaggccaggatcagcaggtttgagtggataattggcttgtggtcattttctcataggatttttcttttagtagtggaaactgtttttcaaatcaaatttggatgccaactatgtggaacagaagtgtggctgctctggtggaagtggcaatggtagtcctagagtctccctgtcagccacaccctttgtctccccctacccaagggaccctgtggcctggaaccgcagtgtgaaatgctatatagtgcaatgaagtcaattcgaagacaagagttctttgcctttctcatctaatttttagttatggatatgagacgcttgttcagaagtatggaaaagtatatataatatgttatcttttagatgtgggtgtaaatatgcttatgtatgcaatatgcttatattttaacgcataaacaacatgaataaagcaaacactctagacttctccaaatgta

SEQ ID NO: 182265 - DNA, 1193 bp, Homo sapiens
  Payload ID: 15891
  Gene Symbol: SMIM11B
  Gene Name: small integral membrane protein 11B
  Uniprot ID: P58511
  ENST ID: ENST00000622934
  CDS Start-End: 146-322
ccccggcaggacggtagaagtcgtggtttgtgcgcggccaggcgctggagcctccgctgccgggagcaatcagaccttccagctgcctctcatgtacttgtctgttgggggcttgtgttgatcaggagtgaattcacagtctaccatgaattggaaggttcttgagcacgtgcccctgctgctgtatatcttggcagcaaaaacattaattctctgcctgacatttgctggggtgaaaatgtatcaaagaaaaaggttggaggcaaaacaacaaaaactggaggctgaaaggaagaagcaatcagagaaaaaagataactgaaggtcctaactgggaccacctactccccttggagggtccggatggagtttcccctctgcggctgcctctcactcatcctccaccactttgccgacaaggaaggaaggacaatcgggaggagggagtcttgcttggcgaccatctggacaatatctcgcccatggcaagctggatccctgtggattactttgagctaaagacatttcataaaatgggcatgaaggattccttcaaatgaagacgtggacaaaatgattggtcaggtcctttgctctactgttgaatggaggaggattttttttttttttccctcacacaggggttttcttggagctcaagtttggatgaccccagacagtaagataatctcatcatggtaaagttaatatgaaatatgtggtctccaaacagcctctcccagaggccaggatcagcaggtttgagtggataattggcttgtggtcattttctcataggatttttcttttagtagtggaaactgtttttcaaatcaaatttggatgccaactatgtggaacagaagtgtggctgctctggtggaagtggcaatggtagtcctagagtctccctgtcagccacaccctttgtctccccctacccaagggaccctgtggcctggaaccgcagtgtgaaatgctatatagtgcaatgaagtcaattcgaagacaagagttctttgcctttctcatctaatttttagttatggatatgagacgcttgttcagaagtatggaaaagtatatataatatgttatcttttagatgtgggtgtaaatatgcttatgtatgcaatatgcttatattttaacgcataaacaacatgaataaagcaaacactctagacttctcc

SEQ ID NO: 182266 - DNA, 1863 bp, Homo sapiens
  Payload ID: 15891
  Gene Symbol: SMIM11B
  Gene Name: small integral membrane protein 11B
  Uniprot ID: P58511
  ENST ID: ENST00000624304
  CDS Start-End: 690-866
gtaagtgtgtgacgtcggggtagaagggagtgacccaaattccaaaagctctttgggatgctgcgatgtcgcggccggccccgcgctcgggttttccctcctagacaaaagtctgccggctcccggtcgcgccgggtcggggatccggaaggtgaaggccgccaggccccacctgcggggcgcccctgctggacctggccgtcgggcgccgtcaacccgttgagcagcgtgttccggctggcacgtggcccgggcggggcccaggattggttcaagcctacggtgttggtccccggagagtctagggagacaagcaatcccctggaatggtgggggaagcgatgacagcccctggtcctcatccgcagctctgggggaagtcggggggtggggagggcgggtgttgctccctgagtgttgggggaagggtatggggagaggaccctgaactagcccccaggttacccaggaggagctgaggcccagagaggttcagcgactcgcccagggttgcacagcgagcacaggcaccgacgtcgccctccgaggcctgggcttccagcagggagagacccggacacctgtcatcgcttctcggtggatccctgaaatatcagaccttccagctgcctctcatgtacttgtctgttgggggcttgtgttgatcaggagtgaattcacagtctaccatgaattggaaggttcttgagcacgtgcccctgctgctgtatatcttggcagcaaaaacattaattctctgcctgacatttgctggggtgaaaatgtatcaaagaaaaaggttggaggcaaaacaacaaaaactggaggctgaaaggaagaagcaatcagagaaaaaagataactgaaggtgagtccacagtacccaaccttgcaaatgggagctggccagtgggttggggtgaccaatcaatgaacaagagaggtctgagacctccctgtccgtcgggtctgaagggctgcgtgggggcatgtggcctcacctgttctctaaggtagaactgctccataaagggccaggtgtgcagatcctggtcctgggatgtgagtgctgctgagccaaggtgcacggagcattagttcatccttcttgaaacctgcggtggcaatggttcttgacaggtattgggttaagaattgaggactcagtgacagctgtggaccttcttcccagagaagcacacatactgaaaccatctgcatttgtgtgtggggagaagtttgcagatgtggggagtcacaggtcatttgaaattccaagattaagaaaccctgttacctttaagataaagtctgactccatggtatgacaaataaatcccttcccagtctggtcttaacccagacctcatttgccacatgtgcccactccccatccccctgcaggccattcctcagccaccatggcctttggccttgcttattaggttcttcccaaggacctcctcaccaggcctgagggtacactcatcgttgtcacccagtgcctatcacagtgcacactggtgggcttagaacacacttggggagttacaatacatcaaggcaccagaaagttcctgttaagcccctgttacagatttaacacatgacaattcacagttaccttgattccagtgtgttgatgcagtttcttcactttgcaggttgagttctgtactttaaaaatcaggggattcagccaggtgtggtgactcatgcctgtaatcccagtgctttgggaggcaaaggtgggaggatcacttgagccaatgagttcaagaccagcctgggcaacatagtgaaaccctgtctctacaaaaattaaaaaaaaaaaacaaaaaaaaccaaaaaaaaaaaccaaaa

SEQ ID NO: 182267 - DNA, 1074 bp, Homo sapiens; identical to SEQ ID NO: 182261
  Payload ID: 15891
  Gene Symbol: SMIM11B
  Gene Name: small integral membrane protein 11B
  Uniprot ID: P58511
  ENST ID: ENST00000624758
  CDS Start-End: 371-547

SEQ ID NO: 182268 - DNA, 1021 bp, Homo sapiens
  Payload ID: 15891
  Gene Symbol: SMIM11B
  Gene Name: small integral membrane protein 11B
  Uniprot ID: P58511
  ENST ID: ENST00000623661
  CDS Start-End: 78-254
atcagaccttccagctgcctctcatgtacttgtctgttgggggcttgtgttgatcaggagtgaattcacagtctaccatgaattggaaggttcttgagcacgtgcccctgctgctgtatatcttggcagcaaaaacattaattctctgcctgacatttgctggggtgaaaatgtatcaaagaaaaaggttggaggcaaaacaacaaaaactggaggctgaaaggaagaagcaatcagagaaaaaagataactgaaggtcctaactgggaccacctactccccttggagggtccggatggagtttcccctctgcggctgcctctcactcatcctccaccactttgccgacaaggaaggaaggacaatcgggaggagggagtcttgcttggcgaccatctggacaatatctcgcccatggcaagctggatccctgtggattactttgcctctgccaagccaagcagccagctcctaggactcccctccctccacctgaggctccttgtcctcccttcctcaggagtctccagcctcccgggacttcccctccccgctgcccactccagcagaggctgccaactgcctgggagagagaagtgggcttcctggggccacctccccaactttggagtgtttggaaggtgatggagcgaccactaggaggcagtgtggacaggtctctgtaggactgctcaggcagacacctttgcagggacctcccaggtcgggagccctccacacttttcccatgggagcttctccctccaccccgagtcactactatctgctttcctagaaggcacttctttacttctaattcttctccactgcccagctcctggtttgttaaggcaaacccccatctctggcttctcctggaacctcacctgggaaagaaagaggcagccccggagctggaagctgcttcagggctcacccggaacagcagactcaacctggacccatccaggcatctcctgggagtttcacccaattgcttctgcctggcaccagctcagag

SEQ ID NO: 182269 - DNA, 684 bp, Homo sapiens
  Payload ID: 15892
  Gene Symbol: SMIM12
  Gene Name: small integral membrane protein 12
  Uniprot ID: Q96EX1
  ENST ID: ENST00000417239
  CDS Start-End: 396-674
gccaccttttgggggagagtgggtggaggatgttgtgattttacactagggagtttgggctgtcattcattcgttcagcagaccttttttgggcactctgccaggcagggtaggagaggtgcctggatggatagggcataattgggccagacagacacggttcttagccttttggagcttaaagtgtcttgagaaacgcagacagggaaaaggaacgacttttcatattgtgaaaccaggagattcatcgtagattgtgtttcatggggaaaaggtggccggctgtgctcatggagaaatttcatagagcagagaaaggcatctttttcccttcttgaaatgttggcagactaggtcctggggtcaacaataggcttgaagctctattagatgtcatgtggcctgtgttttggaccgtggttcgtacctatgctccttatgtcacattccctgttgccttcgtggtcggggctgtgggttaccacctggaatggttcatcaggggaaaggacccccagcccgtggaggaggaaaagagcatctcagagcgccgggaggatcgcaagctggatgagcttctaggcaaggaccacacgcaggtggtgagccttaaggacaagctagaatttgccccgaaagctgtgctgaacagaaaccgcccagagaagaattaatggaggacac

SEQ ID NO: 182270 - DNA, 3454 bp, Homo sapiens
  Payload ID: 15892
  Gene Symbol: SMIM12
  Gene Name: small integral membrane protein 12
  Uniprot ID: Q96EX1
  ENST ID: ENST00000521580
  CDS Start-End: 146-424
ctgcgctccgagagagccggcggccagtgggcagggtcacagggcaaggtcccgcgggccgctgggtgcggcgacttccgtgctcccggcgagcgggcggagagcgggggccgcactggggagtgtgggctgggccgcagatgtcatgtggcctgtgttttggaccgtggttcgtacctatgctccttatgtcacattccctgttgccttcgtggtcggggctgtgggttaccacctggaatggttcatcaggggaaaggacccccagcccgtggaggaggaaaagagcatctcagagcgccgggaggatcgcaagctggatgagcttctaggcaaggaccacacgcaggtggtgagccttaaggacaagctagaatttgccccgaaagctgtgctgaacagaaaccgcccagagaagaattaatggaggacacagggccctatggtcctactgtgggtggtgacttgtcctgctaccatgttgacagagccccagaacccacatctaattggctttgttgcttattctggcccttcccacaccacacagccacacaaatactggctgctccttgatggccaggcagacccagcagcagccgaggggccagtgaagaggaaggccgcatctgttgtgtggtggccacaagcactcaggcatctgagtttactggtgcactgctgggaggagagttatgagatgaacattggctgtcaatctctgtgggcaggcggtttggcctctagtgggaatggctgggatttgggcgttgcctttaggagggatacctgcatgtctagttccagtctgcactggaaagaattcaaatatgcacctggctcccttcactattttgccctatcctttgtgctcattcttactgaaatctgtcttgtcagctcaggaatgggattcccccaggaaggaaagcacttttctgttctgggaagcccagactgttcactttggggcagggacgaacatgtgcctcgtgaatttgcttgaaaacagtcaccatcttctacccccatcactgtatagtgaaaaacctgattaaagtggtatctgagaaccataatgatcgaatcttatcatccaggtggtatttgggggtcttcttaggagttaggcaagtacaggcattttagagcaggataacattggtattaaagggtgccaaggagccctggaaactgctttactagtgcggttgcactgaaccctggaggcacagattcccaggaacctttttaccattattacaattggctgcagcaccttcaagtctaaatggaggtagacctcacatacacacacatagacgcctttccctataaaagtatatacgcacattcaagaaaatttggtagggattttaaaaaggtcacccatgttcccagctcgttaataacaaccgttaacattttgttgtcttttactaattctctgcataggttttagagatagttatcattactgtacatttaattttatatacttttctcactattatcattttcccattttacatggtcatcataattggttttttggagacagggtctcactctgtcacacaggctggagtgcagtacaattacggctcagtgcaaccttgacctcctgggctcaagtgatcctctcacttcagctcctcaagtagatgggactacaggagtatgccaccatgcccagctaatttttttatttttttgtagaaccaggtctcactatgttgcccaggctagtctcaaactcctgggctcaagtgatcctccggccttggcctgtagtttcttttttctttttttttggagatggactctcattctgtcacccgggctggagtgcagtggcgtgatcttggctgactgcaacttctgcctcctgggttcaagcgattctcctacctcagcttcctaagtagctgggattacaggcgtgcgccatcgtgcctggctagtttttgtgtttttagtaaagacaggggtttcaccatcttggccaggctggtctcgaactcctgacctcaagcgatcccatctgcctcggcctcccaaagtgctgggattacaggtgtgaggcaccgtgcctggcagtctgtagtttttttttgttgttgttgttgttgttgttttaaatatggagtctcgctgtattgcccaggctggagtgcagtggcgcgatcttggttcactgcaacctccacctcttgggttcaagcgattctcctgcctcagcctcctgagtagctgggattacaggtgtgcgccgctacgcctggctaatttttgtatttttagtagagacagggtttcaccatgttggtcaggctggtctcaaacttctgaccttgtgatctgcctgccttggcctcctaaagtgctgggattacaggcgtgagccaccgtgcctggctgtagttgtttataatagcaacataattgtctatcaagtgggagtatgacataagtttatcctggacaatttccatattgctggacatttgaattgtttctggttggtcactcgtttagatactgcaacgaatatcttatatgaagcttttcctgcgttttggaataaacagtaaaaatagtaaatgtcattttggatgaaatgggataaatgagcagttttgaggatctcatgcataacaccaaatgtctttccaaaagggctctaggagtttctactaaatcttaccactgaagacgttgctggtaaggctgtgaggggagtaaaagcagagagcaggaagaagcataagaagctgttgcctcttgaagcctactgatgtttaactaaagtcagcacagggcagtagtgagcatttgatgaattgatctgcctctaaaagggagtgggtattggccctgcttcttaggttctctctcgtgaggcctgatggtgtccacaggtgggtgagggtggagttcctgaacagttagaggggccagctgtgaagaggtgccagctggaggtgccttccaggacctggtggtggcctgagaggagggagcaggttgagtcgttggcttcttctaaggctccctgaggcctagtgggaatgcggaaatgagctgctgttgcttcccagggaacaaatcggatggaacttgggaagagactgtcagctaccaagtaaggagatttctggttctggctgcaggttctggctgatgagcaggccttatcggcacaccagtgctgccaccctatggcagtcctgggcattaccaagcctgcagtcacttccctgggctaaaccaaacactagtgctgacagaggtcaggtgacaaatgagccaccacgctggcagaaagtatagacctgccgaaagggggcagtggtgactcaccttccaatctgctgctcatccagtggtaccagatttttgaatttttctaaaagatgttctaagagctccagagggggtaaaaaaaaaaaaa

SEQ ID NO: 182271 - DNA, 897 bp, Homo sapiens
  Payload ID: 15892
  Gene Symbol: SMIM12
  Gene Name: small integral membrane protein 12
  Uniprot ID: Q96EX1
  ENST ID: ENST00000423898
  CDS Start-End: 269-547
gagagcgggggccgcactggggagtgtgggctgggccgcaggtgagcgcgcggtcccggcgagcaggtcgggtcagcccaggccagtaacctctgagttacgggaggagtgatcgctagggtccaccccggtcccggccagatctgccagctcccctctctggcgggtgttctggtgccaagtctgggagcccaggtagccctccgcagacagggcttctcggcacctcaatgaggacggacgttgatgaggccatgaatgagatgtcatgtggcctgtgttttggaccgtggttcgtacctatgctccttatgtcacattccctgttgccttcgtggtcggggctgtgggttaccacctggaatggttcatcaggggaaaggacccccagcccgtggaggaggaaaagagcatctcagagcgccgggaggatcgcaagctggatgagcttctaggcaaggaccacacgcaggtggtgagccttaaggacaagctagaatttgccccgaaagctgtgctgaacagaaaccgcccagagaagaattaatggaggacacagggccctatggtcctactgtgggtggtgacttgtcctgctaccatgttgacagagccccagaacccacatctaattggctttgttgcttattctggcccttcccacaccacacagccacacaaatactggctgctccttgatggccaggcagacccagcagcagccgaggggccagtgaagaggaaggccgcatctgttgtgtggtggccacaagcactcaggcatctgagtttactggtgcactgctgggaggagagttatgagatgaacattggctgtcaatctctgtgggcaggcggtttggcctctagtgggaatggctgggatttgggcgttgc

SEQ ID NO: 182272 - DNA, 2618 bp, Homo sapiens
  Payload ID: 15892
  Gene Symbol: SMIM12
  Gene Name: small integral membrane protein 12
  ENST ID: ENST00000426886
  CDS Start-End: 65-289
gctcccggcgagcgggcggagagcgggggccgcactggggagtgtgggctgggccgcagatgtcatgtggcctgtgttttggaccgtggttcgtacctatgctccttatgtcacattccctgttgccttcgtggtcggggctgtgggttaccacctggaatggttcatcaggggaaaggacccccagcccgtggaggaggaaaagagcatctcagagcgccgggaggatcgcaagctggatgagcttctaggcaaggaccacacgcaggtggctggaatgaggctgtgaggctccagcagccgttttgtgccacgaggcagtagaaacctgggttcctgatgactgtggagctgccgaactaatctggacctccagattccatacctgcaagacacatgaacatctgtcttatccatccctggagaggatccctggagaggagcaaacccaggccatccggattttctgcatgggagacctggctgaccgctgcctgggctgctttcaagtctcaccgaattatgaagtcaactactgggtgtttagaatgtctcaagttcaaagactagcaggctagaagcagacatctgagagaacttcgggcaccttagcaggaggaatattaagatgtggcatgctgggcttatcgggagactggatagggatcagaaggaatacatttctattctgcgagctgcagagctcaggagtcgttctgatatcaggcccattgctgactctgctaggaaatgtggaaagctgcagctgcagacagctggctgtgcctgcttcactggagttctcagctctcttacacctgtctgtttagaaaggagcagacaggctgtgaagctctgcaggattcttttcagtgctggggcagaaggagaaatggtggggacagccactctgggcatcagaaccgaatacctgctccccactcctctcagttgcacagcccagctcctggcttcactgcagtgggaagggagatgaaggactcttgaactcagaatatgactgaccaagacccttacagctggggtggaggtagggggctgaaggcaggttctggaggtggagattgagtcttccagttgttttcctggcaacagcgggaacaatagattctaggttctggctggctcaggagttggggtgtctgacctgtctttcctcagtcccttctgctatagatactgatagtcctctgccaccaggctctgcctaccaagtccctgagctcttcctgacctagcctggctctgagaggggagccagcatggcagagggtgggcctggtaccagttgtgtctccctgaatacaggatctgagagctggggagctatggacacccagagcccatcagcctggtctctcccctcactgtaggttcccaggccagtggctggttcctgattttacctagtcttctgcactgggataagaacctgacatccagcttcccctttgggagtaaggcctcttccacgggctgctcctggtctgtgttttccactgcagtctgggagcctacttcccccatgaaggccctaaccccacccatgaagacactacatgaattactgtccagactggactccagatgcagcctcggattagacccaatttggcctcatctccttggagctgtctagtaatttggaatacacgctgctccctacttagccacctgcaaagcagggtccatctcccagcctggttctgccttttcctcagtcttatatgtgtgtgtctgagtacatgtgtcagtcagtgatcatgccaggacggccagctggacttgtgtcagcatgcacatatgttccttgaggctgtcccgtgcaggcgtgcactgagttctcagcccagttctgaagcgtgtttgtgaatatgcccagatacatcatgaacattgctgggatgctaggagggggatcagtatgaatgacattgcatgtcctcaagtacacaggtatgtgtctacgcacacgcacaaacctctctaatatgtatgtatgcacgtgtacatgtgtataatatggctaagtgtgtgtctgggagtatttgaccatgtctgatgtgaatcttctgcccattctgaaaggaaaggggacatgggcccactctccctttttgtagttacactgtggtcagggctggcttgtgacagagggagtcaaggtgagtgcccctctgaacttctgggatctttctgcctaacattctgagacttccccagctgttccctagtcctgcagccttggctgtcagtacttcaagattatctggccaggcgtggtggctcatgcctgtaatcccagcattttgggaggccgaggcgggcagatcatttgaagtcaggagtttgagaccaggccaacatggtgagaccccatctctactaaaaataaaaaaattagccaggtgtactggcacgtgcctgtaatcccagctacttgggaggctgaggcaggagaatcacttgaatccaggagacagaggctgaagtgagtcgagattgcaccactgcactccagcctgggtgacagagtgacacttggtctcaaaaacaaacgaacaaacaacaaacaaacaaaaaaaaaaaaaaaaaaa

SEQ ID NO: 182273 - DNA, 918 bp, Homo sapiens
  Payload ID: 15892
  Gene Symbol: SMIM12
  Gene Name: small integral membrane protein 12
  Uniprot ID: Q96EX1
  ENST ID: ENST00000456842
  CDS Start-End: 110-388
ctgggtgcggcgacttccgtgctcccggcgagcgggcggagagcgggggccgcactggggagtgtgggctgggccgcaggtgagcgcgcggtcccggcgagcagatgtcatgtggcctgtgttttggaccgtggttcgtacctatgctccttatgtcacattccctgttgccttcgtggtcggggctgtgggttaccacctggaatggttcatcaggggaaaggacccccagcccgtggaggaggaaaagagcatctcagagcgccgggaggatcgcaagctggatgagcttctaggcaaggaccacacgcaggtggtgagccttaaggacaagctagaatttgccccgaaagctgtgctgaacagaaaccgcccagagaagaattaatggaggacacagggccctatggtcctactgtgggtggtgacttgtcctgctaccatgttgacagagccccagaacccacatctaattggctttgttgcttattctggcccttcccacaccacacagccacacaaatactggctgctccttgatggccaggcagacccagcagcagccgaggggccagtgaagaggaaggccgcatctgttgtgtggtggccacaagcactcaggcatctgagtttactggtgcactgctgggaggagagttatgagatgaacattggctgtcaatctctgtgggcaggcggtttggcctctagtgggaatggctgggatttgggcgttgcctttaggagggatacctgcatgtctagttccagtctgcactggaaagaattcaaatatgcacctggctcccttcactattttgccctatcctttgtgctcattcttactgaaatctgtcttgtcagctcaggaatgggattcccccaggaaggaaagcacttttctgttctgggaagccc

SEQ ID NO: 182274 - DNA, 2817 bp, Homo sapiens
  Payload ID: 15892
  Gene Symbol: SMIM12
  Gene Name: small integral membrane protein 12
  Uniprot ID: Q96EX1
  ENST ID: ENST00000446026
  CDS Start-End: 1890-2168
agcaaaggcatctgttatgctcctgccaccttttgggggagagtgggtggaggatgttgtgattttacactagggagtttgggctgtcattcattcgttcagcagaccttttttgggcactctgccaggcagggtaggagaggtgcctggatggatagggcataattgggccagacagacacggttcttagccttttggagcttaaagtgtcttgagaaacgcagacagggtaagccagcatcgtgcctgacacagagtaagtggttataagtgtcgaataaaggaatgaattgacttatttgggaatgattagaatgtgagcaggacggtagcgagagactttatgctgcatgtgagagatagttgtgaactcatgcgcgatatgttttaagacaggtttggaaatctgaacggacagttgctatttagggaagcatttacttatacagaggacttgctttaaaggtggaagtaaaatggagaagtattaggtttgggattcttcagaggtgcctcttttaactattactatgtctctgaatttcataaatccctgagtacaatctcagagtttgggaaaaggaaagctcttctaggtaatgaaatgccaggctgatgggaaaaaactgtaggaagctctccctaagtccagggtttggacagaaaccgtatacctctgcagtgtgttcttcccactagaaagagtgtaggctttgaaattggagaggcctgggttcaaaatcagtggctctatcacttctagtgatcttggataagttaacataatgtctgtgagcctttgtggccttcacaagagtctgggctaataattcctacatcatagaggtgttatgaggatcaaatgatgattagtgtgtaaattgtcatcatagtgcctggtgctgagacaataagcgggggagtcttggagatgctgcaattttttttttttttttaaatttcatgatgctgccttattgcaggggtccttaaccccctgggccacagaccagtggtggtcttcagcccattagaaactgggctgcacagcaggaggtgagcggtgggcaagctggcaagcattaccgcctgagctccaccttctgatagatcagcagcggcattagattctcacaggagtgcaaactctattgtgaactgcgcatgtgagggatctacgttgtgtgccccttatgagaatctaatgcctgatgatctgagctggaacagtttcatcccgaaaccatccctctccaacccccatctgtggaaaaattgtcttccacgaaactggtccctggtgccaaatatagattggggaccgctgccttatagtgttacgtctagagaacattgggattccttcaaagagaattggaaccaaagagagagggggagaatcatcttatccttggtgaggtttcgattgttcactttagatcagagatagtagtgttggagaaatacctacaggggcataaacagaaagatcttttagtggatacttttgggcaagtctcttaaccctctgatagtgggttatgtatctacctcacgtggtggacatgaggattaagagagtgagtgtatatgaagcacctagcccaaggcctggcatgtaagtgctcaataaatggtagctgtgttattataactgtgaatgatctttgataattgataatggtaataatcatttgagatggaattggccattagagtgatccaatttgtgtgtttttacattactttggtattgccctacttcaattcaggaggccctgaggccattccactccgctccccgccccaccccaccccaccccaccccccgggcttgtacagtgatttttcacagaaaatcttcaggttctgcggtatccagaatgtcatgtggcctgtgttttggaccgtggttcgtacctatgctccttatgtcacattccctgttgccttcgtggtcggggctgtgggttaccacctggaatggttcatcaggggaaaggacccccagcccgtggaggaggaaaagagcatctcagagcgccgggaggatcgcaagctggatgagcttctaggcaaggaccacacgcaggtggtgagccttaaggacaagctagaatttgccccgaaagctgtgctgaacagaaaccgcccagagaagaattaatggaggacacagggccctatggtcctactgtgggtggtgacttgtcctgctaccatgttgacagagccccagaacccacatctaattggctttgttgcttattctggcccttcccacaccacacagccacacaaatactggctgctccttgatggccaggcagacccagcagcagccgaggggccagtgaagaggaaggccgcatctgttgtgtggtggccacaagcactcaggcatctgagtttactggtgcactgctgggaggagagttatgagatgaacattggctgtcaatctctgtgggcaggcggtttggcctctagtgggaatggctgggatttgggcgttgcctttaggagggatacctgcatgtctagttccagtctgcactggaaagaattcaaatatgcacctggctcccttcactattttgccctatcctttgtgctcattcttactgaaatctgtcttgtcagctcaggaatgggattcccccaggaaggaaagcacttttctgttctgggaagcccagactgttcactttggggcagggacgaacatgtgcctcgtgaatttgcttgaaaacagtcaccatcttctacccccatcactgtatagtgaaaaacctgattaaagtggtatctgagaa

SEQ ID NO: 182275 - DNA, 4688 bp, Homo sapiens
  Payload ID: 15893
  Gene Symbol: SMIM13
  Gene Name: small integral membrane protein 13
  Uniprot ID: P0DJ93
  ENST ID: ENST00000416247
  CDS Start-End: 282-557
ctccggggcgatgagggactagaggcgccctgaggcccgcctgcctcccgcgctctggccaccccggcgggaaaaggatcgggcgggcgggcggtcccacagtgcccgcctttgcgccgccccaccccctgggggcgctgccgagggggcgccagccgcccatgccgccccggcgcccagccgcgcctggcgcccgccgctgaagcgcaggacgcgccgccgcccgcgctcaccgccgtccgcgccagccgccccgagccgactgcccttctgcccccaagatgtggcacagcgtcgggctgactctgcttgtgttcgtggccacgctgctgatcgtcctgctgctgatggtgtgcggttggtattttgtatggcatctttttttatcaaaattcaagtttctccgggaactggtgggagacacaggatcccaagagggagatcatgagccttcagggtctgaaactgaagaagacacttcctcctctccacacagaatcagatccgctcgccaaaggagggcacctgctgatgaaggccacagacccctgacatagtcctgtacttgtgaaggatgaaaaggcagttgccagcttctgtcttttactgacttcgctttgaaatttactaatgactgaagaacatttgtattggattttaagtcgaattttaaaaaagatttacatgtaagccatataaaaataaagggaactgaaaccaaattggactattataaatttcatcttaaagataatcttttgtttcaccagctttctacttatacacttattccttggcttttgggcttattttcttgcactggtgcagatctggtaaacattaaaggcttgaaaaaccatattttgttagccctaaaatgtacatttttcttcccattttaacttatctgaaattgggatgcatctcattactgtcaaccaggtgatagtcatgtaacgctcctaccgtgtgcatgtgtgaatttacagcttgtcatcgtgtcatccctttaaccaacatgtgttttgttggtatcaaatgtgtcaggtttaattgacattttaaaatgtcttcaaaaagatcacactatgattcagcattgaaacgaaaagttattgtgtatgcagaaaagcatggaaacagagcagcagggcgtacatttgatattagtgaagcaaatattcgtcgctggagaaatgatcgcaattccatattttcctgcaaagcaacaacaaaatgttttacgggacctaagaaaggtaggtacccacaagtagatgaagctgtactacgtttcgtcagtgagacacgtgcaaaaggattgcctatcacacgccaagcaatgcaattgaaggcaggagaagttgccaaaaccctaggaattgatgaaacaaaattcaaagccacaagaggctggtgtgaccgattcatgcgtcgagcaggactatcattaaggcatcaaacatcgttttgtcccaagctccccactgccattaaacagaagacagtgttggagcactctttcaagaagtgctgcataaccagtactcttgacaacaccgggagagacgttctgtggaaaaatgcagacatcaatgactgtggtttgaaaagtgattcagaagagttggattcagaatatgaagttataattataacttaaccaatttatttcacacattttctttacatatgcacaagattgatgtgataaaaatctgtttaactcaaagcgctgtttcaataaatataaacattttctgtgatatgaaagcattgtgtcatagtttaatgggcagtgttttttcttagtgatacatatggtgcatcttaacaattggtagtgtcttaggttaaattaaaaatggtagcttgtaaatttatttttctttttaagatagcagttatttattggggaatttgattctgactcttacaatgttaaacttgtaatcctgtgtgaaacacatgtttttgggggggagggggtaaccaagatttcagggtagtaacttaggaatctaagaactatcttctactttaggaagagtgggattagttactccctttgtataggaggactttatgctcaaggaatgtgttgtggagaaaaacacttcttcacaaacaattcagtgacaagacctcaaaggtaatgcgtattgaggaaaacagtagtgggtgaaaattcccgcttagctgtaaaatgactctcttgccaggtttccgtgtttgtctcaactgaactctgggctgagtgtttaccagggagaagagatgtgaattaaacaaccttcctgtttagtgttacctgctttgtacaagaatgaagtgcaaagccaacttactttattaatccaagttctttttatgtttttcttaacctttattaaggactagtcatcacaaaatatctatttaacctctattttatgatggtgtgttattatgtttgatacctcatacttcttgcttagagttttgtttaacagttcactggctctgtcccaatgtttgtgatgaacacctttttgctatattgtagctcttggagatactaaaagagaattcacagaacataactttagttttatgtgtttgctaggggaagatttcctagcagctgagagcaaggcacagtctctgtcttcatttctttattagatacaattttctatttttatgtgactctagggcataacaaaacagtgacagtttcaagcgttaattttaatgcttcctactagctaaatatcatcttaaaatgattatcagaaaaaaaaataatgcccccaaaaacttttgggggcattatttggtactgggaggatatttaaattagatttttcatagtctattgttttgaactatggattctgttttatggtggatacctaaggtttatataatagttgctggaaaacttaaagtagctggtgagcttcctgttatgtcactattaaagaatgatggctgatgtaactctgcccctgaaatctacaagggtcatgcccaaattaatacaggttaacctttgtagaggtatatatgttggcattatttattgacatttatgcttcaagcatgtcttattttatgtaattttaagaaatactctatttaacttgtgaaatatacctaaaagcatactagttagctcttagactctcacttagggagggtaaagaaacatcactgatgccaatatgaagatctataaacaaatcctttgtttagaacttttttctcttcgtgcacctcacaacacacttaccatggtacatatttcttaatgccactaagaaaggcaagatagtgaacgcagaattatttatgtggtatagtgtttgttttcctgttttagtgcttttgtagctaaaacttactggaactgcatcacaactacatttgcagtctcagtgggaggtggactagcctgtggttaattttagagcttaaaagtttataagcattaaaaacacatacatgtattagaatcttgtctaacccctcacaaaggatgatggtgatcagcatgccatcttttgaagattaattctaaaattgaggactctggtaggttgttttatttccttcccaaccagccattcatttccaattgttctgcctttgaaactttttgtgaaaattgcctgtaccaattgcattggttgcgttgctctgatttaaatgccaaaaacactaaatatttgtgtagtgctgttaaatgaggtttttgatatttccatcaaaatgaatataaaattcacttgatggattttgtagtgatgttttcacagttgaaacaaacatattgctgtgcggtggacagccacttcacagacatgcagacccatttctttagagatattaggtttaaaacccattttaattttattttgctgaaggtttggaatatataaagtaatggattcacaaaatatgatatcttaaaacatgttgaaagatttgaaagtggtgcatttttacttttaagagcagcaatctttgaaattagtcaacaatgcagtcttttttaaaagtcagttttctcaagtagtatgttgtaacgtaagatgtaactgatataactagattttgactggtaaacttaaagtgctttttatatttgaggttgactttaaaaagccattgagcagtcctcagaggttatggactctcaagcgactaatggaatagtgttctgttgtgaagtctagaactaaagcaccttgtattgtctgcttctaaagtgtcctatagtttttaacttaaagtgtaaagagtaacattttatcttatgtcaattaaagttacatttttcatttgttggtgtacatgtgctacctgttttatggggaatgtttaacacgatcctccaagttggttctatgcataaccattcaccaaatactgctgctgtgattccttgaaggaaatattctgtggtctgctatgatgcattgccatcttgctgcttgacaataggtttataaataattagaattacgtgttttaatagtacctttgtatatataacaagatgtaaaattaaagatgaggaatgtgtgtaaatgatcattcactgtttttgttttaaaactggtcagtactatgaagcttctgtggtttgtatgatgttttaactttcactttaaactgcatagaataaattaaattgaaaacaa

SEQ ID NO: 182276 - DNA, 1251 bp, Homo sapiens
  Payload ID: 15893
  Gene Symbol: SMIM13
  Gene Name: small integral membrane protein 13
  Uniprot ID: P0DJ93
  ENST ID: ENST00000376935
  CDS Start-End: 84-359
gctgaagcgcaggacgcgccgccgcccgcgctcaccgccgtccgcgccagccgccccgagccgactgcccttctgcccccaagatgtggcacagcgtcgggctgactctgcttgtgttcgtggccacgctgctgatcgtcctgctgctgatggtgtgcggttggtattttgtatggcatctttttttatcaaaattcaagtttctccgggaactggtgggagacacaggatcccaagagggagatcatgagccttcagggtctgaaactgaagaagacacttcctcctctccacacagaatcagatccgctcgccaaaggagggcacctgctgatgaaggccacagacccctgacatagtcctgtacttgtgaaggatgaaaaggcagttgccagcttctgtcttttactgacttcgctttgaaatttactaatgactgaagaacatttgtattggattttaagtcgaattttaaaaaagatttacatgtaagccatataaaaataaagggaactgaaaccaaattggactattataaatttcatcttaaagataatcttttgtttcaccagctttctacttatacacttattccttggcttttgggcttattttcttgcactggtgcagatctggtaaacattaaaggcttgaaaaaccatattttgttagccctaaaatgtacatttttcttcccattttaacttatctgaaattgggatgcatctcattactgtcaaccaggtaggtacccacaagtagatgaagctgtactacgtttcgtcagtgagacacgtgcaaaaggattgcctatcacacgccaagcaatgcaattgaaggcaggagaagttgccaaaaccctaggaattgatgaaacaaaattcaaagccacaagaggctggtgtgaccgattcatgcgtcgagcaggactatcattaaggcatcaaacatcgttttgtcccaagctccccactgccattaaacagaagacagtgttggagcactctttcaagaagtgctgcataaccagtactcttgacaacaccgggagagacgttctgtggaaaaatgcagacatcaatgactgtggtttgaaaagtgattcagaagagttggattcagaatatgaagttataattataacttaaccaatttatttcacacattttctttacatatgcacaagattgatgtgataaaaatctgtttaactcaaagcgctgtttcaataaatataaacattttctgtga

SEQ ID NO: 182277 - DNA, 6483 bp, Homo sapiens
  Payload ID: 15894
  Gene Symbol: SMIM14
  Gene Name: small integral membrane protein 14
  Uniprot ID: Q96QK8
  ENST ID: ENST00000295958
  CDS Start-End: 388-687
acgcacagcgtgtcgtaggcgtccgaagccgcaggctcccgcccggcttcccgggacgcacagggcaggcgctgggcatgcgcatgctcggcaggcggggcagctggagtctccaggcgctgcaatctgttgcgccgccgcccgcgggagccggcagatccgggtcttgtggctaagagtgacgtggtcactcgaatcaaaacagaggagggggaggaagccggcggccagaaacggcagtggcagcagcgtccggagcagccgcagccttctggaagctccaggcggtctttctgccgagcctcggtcccggcccccatcctccccgccccatcggttgttgtctgggcggatttaaacagtcaagtaaaatcaagctgggtaatcatggcagaaggtggatttgatccctgtgaatgtgtttgctctcatgaacatgcaatgagaagactgatcaatctgttacggcagtcccagtcctactgcacagacacagagtgtcttcaggaattaccgggaccctctggtgataatggcatcagtgttacaatgatcttggtagcctggatggttattgcattgatcttgttcttactgagacctcctaatctaagaggatccagcctacctggaaagccaaccagtcctcataatggacaagatccaccagctcctcctgtggactaactttgtgatatgggaagtgaaaatagttaacaccttgcacgaccaaacgaacgaagatgaccagagtactcttaaccccattagaactgtttttccttttgtatctgcaatatgggatggtattgttttcatgagcttctagaaatttcacttgcaagtttatttttgcttcctgtgttactgccattcctatttacagtatatttgagtgaatgattatatttttaaaaagttacatggggcttttttggttgtcctaaacttacaaacattccactcattctgtttgtaactgtgattataatttttgtgataatttctggcctgattgaaggaaatttgagaggtctgcatttatatattttaaatagatttgataggtttttaaattgctttttttcataaggtatttataaagttatttggggttgtctgggattgtgtgaaagaaaattagaaccacgctgtatttacatttaccttggtagtttatttgtggatggcagttttctgtagttttggggactgtggtagctcttggattgttttgcaaattacagctgaaatctgtgtcatggattaaactggcttatgtggctagaataggaagagagaaaaaatgaaatggttgtttactaattttatactcccattaaaaatctctaatgttaagaaaaccttaaataaacatgattgatcaatatggcagatgatttacagtccattatatgacatttgtaagccactcaacactagccttacaaggttcatgaaaggaggaaaacattaattctttctgcctttgctgatataatccacatagtaataatttaagctataatttatttttaaaatgagtgcctcttgggaagcttcttttctgttctaacagttccctgttaaaatgaaaatcttaggccagtgcagtggctcacacctgtaatcccagcactttgggaggctgaggtgggtggatcacttgaggtcaggagttcgagaccagcctggccaacatggtgaaaccctgtctctactaaaaatacagaaaaattagccagggttggtgcatgtgcctgtaatcccagctactcaggaggccaaagcaggagaattgcttgaacccgggaggtggaggttgcagtgaaccaagatcgcaccactgcattccagcctaagcaatagagcgagactccctctcaaaaaaaaaaaaagaagaaaatcttaaagctgtattagggcctgttaggttactgatatttgaatgcctatttacttatttactacattgagtcttttgttatcctctgacctataaaatattttaataaattactggtttacttcaagggaaaagaaggaaaatgagaaacatacatctttttttcactccttatctcattcctgtttggtgatgggatggattggggtaggaaggaatgttaatatgagagaaattttaaaatgtataaaaaagtaaaaggttgtattgttttgctcagtttgaaataaagtgaataccaatagcacttaaaaatgtctgcatgggctgggcacggtggctcacgcctgtaatcccagcactttgggaggccgaggcaggcgaatcacctgaggtcaggagttcgagaccagcctgaccaacatggtgaaaccttatctctactaaaaatgcaaaaattagccaggcatggtggtgtgtgcctataatcccagctactggggaagctgaggcaggaaattgcttgaacctgggagacggaggttgcagtaagctgagatcgtgccactgcactccaatcagggcgacagagcgagactctgtctcaaaataaataaataaataaaaatgtctgcatgacccatatggttatgaagtttttttcctagcaaatgattgcagattatttatgggggctagaagatattttgctatcaatgtaaggatttttttccccttaggtcagtctattcactgtttagatctggtaaattacttgtatgaattgaataaattctctgtatcattgtactgtttaatagtctctgatacaattgtgatactcataaggtattttcccccctttattatgattacattctagatcataaacattgtaagggcatcttttcattatataatccaatattgattgtttgaattcctccttgtacatcctggctttgtgctcaatttcttgaaataatataaccaactctaaattacttgtgttaatagatcggtaacatgacacaggtaagttaaatcctggataaatgagccccacagaataaaggtttttcctcttgctgtggcctactggaagccttcctaactctatagctggtaaagtagagcagaaagggccagaatggcttaagatggagctaaatccctatagcattccattttctgctcttgcctcttgaacttagaaggcttgcccatatatcctaacaatctgttctctgagctgttaggccaatccctggcaagagatattgatgtagtcactgaatctatggctcacaaataattgaaaattggctttgggagctgggcgcagtgactcatgcctgtaatcccagcactttgggaggctggggcaggtggatcacttgaggtcaggaggttgagaccagcctggccaagacggtgaaaccccgtgcctacaaaaaattagccgggtttggtgacacggcctgtagtcttagctactcgggaggctgaggcaggagaatcgcttgagcctgggagacaggttgcagtaagccaagatcacgccactgcactccagcttgagtgacagagtgagaccctgtctcaaaaaaaaaaggctttagaaggctttattggatgaaatggctgaaacttggatacagaatgtctagtattagacacctaaaaatctggattctttttggttgttgttttgagatggagttttgctctttcgcccaagctggagtgaagtggcgcgaccttggctcactgcaacatccacccccaggttcgagcgattctccttcctcagcctcctgagtagctgggattataagtgcccaccaccacgcccagctaatttttgtatctttagtagagatggggtttcgccatgtaggccaggctggtctcaaactcctgacctcaggtgatccacccactatggcctcccaaagtgctaggattacagatgtgagccaccgtgcctggccagaaaatctggattcttattcctagttcttcatttctgtcacatgcacttagttgacattacatctacatatattagctttttcctacatgagccatctatttacttagtaaccagtgttcttaatgaagtatttagtcttgggtttcttgtaaaatttctctgcattccttagacagtgtactatacatgaaatattcttgttgacctagtaatttatattattccatttaattcttaaacctatggcctttttattgagcacactcttaaatcattatttggcttgtaaacattcatctgaagtgtggctacaatcctctttaaataatctaggaaaaaagaaagataaagcttacattttcacagttttggctcttaaacacattccacaaatgccattaagaatttattttgttttaggccagtcatggtggctcatgcctgtaatcccagcaatttgggaggctgaggcaagaactgcttgagcccaggagtttgagactagcctgggcaacatagcaagaccctgtctctaccaaaaaaaaaaaagtttattttgttttagagtcatttaatgtgtttttatgcacaataatagtgggaggttgttttgttgcatttgtttgtttgttttgttttgttttgttttgctttccatgtgggaaaagttaacattggaactgtttctagtaaaagatttttttcaggctgggcacggtggctcatgcctgtaatcccaacactttgggagaccgagggagctggatcacctgaggtcaggagttcgagaccagcctggccaacatggaaaaactccatctccactaaaaatacaaaagtagcctggtgtggtggcacatgcctgtaatcccagctacttgggaagctgaggcaggagaatcacttgaacctgggaggtggaggttgcagtgagccaagatcacgccattgcactccagcctgggcaacaagagtgaaactccgtctcaaaaaaaaaaaaaaaaagatgtttttcatttttttcatgttatctatccaagcactgttccatggtcagcaagtcatatttcataatgtggattttccaaaataattattgaatacagctattctatggctacttttagtgtttttgtggtatgtggtgtgggagtgtttatggaattaccagtatcttaaattttcaaaggaaccttggaagtctatcactctaaatgaaagtctgtcactctacatgaattatgtgctcaaatttgaccaactcagtttaagacacaaaacagtaatttgaagaaggaaaaatgaagagagtttctagtttaatgggttaaatttttgttgttgcaatagtaagtttagtcttcttataatatttctaaatgaaaaatcataggtatttgttaccatgtgtgaagattagtttgttaaaagcaaaagtggtcgtgtgatatgctaaatgttaattactgattttatatgtttaaatcacgccaaacaaattatgtctgtgccatccagggtctgttgttaatctttttctgagtacttggattgggataaagggcttgtactatgcactttttattaatgaataaatagaaaacgttagtaacactttgtgttttctgtttggcttttgtgggaagagaagcaagcatcttttgcctagtagatgttaacattgtgtattaaacagtttctttgtaagacctaactaaagacattcctaagagagaacttaagttttaagaaaagttgtgagaaaaatattcataaaatatgcagtatggggccagtattcagaagtagagtttctctcttggaaattagattgcagtcacatttctttggttattttctttctctctctcttcctagaataccaggtaaaatagacatttactttgagggactaatatccaatagtgttaattatttaagcagatatatctagctcaaaaggaaccagacatgtcactgtaccaaaaacacacaaaagtgaaaatttgcttctgttctgtgacctagaatgtgtccagacattaaaggtcatgaatactcatatacatgtaaaaatagtaacactgctctggcatgattttgacgtcagtgtttatgtaataacttcagtgttatatttaaaatagataaatttgtgaaataacaatttcttggagacagtcaactttttatgatttaatctaaagattgtcatgtacatgtcaacggatatctgaatcctcagtgaaactgttaagttttcattaaatgactctgctgcaatactagttttcttctcagaaaatggaattcaaataaaataagttttttggtcttggcatttcacctgatgactttctctgttctggatctcaatttgtagagttgttgggggttcccccccctccaaaagatgctccataaacaccaactacaattatctttcatgatcatatttttaaaaattggagttacctgtgtgatcttttcccattagttgcttgtaggggactttagtgtgcgtatctcttctcagacaaatgtattatgttcgttcaataaacacttcaacaaattttta

SEQ ID NO: 182278 - DNA, 830 bp, Homo sapiens
  Payload ID: 15894
  Gene Symbol: SMIM14
  Gene Name: small integral membrane protein 14
  ENST ID: ENST00000511809
  CDS Start-End: 191-355
caaaacagaggagggggaggaagccggcggccagaaacggcagtggcagcagcgtccggagcagccgcagccttctggaagctccaggcggtctttctgccgagcctcggtcccggcccccatcctccccgccccatcggttgttgtctgggcggatttaaacagtcaagtaaaatcaagctgggtaatcatggcagaaggtggatttgatccctgtgaatgtgtttgctctcatgaacatgcaatgagaagactgatcaatctgttacggcagtcccagtcctactgcacagacacagagtgtcttcaggaatggacaagatccaccagctcctcctgtggactaactttgtgatatgggaagtgaaaatagttaacaccttgcacgaccaaacgaacgaagatgaccagagtactcttaaccccattagaactgtttttccttttgtatctgcaatatgggatggtattgttttcatgagcttctagaaatttcacttgcaagtttatttttgcttcctgtgttactgccattcctatttacagtatatttgagtgaatgattatatttttaaaaagttacatggggcttttttggttgtcctaaacttacaaacattccactcattctgtttgtaactgtgattataatttttgtgataatttctggcctgattgaaggaaatttgagaggtctgcatttatatattttaaatagatttgataggtttttaaattgctttttttcataaggtatttataaagttatttggggttgtctgggattgtgtgaaagaaaattagaaccacgctgtatttacatttacctt

SEQ ID NO: 182279 - DNA, 612 bp, Homo sapiens
  Payload ID: 15894
  Gene Symbol: SMIM14
  Gene Name: small integral membrane protein 14
  ENST ID: ENST00000505729
  CDS Start-End: 345-612
cactcgaatcaaaacagaggagggggaggaagccggcggccagaaacggcagtggcagcagcgtccggagcagccgcagccttctggaagctccaggcggtctttctgccgagcctcggtcccggcccccatcctccccgccccatcggttgttgtctgggcgggtgttgacagagtggcctcagacaaaactgtgaagtagagtttgcatatggtgttgcttaccttctggaaagtgagcctctccagctcaggccgcatctccatctccctttccaattctcacctccccttctccccttagctcagatttaaacagtcaagtaaaatcaagctgggtaatcatggcagaaggtggatttgatccctgtgaatgtgtttgctctcatgaacatgcaatgagaagactgatcaatctgttacggcagtcccagtcctactgcacagacacagagtgtcttcaggaattaccgggaccctctggtgataatggcatcagtgttacaatgatcttggtagcctggatggttattgcattgatcttgttcttactgagacctcctaatctaagaggatccagcctacctggaaagccaaccagtcctcataatg

SEQ ID NO: 182280 - DNA, 680 bp, Homo sapiens
  Payload ID: 15894
  Gene Symbol: SMIM14
  Gene Name: small integral membrane protein 14
  ENST ID: ENST00000507613
  CDS Start-End: 143-259
gcagcgtccggagcagccgcagccttctggaagctccaggcggtctttctgccgagcctcggtcccggcccccatcctccccgccccatcggttgttgtctgggcggatttaaacagtcaagtaaaatcaagctgggtaatcatggcagaaggtggatttgatccctgtgaatgtgtttgctctcatgaacatgcaatgagaagactgatcaatctgtaccgggaccctctggtgataatggcatcagtgttacaatgatcttggtagcctggatggttattgcattgatcttgttcttactgagacctcctaatctaagaggatccagcctacctggaaagccaaccagtcctcataatggacaagatccaccagctcctcctgtggactaactttgtgatatgggaagtgaaaatagttaacaccttgcacgaccaaacgaacgaagatgaccagagtactcttaaccccattagaactgtttttccttttgtatctgcaatatgggatggtattgttttcatgagcttctagaaatttcacttgcaagtttatttttgcttcctgtgttactgccattcctatttacagtatatttgagtgaatgattatatttttaaaaagttacatggggcttttttggttgtcctaaacttacaaacattccactcattctgtt

SEQ ID NO: 182281 - DNA, 2889 bp, Homo sapiens
  Payload ID: 15895
  Gene Symbol: SMIM15
  Gene Name: small integral membrane protein 15
  Uniprot ID: Q7Z3B0
  ENST ID: ENST00000339020
  CDS Start-End: 427-651
acttccgccttcctgcttccggtctggcggtgagtggggagtgggatccgatcccgtggggctatgtaggggaagttggtggctgcagctgccgtggttttctcctggtgtccagcagaaacggcggcggcgcaaggtgtggctgggccaacccaggatctcccaggaccctccgctctgcgcgacaaggggcccgcgcttgccaaggccgacgggcaggagtgaacgtggcctccgtgggtctgcagccccgataggccaattgtacagaatttaaaccgtctctcagatgtgtacagtagaactcaagaagacagactaccaagggtcatctgaagtcgtgattgggtcactaataacaccaggacaaagttaagggatcactactcaagcataagccccagttttcataagactgctgtgaagatgtttgatataaaggcttgggctgagtatgttgtggaatgggctgcaaaggacccctatggcttccttacaaccgttattttggcccttactccactgttcctagcaagtgctgtactgtcttggaaattggccaagatgattgaggccagggagaaggagcaaaagaagaagcaaaaacgccaagaaaacattgcaaaagctaaacgactaaaaaaggattgaaggactgaacaggctttgcaaccagaggaaaatcatttggaaaattacacagctttggaagaatccactaaagtttcttctttggatttcttgacagtatgatttagtaaatgaaatttgaccaaatggaagaatcatgttagttctgacctcaatactatagtaacttttaggcgtgggtgtagaagtttataggtttctattgacagttattgtaaattagcatttactgtggtacaaattctttataactgacttagtcatttgccgcttagcagtttatatactgaaatgaaaacatcttgtggggaaaagtgactttagattatgaactcaattcaaatgaactctatttaaaatggggtcctattttggacaaaggaaattaagaatgtaaaagtcagaacagtcttgaggtaaaaagtgtgctttggcttaaaagggatacagtatattaattacatcttttattattattgtttatttcttagaatcatttctggctttctcaaaacaaaataatattaatgagtacttctatttgctgcatttttcttattacagcctttgagacagctggtaattataagtcattttccattttttaaaacataattttataaagaattctcttatctcgactatgtagaataccacctactggacagaacaatttttgtactcacaaacactgccattttcttagagatggcttgagaggagtaacactatggtttaaagcttgcagtaaaaatgccaaacactgtagtaccttggaacccagtttattcttgtgctaagcagaactgtaaaatagttaaaatgtcttatcaagtaattcgccgattacaaagacaccatttgttttttatttcattctttgttttaactcatgtggtagtgatatttaatactttctgatcaaacaggttcaaagtaaaacgttaaatttcacatttcttttaaagaactcttaaagtgtaacagttacgccatacttcataagtggtaaagaaaggtataaaatttggaaacattttgttgggcatagtagtgattgggtgaaaaggataaattatatcaaaatgagaatgtgctgtaattggaagtagggagctaaaggatgtttctttcagtttagtagaactggaacgttttactattaaacatggcttttataaatgcatggtccaataattttattcactgttagtatttaattcactgtcagcttattaatgttttctgtacccattaatgaattttaaattacaaaaaattgtctagcagctacagtttaaaaatgaaactagacattaaaataaatttgataattttttataaagaggtcctggattttttttttttttttggaggaactaacattttaagttacattatgttatgcaagttagaatttcagttacagctaagcatacttgtaaaatttcaggactgtatctctcagaacctaaggaccactgagaatgtttatggaccagtttgaataacacttaatgctattcttttagattatcagtctctacttggtgccagtgtgagcaacacattataactcaaggcactgaaattattcagtgttaagatatatctataatatgtttggttttctgcaatcaagctgttcatggaaagaatttatgtacatgttttacttagggtcacattttagagtaaaagtattgaagcaaaggatatagtcataattctcagttacctactaaagttatggtttcatcagttctgttgtaacaacttaaaggtatttaaaggtctgtttttctataatttattagtcttaacacatgccagttttgtatttgtttgacatatgctttttttttccacttttttccatcatttagagagcctttctatatatgtgagattcatactttacagtgtgtgtgtgtgtgtgtgtgtgtgtgtgtgtgtaaggggctggagtatagagaatattgtgaggtttgggattcttcagaaaaatcacctctcactgcaacagagtactgttgttaaagaatcccatttgctattatctagaatacttttaagaaattgtttacttattacattgtttctgaagttctgagaactaagtacaatcaattaccattctaaagctggtcttgggggagaaagaaagctgtcccctggctgcctctaacaaacattttatcaaaaatcagcaaataaataaaagtttgtatgtcagaa

SEQ ID NO: 182282 - DNA, 584 bp, Homo sapiens
  Payload ID: 15895
  Gene Symbol: SMIM15
  Gene Name: small integral membrane protein 15
  Uniprot ID: Q7Z3B0
  ENST ID: ENST00000507416
  CDS Start-End: 335-559
gccttcctgcttccggtctggcgcagaaacggcggcggcgcaaggtgtggctgggccaacccaggatctcccaggaccctccgctctgcgcgacaaggggcccgcgcttgccaaggccgacgggcaggagtgaacgtggcctccgtgggtctgcagccccgataggccaattgtacagaatttaaaccgtctctcagatgtgtacagtagaactcaagaagacagactaccaagggtcatctgaagtcgtgattgggtcactaataacaccaggacaaagttaagggatcactactcaagcataagccccagttttcataagactgctgtgaagatgtttgatataaaggcttgggctgagtatgttgtggaatgggctgcaaaggacccctatggcttccttacaaccgttattttggcccttactccactgttcctagcaagtgctgtactgtcttggaaattggccaagatgattgaggccagggagaaggagcaaaagaagaagcaaaaacgccaagaaaacattgcaaaagctaaacgactaaaaaaggattgaaggactgaacaggctttgcaaccag

SEQ ID NO: 182283 - DNA, 1076 bp, Homo sapiens
  Payload ID: 15896
  Gene Symbol: SMIM17
  Gene Name: small integral membrane protein 17
  Uniprot ID: P0DL12
  ENST ID: ENST00000598409
  CDS Start-End: 167-523
gtctgcgcagccgcagtcagtgcggcgccagctctgcagagcccagacagggtccggttggggaggtcctcaggttctgaatcttgtgcctggagaaccagagaggaccctggagcaggaggagaaagagaagcttgtctcagaagctccacctcctcctggggcaatgcagagtctcaggcctgagcagacacgggggctgctggagcctgagaggaccaagactctgctgcctcgggagagccgggcctgggagaagcctcctcatcccgcctgcaccaaagactgggaggctgtggaggttggggcctccagccatgacagtgatgagaaagacctgtcttctcaagagactgggctttcccaggagtggagctcggtggaggaagatgacgaatcagagggctcccagggctttgtggagtggtcaaaagctccacaacaaacaaccatagtcttggtagtgtgcgtgctttttttgttcctggttttaacggggatgcctatgatgtttcacatttaactataatggtggctgttgttttaaaagtttaatttaatgaaatagatgccctatgtcatgttaaggaattgtgctagttaaaaatcaggaataggtgttgaatattttcaaatgcctttcaaacatcctttgagatgatttttaaaaaatttttggtgtgagttttcacatactttatttccatgaaatgaagacatcattgattgtaaaacattattttgtataccacggagaaagaaaagtgctaattaatcattaagatgccaccaactggaagatatctcctgactttgagaagatgaaaaaatgtgcaactgaagatcaatgaaatctggtacatttcctaacatcaaaccaactttgcattcttaaggttttggtgcaccagtcttttcatacactagattatatttattgatattttatgtaggattcttgcctctatcttcacatgtgagattggtgctatctttgtgaagttttggtatcatggttaagcttgcatcatagaaagacttgggtaacttttaccttttctatgcttttcaatagt

SEQ ID NO: 182284 - DNA, 573 bp, Homo sapiens
  Payload ID: 15896
  Gene Symbol: SMIM17
  Gene Name: small integral membrane protein 17
  ENST ID: ENST00000600547
  CDS Start-End: 149-460
agtgcggcgccagctctgcagagcccagacagggtccggttggggaggtcctcaggttctgaatcttgtgcctggagaaccagagaggaccctggagcaggaggagaaagagaagcttgtctcagaagctccacctcctcctggggcaatgcagagtctcaggcctgagcagacacgggggctgctggagcctgagaggaccaagactctgctgcctcgggagagccgggcctgggagaagcctcctcatcccgcctgcaccaaagactgggaggctgtggaggttggggcctccagccatgacagtgatgagaaagggctttgtggagtggtcaaaagctccacaacaaacaaccatagtcttggtagtgtgcgtgctttttttgttcctggttttaacggggatgcctatgatgtttcacatttaactataatggtggctgttgttttaaaagtttaatttaatgaaatagatgccctatgtcatgttaaggaattgtgctagttaaaaatcaggaataggtgttgaatattttcaaatgcctttcaaacatcctttgagatgatttttaa

SEQ ID NO: 182285 - DNA, 905 bp, Homo sapiens
  Payload ID: 15897
  Gene Symbol: SMIM18
  Gene Name: small integral membrane protein 18
  Uniprot ID: P0DKX4
  ENST ID: ENST00000517349
  CDS Start-End: 151-438
gacgataccatcgcttcagcagcatcctctcagacaagagccactatttctgattcagatcacctgtcatcgaagtttaaagaaggggaaacaggagacagaaatacactgaaccaaaaagattcaaaagagcaagtggaatctctaagaatggcttccagccactggaatgaaaccactacctctgtttatcagtaccttggttttcaagttcaaaaaatttaccctttccatgacaactggaacactgcctgctttgtcatcctgcttttatttatatttacagtggtatctttagtggtgctggctttcctttatgaagtgcttgactgctgctgctgtgtaaaaaacaaaaccgtgaaagacttgaaaagtgaacccaaccctcttagaagtatgatggacaacatcagaaaacgtgaaactgaagtggtctaacactctatagaagatgaacaaaatctctgaaagcagctcaacctcttctgagaaaaaaaatatattctgaggccaactgttgctacaaaacaaattctgactgaatggttaaaacatttctagtagaaggggaaaaaaaagttaaacatgcactgtttgtgtgtatagccatttcattaaatatacagtaaaacttcatgaatgtgaatttactaatctgtttaatactgacacttcaaaaactggataaaagattcctagagttcaatattaagcagcaaaagataagctggaaaagacaagcaaggctaatgatgctaaaatgattttataactaaccaattcatgtagacaaaaaatagtgtgttggtaacaaaaaggctatttaaaacatgtttctaagtctgaagtaaaatacttccacttatatatataaagttcctatttattaaaaagtagtattttct

SEQ ID NO: 182286 - DNA, 114 bp, Homo sapiens
  Payload ID: 15897
  Gene Symbol: SMIM18
  Gene Name: small integral membrane protein 18
  ENST ID: ENST00000626298
  CDS Start-End: 1-114
aacccgtttctactaaaaatacaaaaattagccaggaggcggaggttgcaatcacctgtcatcgaaaagatgaacaaaatctctgaaagcagctcaacctcttctgagaaaaaa

SEQ ID NO: 182287 - DNA, 691 bp, Homo sapiens
  Payload ID: 15898
  Gene Symbol: SMIM19
  Gene Name: small integral membrane protein 19
  Uniprot ID: Q96E16
  ENST ID: ENST00000416469
  CDS Start-End: 368-691
cgcgggggtaaggggggtggccgcccgcctgccctcggtcccgtgcggtccccgaaactccgagcacccgcccggtcccggcgcggagcccctcggcgtcgcgtggagctgcgagtcgcccgcttccggaagcgcacacgggccagttgcggcggcccatctgccggggcggcgggggctcggcgggagggttgaggctgaatcacgcgcagcctgcgggcggcggaaacgtccctagagcctcgccgccctgggacccgggctgcttcctgggagaggattacattttctccctgctccacttgactttcttccggaaggagcaggtctcgcaggatcggggccaagactggaagagttcagccccatggctgggggttatggagtgatgggtgacgatggttctattgattatactgttcacgaagcctggaatgaagccaccaatgtttacttgatagttatccttgttagcttcggtctcttcatgtatgccaaaaggaacaaaaggagaattatgaggatattcagtgtgccacctacagaggaaactttgtcagagcccaacttttatgacacgataagcaagattcgtttaagacaacaactggaaatgtattccatttcaagaaagtacgactatcagcagccacaaaaccaagctgacagtgtgcaactctcattggaatga

SEQ ID NO: 182288 - DNA, 2958 bp, Homo sapiens
  Payload ID: 15898
  Gene Symbol: SMIM19
  Gene Name: small integral membrane protein 19
  Uniprot ID: Q96E16
  ENST ID: ENST00000438528
  CDS Start-End: 50-373
accccaagcgcgcacagcggagcaggaggcgcccggcactcgcagccccatggctgggggttatggagtgatgggtgacgatggttctattgattatactgttcacgaagcctggaatgaagccaccaatgtttacttgatagttatccttgttagcttcggtctcttcatgtatgccaaaaggaacaaaaggagaattatgaggatattcagtgtgccacctacagaggaaactttgtcagagcccaacttttatgacacgataagcaagattcgtttaagacaacaactggaaatgtattccatttcaagaaagtacgactatcagcagccacaaaaccaagctgacagtgtgcaactctcattggaatgaaacctcagaaaaagagcaacagaagtaattgtttcaagctcctgattctttctactaaatcatgaacagctttaaaaacatttctgtctgcataaaattattttacttgtaacttttccccaattgttctgtgcattgttttgcctttttaaattacatctccaagtggctcaaaaggccttgacacagggaacctgcacatatccaggatatgtgtaaccagcgatggtgacttgaccttgccaagacctgtgattccttcaggatacaatcagtgagaaataaaaacacatcttgggaagtgggaatcctggagtttatgccatttgcaatattaaaaaataaaaatgcaagttattatttcaataataacttcctgtttcattgtattctgtgagtgataagtgtcagatcaataacagattaatttgttgttaacagctctttttttttttttttttttgagacagagtctgttgcccagactggagtgcagtggcacaatctctgctcactgcaacttccacctcccgggtttaaacgattctcctgccacagcctcctgaatattctgttaacagctctttaattaatgatctttgcttcttcagaacttgtatggtagaccgtcttttctacagcatgatgcatactcctgtgctaattttagaagctttctgtaactagatttttcctcattatgctcccaggagcgagtttgtttttatccccgtttcatttctaccaggtagctctactttaggccatactggggacctgctgttgaataaatggatgcctgtgtattggtgttggcaactctgcggtagtagtgctaccactggcgaggcagtattactgccactggtgaatgttgctgtctggttactgctgcatttttggcatgctaagctttcctaaagagcctcatatcttttcccatgctgtactgtacaatgaaatgtttttacctaatttttcatgtttatttaaataaaagctgactgggtaatagtggggaagtttaattgtccacataagtcaaaagaatccgtttttgaactagagctattttcaattataagagtgagctggctgggcacggtggctcacgcctgaaatcccagcactttgggaggccaaggtgggaggatcacgaggtcaggagtttgagaccagcctggccaacgtggttaaacccaatctctacgaagaatacaaaaattcgctgggtgtggtggcatgcgcctgtaatcccagctactcaggaggctgaggcaggagaattgctcgaatctgagaggtggaggttgcaatgagccaagatcacaccactgcattccagcctaggcgacagagcaagacttcgtctcagaaaaaaaaaaaaaagttaataatggcttcaagtatttcattttccccttattgtgaaataaactatatacattttaaatggaaattaaggtttagaccaaataaaatcattcagggaaattgcatttacttttaaaaatgtgttgttcaaaaatgtatatatagtacaaagtgaattgaccaaacagaataattcttaactcacaaaggagtttgagcgcacttcctacatgttgaatttaaatctgactaaaggattgtaaacagttgtaattatgggttgtagtaacagagcaacaaggggacaatcttctaaacttgcctttgcctaggagagctactgtatatttccacaagtgaatttaatcagcagtaggagtggtttactcgtcactgacatgtggcacaatctggacaaattacacaaactggctatctcagatgtgtaaaattaatgtacataaataaacgtaagtcacacaatgaatttcctttgtgtccactagatagagatggtcctaactacaaactagtagattatttgatgagcatcaagccctggcaagtgacaggagatgaattcctctccgttttttccttaaagcaaactgatgggaattgcacacaccccactggcaggaacaacagcaagccggctttgaagtctcttccctgcttcaacagctgaattggggagagcgcaagccctgcagccacacttcaaagcggcgctgactggctgtcctgcttctacccaacatccacctgagactcaacagaactgttttctttggaagaaaaatggaactactaataagctagtaattaacccttgtattctttttctggtttcatcttcctgttttaatgtgtaagatattcagcagtaagcactggtcagcctgccctggtgcacagcttgagtgtgttaaataactggctgtttagctgatgccagccagctgcgtgaaggggagaaggccgcctccaaggacacagatgtttgctgttgacctcacgctgtgtctggttgagttattcatgattcatcagaaaatgacatgcaaggtttatggtaaaactgctgtacaatcagaagtattttaagtatgcattagaagtaagataaaatagtaataaaaatagtttcagatgttaagatgatacaagaataaatttaacctagaaaataaagggagaaggaataaaag

SEQ ID NO: 182289 - DNA, 1466 bp, Homo sapiens
  Payload ID: 15898
  Gene Symbol: SMIM19
  Gene Name: small integral membrane protein 19
  Uniprot ID: Q96E16
  ENST ID: ENST00000417410
  CDS Start-End: 771-1094
gctcggtaaccgtttcccgcgcgcccggccccgactccggggtaaagagccccggagcggagcagcgctggccgcgtgccgcctccggagccggcagcgtgagtggccccgcgtccccgcttctcccggtccccggcggggccgcgtcacccggccccgccccgcgccgcccgccccgccccggacgcgggggtaaggggggtggccgcccgcctgccctcggtcccgtgcggtccccgaaactccgagcacccgcccggtcccggcgcggagcccctcggcgtcgcgtggagctgcgagtcgcccgcttccggaagcgcacacgggccagttgcggcggcccatctgccggggcggcgggggctcggcgggagggttgaggctgaatcacgcgcagcctgcgggcggcggaaacgtccctagagcctcgccgccctgggacccgggctgcttcctgggagaggattacattttctccctgctccacttgactttcttccggaaggagcaggtctcgcaggatcggggccaagactggaagagttcaggtttgggagtcgtgtgtataacagccccgcgcctccacgcccaggcctgtgtggctttggacaagttatataaccaccgccgccaccccagtttcttctcctgtaaaatggagctttagtgccgcccagcagggttgttgggataattcagtgactctgtggactgcccagcacctgtgaattgctttcctggatgttgggtgaaggcctgtgagcttccccatggctgggggttatggagtgatgggtgacgatggttctattgattatactgttcacgaagcctggaatgaagccaccaatgtttacttgatagttatccttgttagcttcggtctcttcatgtatgccaaaaggaacaaaaggagaattatgaggatattcagtgtgccacctacagaggaaactttgtcagagcccaacttttatgacacgataagcaagattcgtttaagacaacaactggaaatgtattccatttcaagaaagtacgactatcagcagccacaaaaccaagctgacagtgtgcaactctcattggaatgaaacctcagaaaaagagcaacagaagtaattgtttcaagctcctgattctttctactaaatcatgaacagctttaaaaacatttctgtctgcataaaattattttacttgtaacttttccccaattgttctgtgcattgttttgcctttttaaattacatctccaagtggctcaaaaggccttgacacagggaacctgcacatatccaggatatgtgtaaccagcgatggtgacttgaccttgccaagacctgtgattccttcaggatacaatcagtgagaaataaaaacacatcttgggaagtgggaatcctggagtttatgccatttgcaatattaaaaaataaaaatgcaagttattatttcaataataa

SEQ ID NO: 182290 - DNA, 793 bp, Homo sapiens
  Payload ID: 15898
  Gene Symbol: SMIM19
  Gene Name: small integral membrane protein 19
  Uniprot ID: Q96E16
  ENST ID: ENST00000414154
  CDS Start-End: 98-421
gtaaccgtttcccgcgcgcccggccccgactccggggtaaagagccccggagcggagcagcgctggccgcgtgccgcctccggagccggcagcccccatggctgggggttatggagtgatgggtgacgatggttctattgattatactgttcacgaagcctggaatgaagccaccaatgtttacttgatagttatccttgttagcttcggtctcttcatgtatgccaaaaggaacaaaaggagaattatgaggatattcagtgtgccacctacagaggaaactttgtcagagcccaacttttatgacacgataagcaagattcgtttaagacaacaactggaaatgtattccatttcaagaaagtacgactatcagcagccacaaaaccaagctgacagtgtgcaactctcattggaatgaaacctcagaaaaagagcaacagaagtaattgtttcaagctcctgattctttctactaaatcatgaacagctttaaaaacatttctgtctgcataaaattattttacttgtaacttttccccaattgttctgtgcattgttttgcctttttaaattacatctccaagtggctcaaaaggccttgacacagggaacctgcacatatccaggatatgtgtaaccagcgatggtgacttgaccttgccaagacctgtgattccttcaggatacaatcagtgagaaataaaaacacatcttgggaagtgggaatcctggagtttatgccatttgcaatattaaaaaataaaaatgcaagttattatttcaataataa

SEQ ID NO: 182291 - DNA, 487 bp, Homo sapiens
  Payload ID: 15898
  Gene Symbol: SMIM19
  Gene Name: small integral membrane protein 19
  Uniprot ID: Q96E16
  ENST ID: ENST00000490331
  CDS Start-End: 46-369
cattaattaaaagaaaccctgctttcttttctctcttacagccccatggctgggggttatggagtgatgggtgacgatggttctattgattatactgttcacgaagcctggaatgaagccaccaatgtttacttgatagttatccttgttagcttcggtctcttcatgtatgccaaaaggaacaaaaggagaattatgaggatattcagtgtgccacctacagaggaaactttgtcagagcccaacttttatgacacgataagcaagattcgtttaagacaacaactggaaatgtattccatttcaagaaagtacgactatcagcagccacaaaaccaagctgacagtgtgcaactctcattggaatgaaacctcagaaaaagagcaacagaagtaattgtttcaagctcctgattctttctactaaatcatgaacagctttaaaaacatttctgtctgcataaaattattttacttgtaacttttc

SEQ ID NO: 182292 - DNA, 233 bp, Homo sapiens
  Payload ID: 15898
  Gene Symbol: SMIM19
  Gene Name: small integral membrane protein 19
  ENST ID: ENST00000518574
  CDS Start-End: 125-233
gtccaggtccgctcggtaaccgtttcccgcgcgcccggccccgactccggggtaaagagccccggagcggagcagcgctggccgcgtgccgcctccggagccggcagcgaacaaaaggagaattatgaggatattcagtgtgccacctacagaggaaactttgtcagagcccaacttttatgacacgataagcaagattcgtttaagacaacaactggaaatgtattccattt

SEQ ID NO: 182293 - DNA, 878 bp, Homo sapiens
  Payload ID: 15898
  Gene Symbol: SMIM19
  Gene Name: small integral membrane protein 19
  ENST ID: ENST00000498447
  CDS Start-End: 53-313
cccggagcggagcagcgctggccgcgtgccgcctccggagccggcagcccccatggctgggggttatggagtgatgggtgacgatggttctattgattatactgttcacgaagcctggaatgaagccaccaatgtttacttgatagttatccttgttagcttcggtctcttcatgtatgccaaaaggatatttggcttttggaggattgaggagaatcacaatggaggaacttcactttgttgtgttaaatggatgtgttcagctacttttctcacagcctcatactttttagtgaaagaaagaatactttgagccaaggaagcagctctcaaagacaaaatagaaagtaaaatggtcttgtcatttaagtccttttaccacagcttctgatgaccaggatcatgagcatattacaactctatagacattaatacaaacatctcttctgcatggattttgtgtttaggaacaaaaggagaattatgaggatattcagtgtgccacctacagaggaaactttgtcagagcccaacttttatgacacgataagcaagattcgtttaagacaacaactggaaatgtattccatttcaagaaagtacgactatcagcagccacaaaaccaagctgacagtgtgcaactctcattggaatgaaacctcagaaaaagagcaacagaagtaattgtttcaagctcctgattctttctactaaatcatgaacagctttaaaaacatttctgtctgcataaaattattttacttgtaacttttccccaattgttctgtgcattgttttgcctttttaaattacatctccaagtggctcaaaaggccttgacacagggaacctgcacatatccaggatatgtgtaacc

SEQ ID NO: 182294 - DNA, 822 bp, Homo sapiens
  Payload ID: 15899
  Gene Symbol: SMIM2
  Gene Name: small integral membrane protein 2
  Uniprot ID: Q9BVW6
  ENST ID: ENST00000400419
  CDS Start-End: 190-447
gtgttcatgggcctcattaagctctgccttccttctgctttttggagcctggcctttggttggccttgaatgaagagtggggccccaaaagtaccactgtcagcactctccagcatcatctggctgtctggcaccatcaaagaattgcatttctgacccaagaagagcttatgggtggatgggggtgggatggaagctggggagaggattgatgccagccagctgcctcacagggtgctggaaacacgtggccatgccattagcatcctgttcggcttctggacgagtttcatctgtgacacctacatagtcctcgcttggatcagcaagataaaaggcagccctgatgttagtgcctcctctgatgagccatacgccagaatccagcagagcagaaggcaatgccacgcagaagaggaccaaagtcaggtgccagaagcaggctgacctggaaaggtggaggaaaagaaggcagaagggagagatgaagcccaagaacctgagtatttttctcaggcaagactcaggactgctctggacattcagaagctgagtgtgcaagtgtgctgtgtagttcaaggccaccaccactgaagaggccaaggacaccttagtaggaattctaacctggcttccagggagaggtgcttccaaattggccctgtaggcaaattcacttttttcaccctctaagcgagtaagtgcttgttcccaatttccatggtttagtcttcagtttcagtctttggtctcctctggtctatcagctcccatctctctcccagtctttttctttattctgtgacacctgttgaatgaggc

SEQ ID NO: 182295 - DNA, 255 bp, Homo sapiens
  Payload ID: 15899
  Gene Symbol: SMIM2
  Gene Name: small integral membrane protein 2
  Uniprot ID: Q9BVW6
  ENST ID: ENST00000617002
  CDS Start-End: 1-255
atggaagctggggagaggattgatgccagccagctgcctcacagggtgctggaaacacgtggccatgccattagcatcctgttcggcttctggacgagtttcatctgtgacacctacatagtcctcgcttggatcagcaagataaaaggcagccctgatgttagtgcctcctctgatgagccatacgccagaatccagcagagcagaaggcaatgccacgcagaagaggaccaaagtcaggtgccagaagcaggt

SEQ ID NO: 182296 - DNA, 935 bp, Homo sapiens
  Payload ID: 15900
  Gene Symbol: SMIM20
  Gene Name: small integral membrane protein 20
  Uniprot ID: Q8N5G0
  ENST ID: ENST00000506197
  CDS Start-End: 111-314
gcgaaagcctctccacctcttccgagcggggtcacggcccggccgtcggtaacctggtttccgagagtgccgggcggtcggcgggtcagggcagcccggggcctgacgccatgtcccggaacctgcgcaccgcgctcattttcggcggcttcatctccctgatcggcgccgccttctatcccatctacttccggcccctaatgagattggaggagtacaagaaggaacaagctataaatcgggctggaattgttcaagaggatgtgcagccaccagggttaaaagtgtggtctgatccatttggcaggaaatgagagggctgtcatcagctctgattaagaaaggagatttcttcatgctttcgattctgcatggggtacagccagtcacctcaccagagaatgacggctggagaagaaaactctgtaataccataaataagagtgcttgtaataaaagactgtgcacaaggattaatatttcccttcttaagtatcaaaagaactctggaacaaattataccattaggaaggttttcatgattcagttgattttccaaaaatgaagctatctcacccagctgggtttggaggagcaatctgcttattattctgtcgttaccacttactcaagcgagctgtgatatgaatacaagcaaccagtgggctcgggaaggtccgggtctcttctgccatcttccagataagagatttcagtaaaaaactgccatgctgagctgccttatagagctcttcgaaaatgttcgagttgataaagctctttgaggacaaggtacttcgtgcacctcatgctgaagattgcaccgtgttggaaaataaatatgaagcaagtcaaactagatgcatacacttgtgtagaaatcaataatcaattaatagaagtgaaaaaatagacattaaaatgatttatttcta

SEQ ID NO: 182297 - DNA, 774 bp, Homo sapiens
  Payload ID: 15900
  Gene Symbol: SMIM20
  Gene Name: small integral membrane protein 20
  ENST ID: ENST00000514384
  CDS Start-End: 6-152
acgccatgtcccggaacctgcgcaccgcgctcattttcggcggcttcatctccctgatcggcgccgccttctatcccatctacttccggcccctaatgagattggaggagtacaggttaaaagtgtggtctgatccatttggcaggaaatgagagggctgtcatcagctctgattaagaaaggagatttcttcatgctttcgattctgcatggggtacagccagtcacctcaccagagaatgacggctggagaagaaaactctgtaataccataaataagagtgcttgtaataaaagactgtgcacaaggattaatatttcccttcttaagtatcaaaagaactctggaacaaattataccattaggaaggttttcatgattcagttgattttccaaaaatgaagctatctcacccagctgggtttggaggagcaatctgcttattattctgtcgttaccacttactcaagcgagctgtgatatgaatacaagcaaccagtgggctcgggaaggtccgggtctcttctgccatcttccagataagagatttcagtaaaaaactgccatgctgagctgccttatagagctcttcgaaaatgttcgagttgataaagctctttgaggacaaggtacttcgtgcacctcatgctgaagattgcaccgtgttggaaaataaatatgaagcaagtcaaactagatgcatacacttgtgtagaaatcaataatcaattaatagaagtgaaaaaatagacattaaaatgatttatttctac

SEQ ID NO: 182298 - DNA, 1190 bp, Homo sapiens
  Payload ID: 15900
  Gene Symbol: SMIM20
  Gene Name: small integral membrane protein 20
  Uniprot ID: Q8N5G0
  ENST ID: ENST00000614775
  CDS Start-End: 1-507
atggtaaaggaggtctggagggtgctgagggaggaaccgggccgaaggaaggaaagtagacagaacagggcccgcgggaatcgagtgcagcaaaacagctccaacctcaatccaacgccagcgcccggcccgcacagcacggaatcccggggaaggcggagggcggggtccgaggccccgcctaggcccggaagcgaaagcctctccacctcttccgagcggggtcacggcccggccgtcggtaacctggtttccgagagtgccgggcggtcggcgggtcagggcagcccggggcctgacgccatgtcccggaacctgcgcaccgcgctcattttcggcggcttcatctccctgatcggcgccgccttctatcccatctacttccggcccctaatgagattggaggagtacaagaaggaacaagctataaatcgggctggaattgttcaagaggatgtgcagccaccagggttaaaagtgtggtctgatccatttggcaggaaatgagagggctgtcatcagctctgattaagaaaggagatttcttcatgctttcgattctgcatggggtacagccagtcacctcaccagagaatgacggctggagaagaaaactctgtaataccataaataagagtgcttgtaataaaagactgtgcacaaggattaatatttcccttcttaagtatcaaaagaactctggaacaaattataccattaggaaggttttcatgattcagttgattttccaaaaatgaagctatctcacccagctgggtttggaggagcaatctgcttattattctgtcgttaccacttactcaagcgagctgtgatatgaatacaagcaaccagtgggctcgggaaggtccgggtctcttctgccatcttccagataagagatttcagtaaaaaactgccatgctgagctgccttatagagctcttcgaaaatgttcgagttgataaagctctttgaggacaaggtacttcgtgcacctcatgctgaagattgcaccgtgttggaaaataaatatgaagcaagtcaaactagatgcatacacttgtgtagaaatcaataatcaattaatagaagtgaaaaaatagacattaaaatgatttatttctactttgcagtggtgtctttttgtaaatcatcttttgtaaagcaattaaaattatagtgccgag

SEQ ID NO: 182299 - DNA, 1238 bp, Homo sapiens
  Payload ID: 15901
  Gene Symbol: SMIM21
  Gene Name: small integral membrane protein 21
  ENST ID: ENST00000382638
  CDS Start-End: 72-305
gcaccagctctgtgtcctcagagtcgctgtcatcaaggagacctctcactggtcaccgccgcagcccccacatggaccagtatgtgtccacagctcctccccgattccctatagcacagctgggaacatttaaacaagactctgcaggaatgggacggatattcaaggggaatttgctgcagaagaaagcacttaccacactttctacgtttgaagtcatccaggaacacagcagaagcagaataaatgacactacgtttctctctcatggccttcataccatggatttcccctgctcaagatgaaaagaaattaagaggaaatcagattgcttagagatagcagattattgctcactttttaaaaggagctccacagagagaatgaagaacgtgtaactttttgcaatgataatgtctgctttgttcttgaggggcactcttcctttttctgttcaggaatattccggaggagagctgcagatgccacccaaccctgcgaaatctgccctgcgtgtcgaaacagatccagcagtgcaaagaacttcttcattaggacatcaagcctgtagtcatattttcaattgctgctgtaactttttccttgcaagtgctttcacttatttcgggaccacctaaggctctgtgtggtatacagcaacacagtttgagatatttctgtgatgttctgtatatcatatagttgctaacaacctgtcaaagtcatcctgacaccaaactgagaagctgatggtttgggtaacatattagaggagatgaaaaaaccgacagtcctcattactgtaataaaaccagcagagacacactgagaatcaattactgattgtgacctaatgaactaaccctcagtcaagtagaaaactgcaccaagcctcttacattatcaaatgatttaggatggagcactgtctgaagacgggcaacaagtcgaggcagatgagttttcttatattgtggctgacttaattaccttgttcctgagtgcagagatcaaattgagcaacttaaggtgctaaagctctgtgccagctggaaatgaaaaggaaataattaacaccaacaagagctacgtctaaggttgtggcacctcctgacagaagcaaggagactcaaagttaaggcggctgcaaagtccttgacgaggtgagccctgctctatccgcctggctggattcgtccaggttgcctgtggcagctgtgcactgaagagtccggctg

SEQ ID NO: 182300 - DNA, 1834 bp, Homo sapiens
  Payload ID: 15901
  Gene Symbol: SMIM21
  Gene Name: small integral membrane protein 21
  Uniprot ID: Q3B7S5
  ENST ID: ENST00000579022
  CDS Start-End: 141-446
aatacccagatcttcaaggttggcaaagaagagaaaagctccttgggaacttagttaccaggtcttatagcaccagctctgtgtcctcagagtcgctgtcatcaaggagacctctcactggtcaccgccgcagcccccacatggaccagtatgtgtccacagctcctccccgattccctatagcacagctgggaacatttaaacaagactctgcaggaatgggacggatattcaaggggaatttgctgcagaagaaagcacttaccacatttgaaaatgaacaccatattcgtttcttcacattgttggttcttttccatgtgatggtgttgctgaggaatcatagcaggatacaaggggtttctgaagactggaaaagggccaacagcatatttcgaaactttctacgtttgaagtcatccaggaacacagcagaagcagaataaatgacactacgtttctctctcatggccttcataccatggatttcccctgctcaagatgaaaagaaattaagaggaaatcagattgcttagagatagcagattattgctcactttttaaaaggagctccacagagagaatgaagaacgtgtaactttttgcaatgataatgtctgctttgttcttgaggggcactcttcctttttctgttcaggaatattccggaggagagctgcagatgccacccaaccctgcgaaatctgccctgcgtgtcgaaacagatccagcagtgcaaagaacttcttcattaggacatcaagcctgtagtcatattttcaattgctgctgtaactttttccttgcaagtgctttcacttatttcgggaccacctaaggctctgtgtggtatacagcaacacagtttgagatatttctgtgatgttctgtatatcatatagttgctaacaacctgtcaaagtcatcctgacaccaaactgagaagctgatggtttgggtaacatattagaggagatgaaaaaaccgacagtcctcattactgtaataaaaccagcagagacacactgagaatcaattactgattgtgacctaatgaactaaccctcagtcaagtagaaaactgcaccaagcctcttacattatcaaatgatttaggatggagcactgtctgaagacgggcaacaagtcgaggcagatgagttttcttatattgtggctgacttaattaccttgttcctgagtgcagagatcaaattgagcaacttaaggtgctaaagctctgtgccagctggaaatgaaaaggaaataattaacaccaacaagagctacgtctaaggttgtggcacctcctgacagaagcaaggagactcaaagttaaggcggctgcaaagtccttgacgaggtgagccctgctctatccgcctggctggattcgtccaggttgcctgtggcagctgtgcactgaagagtccggctggggagccagggattcagaactcacagtgcagcctgacgaccaaagggcaaatccacctgaggacctgagtgcagatggctgggctccccggaacaaagtggaggaatgacagaggtgtaactcttacaccacagcctccatctgtgtgtcgcagagaaaaatactataatggagactattcttacacacatacacacacacacacacacacagagttcttgtcaccgatggaacagtctgtctttgtctttcatctcccacattcatgtccagatcccattgcgctgcatcacacgtgaacccagtgaggtcaacaatgaatggatggtgttcacaaagaaaccagcttatggaaggggacctgttacaattctttgaattaagttcttggaagcc

SEQ ID NO: 182301 - DNA, 2554 bp, Homo sapiens
  Payload ID: 15901
  Gene Symbol: SMIM21
  Gene Name: small integral membrane protein 21
  ENST ID: ENST00000584508
  CDS Start-End: 120-383
ggcaaagaagagaaaagctccttgggaacttagttaccaggtcttatagcaccagctctgtgtcctcagagtcgctgtcatcaaggagacctctcactggtcaccgccgcagcccccacatggaccagtatgtgtccacagctcctccccgattccctatagcacagctgggaacatttaaacaagactctgcaggaatgggacggatattcaaggggaatttgctgcagaagaaagcacttaccacatttgaaaatgaacaccatattcgtttcttcacattgttggttcttttccatgtgatggtgttgctgaggaatcatagcaggatacaaggggtttctgaagactggaaaagggccaacagcatatttcgaaagtaaaaaactccttctttctcccactgtaggctttttgtgttttcaacatacccagcctcactcggaaaaataaaaataaaaataaagcacccactcacatgagcagccaagtttcagataccagtgggcacaagctcttccaaatgtctcctgttctggagatgttcacagtcctcacatcaaaactgaaacaagcaaacaaaaaaataaaaagcttactaccaaataccctaggaataagacttaaactctatttggaaattgaatttcttccatagtcaatcaatatttaataaagagagaaaaggagctcattacaaagaccatcttgtttctccacaagtcatctatgtgagattccagaatttcagggcgataagttcttaattggaacattatatattctctttgcagccagtaagtacgcatcacttcacgagaaagcactgcggccaacatttctcctggtctgctctgggtttcagtgaagggcaggcctggaagcaccttgggaaatgaggtagagccaagctaaccctagagagccgttgagcttacggagggttgagtgattacgcaggcatagtcttgagttttattttcagtttgaatactgctaactagtctgtacagtcacaggcttactatagggagtttattctacatcagctatattctctcttccttagcagcacttaatgagttggctggaaagttgttcccagccaagccaatatcccatgagttataaatgacatttcatgctcatatgcagattttctgcaccgaagtgaattatttacaaggtaggccttatggattccaacagtcagctgcctgagatttacacctacccgttctctctactctcttgctgggagaatgtgacgtctcccactgccctttaacatctgaagatttagcgggagctgcccttcctgaggcaggtgctcccttgcttgagatggcaactggaaaggccatgcaccctggaagctggaaggtaaactgaggctctcccagaggtgcttctcctgcccggggaggatgctgtccgcatgcaaatgcacacgaggagcaccaggaagaatttaagttctggggaggccttcctgcccattaacagggattttattaccttgggttttagctacttagtttaataatttcttcctgaatgtgcgaaaatccaaattttctcctaaaggaagctctgtgttcagcagtgtgctctgtcctctgtggaacagaagaaccaacatgtcgtttctacctcccaggaactccaggggttgaaaagcctcccaacttacagcaaggatgatgaaaatataagtaagagttcggcaccagacaaatccaccaatggaacaaaaaaagcagcacagacaccagacaccaagttaagtacacaagggtctctaatctatgataaaatcagcatttaaaattagcaaaaagtatggttttttaaatatgttgaatgagaacaactgactatgcatttggaaaaagtaagatgaagatccctaccttatattatcaacaaaaatacatgtatgttgaatcaaagacctaaatgtaaaaataaaatccaaagaatactggaagaaaagatggaggaacatttctgtagccttgcagtgagagtaaacaaaaggaaagaagggacttaccaaattttataaactttttcccaataaaaaccagactaaacaaaattaaaacgtaagtgacaaacaagggagggaaaacatttacaactgactattaatatcccatattcagagaaatccaactcattggaagaaaatgacagacaataccctaaagggataaagaatacttataggcaaaaaagaagtacacacggcaaataaatctgtgaaaagatgctcaaccacggtattgattaaaggaataaggaagtgaataacaacaaaatagtttttgccaaatctgattgtcaacatgtcatatattgttaacattgattgctgtcgaggctgtgaaaaactaggcagcttcataattgttggcaggaacaaccaactgctacaaacattttgggggcaatttggaattatctaataaaatatatttgcataccctttggccatgccatttcacttttacggatctaacaaaaaataaaataaaaacattataaaggt

SEQ ID NO: 182302 - DNA, 394 bp, Homo sapiens
  Payload ID: 15902
  Gene Symbol: SMIM22
  Gene Name: small integral membrane protein 22
  Uniprot ID: K7EJ46
  ENST ID: ENST00000588606
  CDS Start-End: 93-344
ggagccggaagcaggaagcagcctgtgctccccaggacctgcctggttgggggaattggaggcttctaggaggtggcacggtgcacgccaagatggctgtgtccacagaggagctggaggccacggttcaggaagtcctggggagactgaagagccaccagtttttccagtccacatgggacactgttgccttcattgttttcctcaccttcatgggcaccgtgctgctcctgctgctgctggtcgtcgcccactgctgctgctgcagctcccccgggccccgcagggaaagccccaggaaggaaagacccaagggagtggataacttggccctggaaccctgaccctgtgtctcctgcccggtggcagtaacaaagccttctgtctgcccaga

SEQ ID NO: 182303 - DNA, 366 bp, Homo sapiens
  Payload ID: 15902
  Gene Symbol: SMIM22
  Gene Name: small integral membrane protein 22
  Uniprot ID: K7EJ46
  ENST ID: ENST00000586005
  CDS Start-End: 50-316
tggttgggggaattggaggcttctaggaggtggcacggtgcacgccaagatggctgtgtccacagaggagctggaggccacggttcaggaagtcctggggagactgaagagccaccagtttttccagtccacatgggacactgttgccttcattgttttcctcaccttcatgggcaccgtgctgctcctgctgctgctggtcgtcgcccactgctgctgctgcagctcccccgggccccgcagggaaagccccaggaaggtgagcccctggaaggaaagacccaagggagtggataacttggccctggaaccctgaccctgtgtctcctgcccggtggcagtaacaaagccttctgtctgcccaga

SEQ ID NO: 182304 - DNA, 525 bp, Homo sapiens
  Payload ID: 15902
  Gene Symbol: SMIM22
  Gene Name: small integral membrane protein 22
  Uniprot ID: K7EJ46
  ENST ID: ENST00000588500
  CDS Start-End: 33-440
ggaccggggcaggtggcacggtgcacgccaagatggctgtgtccacagaggagctggaggccacggttcaggaagtcctggggagactgaagagccaccagtttttccagtccacatgggacactgttgccttcattgttttcctcaccttcatgggcaccgtgctgctcctgctgctgctggtcgtcgcccactgctgctgctgcagctcccccgggccccgcagggaaagccccaggaaggtgagcccctggaaggtgagccctgccggcctctgggacctgcacggaactgtactgggggtggaggcggaaggtgaggggagtggcgggaagggtgctcatccccctagggaacaacgagcgaacctgcttggtcccgctgtgcttctcgtgcaggaaagacccaagggagtggataacttggccctggaaccctgaccctgtgtctcctgcccggtggcagtaacaaagccttctgtctgcccagagcctgagtctgcagtgtcttccagtccccgtctgg

SEQ ID NO: 182305 - DNA, 549 bp, Homo sapiens
  Payload ID: 15902
  Gene Symbol: SMIM22
  Gene Name: small integral membrane protein 22
  Uniprot ID: K7EJ46
  ENST ID: ENST00000586440
  CDS Start-End: 23-289
aggtggcacggtgcacgccaagatggctgtgtccacagaggagctggaggccacggttcaggaagtcctggggagactgaagagccaccagtttttccagtccacatgggacactgttgccttcattgttttcctcaccttcatgggcaccgtgctgctcctgctgctgctggtcgtcgcccactgctgctgctgcagctcccccgggccccgcagggaaagccccaggaaggtgagcccctggaaggaaagacccaagggagtggataacttggccctggaaccctgaccctgtgtctcctgcccggtggcagtaacaaagccttctgtctgcccagagcctgagtctgcagtgtcttccagtccccgtctgggtgggtgacgcgggactcgccgccccactcaggtggccacctggcctctccaagccttcagtcagcacgactgtgccaggtcatcctcagtcacctagctgggaggggagctggtctcaggccgggcgcggtggctcacacctataatcccagcactttgggaggccgaggtggg

SEQ ID NO: 182306 - DNA, 822 bp, Homo sapiens
  Payload ID: 15902
  Gene Symbol: SMIM22
  Gene Name: small integral membrane protein 22
  Uniprot ID: K7EJ46
  ENST ID: ENST00000589721
  CDS Start-End: 521-772
gcacttgctgtgacccccacctggaggcttctctgcagcaggagcaggagctgttacccttctaatccccacaatgaccccagcctaataatacaataatccccaagtagaaccaggggcccaaggccccctcgtcagctgggctcccacctccaagctgacgccctcaaccactctgctggggtgagcaaacccaggccccacagctggctagcgggatatccgtgtccacgattggcgccatgtgttttaagttgcagcgtcaaaaacatgaagagattgctttagcaaatatttacccagtcctgactctgcacatggcatcgttctaggagcccaaagatgttaacttgtttaataatcaagccctgtgaaggagtttatagcatctgtggattttggtacccacggaggtgctggaaccaatcgttgaggattccaaggacaactctatgatgcaggcacacctgtcctagctgctcaagggtcgtgggatgcaggtggcacggtgcacgccaagatggctgtgtccacagaggagctggaggccacggttcaggaagtcctggggagactgaagagccaccagtttttccagtccacatgggacactgttgccttcattgttttcctcaccttcatgggcaccgtgctgctcctgctgctgctggtcgtcgcccactgctgctgctgcagctcccccgggccccgcagggaaagccccaggaaggaaagacccaagggagtggataacttggccctggaaccctgaccctgtgtctcctgcccggtggcagtaacaaagccttctgtctgcccaga

SEQ ID NO: 182307 - DNA, 355 bp, Homo sapiens
  Payload ID: 15902
  Gene Symbol: SMIM22
  Gene Name: small integral membrane protein 22
  Uniprot ID: K7EJ46
  ENST ID: ENST00000591870
  CDS Start-End: 56-307
aggatcctgatgcagcctctgggggaccggggcaggtggcacggtgcacgccaagatggctgtgtccacagaggagctggaggccacggttcaggaagtcctggggagactgaagagccaccagtttttccagtccacatgggacactgttgccttcattgttttcctcaccttcatgggcaccgtgctgctcctgctgctgctggtcgtcgcccactgctgctgctgcagctcccccgggccccgcagggaaagccccaggaaggaaagacccaagggagtggataacttggccctggaaccctgaccctgtgtctcctgcccggtggcagtaacaaagccttctgtctgccca

SEQ ID NO: 182308 - DNA, 629 bp, Homo sapiens
  Payload ID: 15902
  Gene Symbol: SMIM22
  Gene Name: small integral membrane protein 22
  Uniprot ID: K7EJ46
  ENST ID: ENST00000589327
  CDS Start-End: 313-579
ttctaatccccacaatgaccccagcctaataatacaataatccccaagtagaaccaggggcccaaggccccctcgtcagctgggctcccacctccaagctgacgccctcaaccactctgctggggagcccaaagatgttaacttgtttaataatcaagccctgtgaaggagtttatagcatctgtggattttggtacccacggaggtgctggaaccaatcgttgaggattccaaggacaactctatgatgcaggcacacctgtcctagctgctcaagggtcgtgggatgcaggtggcacggtgcacgccaagatggctgtgtccacagaggagctggaggccacggttcaggaagtcctggggagactgaagagccaccagtttttccagtccacatgggacactgttgccttcattgttttcctcaccttcatgggcaccgtgctgctcctgctgctgctggtcgtcgcccactgctgctgctgcagctcccccgggccccgcagggaaagccccaggaaggtgagcccctggaaggaaagacccaagggagtggataacttggccctggaaccctgaccctgtgtctcctgcccggtggcagtaacaaagccttctgtctgcccaga

SEQ ID NO: 182309 - DNA, 1047 bp, Homo sapiens
  Payload ID: 15902
  Gene Symbol: SMIM22
  Gene Name: small integral membrane protein 22
  Uniprot ID: K7EJ46
  ENST ID: ENST00000615889
  CDS Start-End: 521-787
gcacttgctgtgacccccacctggaggcttctctgcagcaggagcaggagctgttacccttctaatccccacaatgaccccagcctaataatacaataatccccaagtagaaccaggggcccaaggccccctcgtcagctgggctcccacctccaagctgacgccctcaaccactctgctggggtgagcaaacccaggccccacagctggctagcgggatatccgtgtccacgattggcgccatgtgttttaagttgcagcgtcaaaaacatgaagagattgctttagcaaatatttacccagtcctgactctgcacatggcatcgttctaggagcccaaagatgttaacttgtttaataatcaagccctgtgaaggagtttatagcatctgtggattttggtacccacggaggtgctggaaccaatcgttgaggattccaaggacaactctatgatgcaggcacacctgtcctagctgctcaagggtcgtgggatgcaggtggcacggtgcacgccaagatggctgtgtccacagaggagctggaggccacggttcaggaagtcctggggagactgaagagccaccagtttttccagtccacatgggacactgttgccttcattgttttcctcaccttcatgggcaccgtgctgctcctgctgctgctggtcgtcgcccactgctgctgctgcagctcccccgggccccgcagggaaagccccaggaaggtgagcccctggaaggaaagacccaagggagtggataacttggccctggaaccctgaccctgtgtctcctgcccggtggcagtaacaaagccttctgtctgcccagagcctgagtctgcagtgtcttccagtccccgtctgggtgggtgacgcgggactcgccgccccactcaggtggccacctggcctctccaagccttcagtcagcacgactgtgccaggtcatcctcagtcacctagctgggaggggagctggtctcaggccgggcgcggtggctcacacctataatcccagcactttgggaggccgaggtggg

SEQ ID NO: 182310 - DNA, 928 bp, Homo sapiens
  Payload ID: 15902
  Gene Symbol: SMIM22
  Gene Name: small integral membrane protein 22
  Uniprot ID: K7EJ46
  ENST ID: ENST00000615471
  CDS Start-End: 521-928
gcacttgctgtgacccccacctggaggcttctctgcagcaggagcaggagctgttacccttctaatccccacaatgaccccagcctaataatacaataatccccaagtagaaccaggggcccaaggccccctcgtcagctgggctcccacctccaagctgacgccctcaaccactctgctggggtgagcaaacccaggccccacagctggctagcgggatatccgtgtccacgattggcgccatgtgttttaagttgcagcgtcaaaaacatgaagagattgctttagcaaatatttacccagtcctgactctgcacatggcatcgttctaggagcccaaagatgttaacttgtttaataatcaagccctgtgaaggagtttatagcatctgtggattttggtacccacggaggtgctggaaccaatcgttgaggattccaaggacaactctatgatgcaggcacacctgtcctagctgctcaagggtcgtgggatgcaggtggcacggtgcacgccaagatggctgtgtccacagaggagctggaggccacggttcaggaagtcctggggagactgaagagccaccagtttttccagtccacatgggacactgttgccttcattgttttcctcaccttcatgggcaccgtgctgctcctgctgctgctggtcgtcgcccactgctgctgctgcagctcccccgggccccgcagggaaagccccaggaaggtgagcccctggaaggtgagccctgccggcctctgggacctgcacggaactgtactgggggtggaggcggaaggtgaggggagtggcgggaagggtgctcatccccctagggaacaacgagcgaacctgcttggtcccgctgtgcttctcgtgcaggaaagacccaagggagtggataacttggccctggaaccctga

SEQ ID NO: 182311 - DNA, 468 bp, Homo sapiens
  Payload ID: 15903
  Gene Symbol: SMIM23
  Gene Name: small integral membrane protein 23
  Uniprot ID: A6NLE4
  ENST ID: ENST00000330910
  CDS Start-End: 1-468
atggcaacccagcaagtggacagcagaaggcaggtggcagcagagcaggtggcagcccagctgcttgaacggagaaggggcagccactgtgatgacgagaagcagacgctgttggcattgctgatcttggtgctgtacttgagcacagagatatggggaagcagttgggaggtgtcagaaaggatcagagaatgtaactactaccagaatcttgcagttccccaggggcttgaatatcagaccaacgagccctcagaagaaccgataaagaccatcaggaactggctgaaggagaagttgcatgtcttctcggagaagttagaggaagaggtgcagcagctggagcagctagcgtgggacctggaactgtggctggatgctcttctgggagagccacaccaggaggagcactgctccacatataaaagtcacttgcacctggagcatgaggtcagcatcagagatcat

SEQ ID NO: 182312 - DNA, 366 bp, Homo sapiens
  Payload ID: 15903
  Gene Symbol: SMIM23
  Gene Name: small integral membrane protein 23
  ENST ID: ENST00000523047
  CDS Start-End: 1-366
agtggacagcagaaggcaggtggcagcagagcaggtggcagcccagctgcttgaacggagaaggggcagccactgtgatgacgagaagcagacgctgttggcattgctgatcttggtgctgtacttgagcacagagatatggggaagcagttgggaggtgtcagaaaggatcagagaatgtaactactaccagaatcttgcagttccccaggggcttgaatatcagaccaacgagccctcagaagaaccgataaagaccatcaggaactggctgaaggagaagttgcatgtcttctcggagaagttagaggaagaggtgcagcagctggagcagctagcgtgggacctggaactgtggctggatgc

SEQ ID NO: 182313 - DNA, 1329 bp, Homo sapiens
  Payload ID: 15904
  Gene Symbol: SMIM24
  Gene Name: small integral membrane protein 24
  Uniprot ID: O75264
  ENST ID: ENST00000215531
  CDS Start-End: 80-472
ggcagggcctcgcccacaccaaacctgtggacgccgacccgggaccgccgctggctggctgctggctcactcgaccgtcatggagaccctgggggcccttctggtgctggagtttctgctcctctccccggtggaggcccagcaggccacggagcatcgcctgaagccgtggctggtgggcctggctgcggtagtcggcttcctgttcatcgtctatttggtcttgctggccaaccgcctctggtgttccaaggccagggctgaggacgaggaggagaccacgttcagaatggagtccaacctataccaggaccagagtgaagacaagagagagaagaaagaggccaaggagaaagaagagaagaggaagaaggagaaaaagacagcaaaggaaggagagagcaacttgggactggatctggaggaaaaagagcccggagaccatgagagagcaaagagcacagtcatgtgaagattcctggctgcctcttccaggcagtcccccagagatgcctcttctgccccctaaaagcagtgccctggacttgaagcccgtgaaatgactccatctgggattcagaatacagtgttctcaagtgaagaaggcttggaacccaccccacctccctcattgggggctctctgggcaaacatggttttcatgcacccctcttcctgagcttggtccctgcctggtgattcttcttatactcggagagcatccctggttgaggagacacccgcaatcctccacgatctcatggctccacctgcttctccccactgcctgatttcttttctctctgcctgatgtctactgaacagaacttcccctctcccatgcacccactgccagctgagagctgcttcccaatggcctgcattaaagcattcgtaacagccctttggaagggctcctgtcatctcttgggactcagtttacctctggggaaggaggctgcttttggggctgcgggcgatggctgggcggatgatatggaggctcagggtgcacaggtgcccagacgccctgagcagattaaacactcccccggcaatctggttttttgctgtcctgagccctggactttgagccctgagcgccgtctccaagcaaatctttgctccttcccccacctcactttgttttggggcacgtgacttttttcctgggagctgtatcttggagggtgggggtgccccagggccctgcaatatcttggaaagggactagcacttccttttcccagtttctgttctcctgcttcccctcaccttctccaggccctggaccttaccctgaacaatgaccatttctcttttatttga

SEQ ID NO: 182314 - DNA, 820 bp, Homo sapiens
  Payload ID: 15904
  Gene Symbol: SMIM24
  Gene Name: small integral membrane protein 24
  ENST ID: ENST00000587847
  CDS Start-End: 303-485
cccctacgccatccaggtctctgaagctccgtccctttccaataccccctctgtcggagcacccccagtgaccttctctctctccttgctagggtggtgggggaagggggtcttctgaccttttcttcctctgagtcgaacctccccaacttcctgcagccacggagcatcgcctgaagccgtggctggtgggcctggctgcggtagtcggcttcctgttcatcgtctatttggtcttgctggccaaccgcctctggtgttccaaggccagggctgaggacgaggaggagaccacgttcagaatggagtccaacctataccaggaccagagtgaagacaagagagagaagaaagaggccaaggagaaagaagagaagaggaagaaggagaaaaagacagcaaaggaaggagagagcaacttgggactggatctggaggaaaaagagcccggagaccatgagagagcaaagagcacagtcatgtgaagattcctggctgcctcttccaggcagtcccccagagatgcctcttctgccccctaaaagcagtgccctggacttgaagcccgtgaaatgactccatctgggattcagaatacagtgttctcaagtgaagaaggcttggaacccaccccacctccctcattgggggctctctgggcaaacatggttttcatgcacccctcttcctgagcttggtccctgcctggtgattcttcttatactcggagagcatccctggttgaggagacacccgcaatcctccacgatctcatggctccacctgcttctccccactgcctgatttcttttctctctgc

SEQ ID NO: 182315 - DNA, 660 bp, Homo sapiens
  Payload ID: 15904
  Gene Symbol: SMIM24
  Gene Name: small integral membrane protein 24
  ENST ID: ENST00000591708
  CDS Start-End: 42-224
atctctgcagggctgaggacgaggaggagaccacgttcagaatggagtccaacctataccaggaccagagtgaagacaagagagagaagaaagaggccaaggagaaagaagagaagaggaagaaggagaaaaagacagcaaaggaaggagagagcaacttgggactggatctggaggaaaaagagcccggagaccatgagagagcaaagagcacagtcatgtgaagattcctggctgcctcttccaggcagtcccccagagatgcctcttctgccccctaaaagcagtgccctggacttgaagcccgtgaaatgactccatctgggattcagaatacagtgttctcaagtgaagaaggcttggaacccaccccacctccctcattgggggctctctgggcaaacatggttttcatgcacccctcttcctgagcttggtccctgcctggtgattcttcttatactcggagagcatccctggttgaggagacacccgcaatcctccacgatctcatggctccacctgcttctccccactgcctgatttcttttctctctgcctgatgtctactgaacagaacttcccctctcccatgcacccactgccagctgagagctgcttcccaatggcctgcattaaagcattcgtaacagccctttg

SEQ ID NO: 182316 - DNA, 2332 bp, Homo sapiens
  Payload ID: 15905
  Gene Symbol: SMIM3
  Gene Name: small integral membrane protein 3
  Uniprot ID: Q9BZL3
  ENST ID: ENST00000526627
  CDS Start-End: 1039-1221
acactactgggctccaagactgctcaaggtctcactgatagtcaaggcttgtgctcctttttttcagaagagtaagattaaagaaaaccactgtgaattaaaaagtgtgggtgccaacatgggacgggagtcccccctcactccatggatgacatagagggggcagaagattacagaattggcattgtcctgcgtggaagctgggccacccacagtggcgtgggaagcctctcagatgctggattctaatgggctcttgatcaccttggattgggctatttcattgttatcacaaaataaacaggatgctccaagtcatgttatggcagagaaccaaccagcttcacactggtcctctaaaccaatcctcacaacaggactgggagacaggtgttacctttcccactttacagagaatgaaacagagtggcaaagcctccgaaggaccctacacttcggacatcgcaaagcaggatctgagtcccggctcctctgtccaaacctacttgctaggctttctttcccatgtctactctatagctggaaaggtcgtggaggacacattttaggccaaccctctcggtttacaatccagagaggggagaccctcagaagccaagcgacatgtccacggctacgcggcgagtgtgtggcaacgtggaaggggagcccgagacgccctggtctctcccttctctcgcaggttcctttctccccgaacgcagcccgcaggggacgctggaggaggagctgagctggagttgccggggccccgggaccgggcgttccgggggcggtccccagcagccgcgcattccagagccagcagcgcgtcctggccgctcctgcgctctcccgcctcccggggctcggaggagccggggcacgttccaggagctgcctagggctgaggttccaggcctgggggtcgcttccagctgccagatcccgtgcagtcctggggaccctgagaagcaccgagccatccctgacccaggaactttccgcagactcgccgccatctgggagtgaagcaacatggatgcagtcagccaagtccccatggaagtcgtgcttcccaagcacatcctggatatctgggttattgtcctcatcatcctggccaccattgtcatcatgacctcgttgttgctgtgcccagccactgcagtaatcatctatcgcatgcggactcatccgatccttagtggggctgtttgagagcctcccaagagggccgggtgagggatgaggacaggcatcctatccccagcctcttcctgtcttcagaaaagcagcaggagggactttggggcatggacctgagttctggttttgattctgccacgagccagctgtgtgaatttggtcaagggacctaactctctgagttccaggttccttatctttcaaatggggatggtgatccctgccctttctacctcatagggatgtgagaaccacctgacttagtggatgtgaaagctgtttgtgatcagtaaagctaccacagatataagggtgttatgctgaatcctgagaagctttcaagaaccagagaacctgattgctgatgatggccttaaaggtggtgagggagatactgggggcagagcagactttgccagtgcccctcaggtcaaaccaagccaagagcaccctgtccccattccaaggggccagcagcactttggcccaaagtattttctttaaggtgccattccttcatgttttctcagtttggagggtgatgggtagagctttccagaaccttctccattccagaatctctgcccctgtgtaatctgaaggaaggctgtgccatctttgggcactgccaagggagttggggtgatgggcttctttctgcactggagtctcacatctgttagctttgacactcaagcaatgttggaaaatgcagggtgactgagttccctgcccagctttcgggatctctggcccccatccccttgtgtgtgtccctctgcccagctcctgctgtaattagctccacgtgtacccccttcactccctcccaccagctctgcagccagcctatggcaattatattttaagaggtgttcccaggacttttgggacctactaaaacaatgatggttattttagatgtgatgatttatatttatgtagagatatttctggaccactcaagctcttcgataccaaaatcaggagcatcttgggatttattaaattatgtaagaagatagcacagatatcgggatattattgtgtgaaaatgctgcttttactttgatgtgatctcattgatgtacacaaccaagttccaataaagtgctagaatgtg

SEQ ID NO: 182317 - DNA, 274 bp, Homo sapiens
  Payload ID: 15906
  Gene Symbol: SMIM4
  Gene Name: small integral membrane protein 4
  ENST ID: ENST00000307106
  CDS Start-End: 155-268
ggcactcgtgcgcctaccagacagtggcggaggacggcgctcgctagtctcccaggtcgcggtacacggcgagaacgggcggggcggtctcggctgcgtccgggcgatccagtgcttagttccgtcatatccctctccacgacctcggtcgagcatgttcaccagggcccagatgatgtctaccgtagaaaagcctcagaaagacagtatcagagaaggctggaagatgaatgagactgaacttcagcagtcaataaagtcaatatgaattttt

SEQ ID NO: 182318 - DNA, 1770 bp, Homo sapiens
  Payload ID: 15906
  Gene Symbol: SMIM4
  Gene Name: small integral membrane protein 4
  Uniprot ID: Q8WVI0
  ENST ID: ENST00000477703
  CDS Start-End: 152-364
actcgtgcgcctaccagacagtggcggaggacggcgctcgctagtctcccaggtcgcggtacacggcgagaacgggcggggcggtctcggctgcgtccgggcgatccagtgcttagttccgtcatatccctctccacgacctcggtcgagcatgttcaccagggcccaggtgagacggattctgcagcgggtgcccgggaagcagcgatttggcatctaccggttcctgcccttcttttttgtcctgggaggaacgatggagtggatcatgattaaagtgcgcgtgggccaggagaccttctatgatgtctaccgtagaaaagcctcagaaagacagtatcagagaaggctggaagatgaatgagactgaacttcagcagtcaataaagtcaatatgaatttttactattggtttcagtgccttttaaaatatacttttcagatctcttgttctgacacagcttgtcctttatcagctgcacaatattccaataactgtttttgcaaagaatttttatagttctgtctctgcttgagtacttcccaagtcactgctggacagcacttgtgggaaaattatttcctcctaaaacactcactcgatgaatctagtccatgaaatatttcttaaacaattcaaggatcaatcaggatgcttttcagtgaagcccgaattgttttcggcaatctttgtttttaggcaactaattataaccttatttacttttttgcagaattcaaattaaattatggacacattctctattgccagatcatttaaaccaggataattatgcaggttgtatttctgccagctactagactataaactttttgctagggtggtggaaattcttgattgactacgcatttctcatgctagtgttcttgtgaacagaaatatgctcctcccttgcttggctcccctaaactgcaagggctggatcttcatgaggactgtgggcaacaggtttcacactactctaggatgaagatgttgctgttcgattcagctgctagaaacagttgctccttccatgagaaagtgaacctacacagtataaagcatcccagacttgagctaaatcagaggctcagtctattgagtgatttggcaatctgacccagtgtaagtttggatcagcctggtagaaaaagcagatacctttccatgcttgcatagccacatctaacatcgtttcaagcaaaaaaaaatctacatactaaagactaagtttcagaatagtttctaactattgcatgagaataaagctgatgcttaaggccatagggtatcctcaagttaatgatctctgccacaaacatgtctcctaattttttctagatttttcttctaattttagtccacttatcttagaaccaattcagtaaagaaccattaactaactactcccatctccttaaagcactacctacactacagtgcagcaagcccagagtcacagctgggagatggcttgaatgtgaaaggccagtaatgacctctgccatcagggagaggacggtggttcatcgtattctcatgcccagttgtgtcatctaggattcctggtaaacctaacctgataaaccatttttagtgacttgactgctgtataaaaactatagtatgattctcaattatatggccatactccatgtttgccctaacccaccttgttttaggagtttagtatttgatacatatagaaaatacgtcataccttttacaaagaataatagtaaacactaataaaaccattggctaac

SEQ ID NO: 182319 - DNA, 522 bp, Homo sapiens
  Payload ID: 15906
  Gene Symbol: SMIM4
  Gene Name: small integral membrane protein 4
  ENST ID: ENST00000476842
  CDS Start-End: 152-331
actcgtgcgcctaccagacagtggcggaggacggcgctcgctagtctcccaggtcgcggtacacggcgagaacgggcggggcggtctcggctgcgtccgggcgatccagtgcttagttccgtcatatccctctccacgacctcggtcgagcatgttcaccagggcccaggtgagacggattctgcagcgggtgcccgggaagcagcgatttggcatctaccggttcctgcccttcttttttgtcctgggaggaacgatggagtggatcatgattaaagtgcgcgtgggccaggagaccttctattcaacctcatcttccctaattcaatgacactcacctgcccacacgaggacgcaccaggccatgggacttgatgaagacacagtcgccaaccttcagccacatgtcattgtaatggagctgctcaaagtagtggcaacctggttcaccattggacatttccacagggacatcttctttttcctgttgtaaagaaaactggctgaagaaaggtagttgat

SEQ ID NO: 182320 - DNA, 1546 bp, Homo sapiens
  Payload ID: 15907
  Gene Symbol: SMIM5
  Gene Name: small integral membrane protein 5
  Uniprot ID: Q71RC9
  ENST ID: ENST00000375215
  CDS Start-End: 806-1039
cacagccccagcagaaggccctcacctcacaaggaacatgaggcgccttgccgggcgcgcaggccactcccaggtcactcaggattccaagttctcccccaagacgccttcagatgctgagcggcacaagggcctccccagggactggttgcaaagcctcctgctcagcttgagagggccaccagctccccactgtttactgttgttcctgagagaggccagagggagggaccagccagggagtggccagagggacagaaggggtggccttcctgagggcagggtgggtgccccagacctgagagcgctgcaggactcccctccacaggctcaggtggagcctccccagggtcctcctggccaggaaggcagagagccgacttctttcttcagctcccaacccaggcccagcccacggcgtgggagtcggggagagggagaggaggaggaaggaggaggagagagggagcttgtcttgtccctgagcagcgctctcagggcagaggtgaggcaccgggacatgaagttggaggacaagttcccaagcagggcttcctcgggctccccctcgcgacggtaatttgacacttggatctccaggacgaccaacaacaaaaaagccaggcagagacagcagctggctgtcagcagaggagctgggctgaggcgcccaggggagcagcggcgcccacgaaggaagtacgaggacagcacgtggaggctccgcgctggggcactgctgctcagcccccaacacctgagctcccagagcccggcaggagccccaacaggaagccagcgcggcatggctgccaccgacttcgtgcaggagatgcgcgccgtgggcgagaggctgctgctcaagctgcagagactgccccaggctgagcccgtggagatcgtggccttctcagtcatcatccttttcacagctactgttctgctgttgctgctgatagcctgcagctgctgctgcactcactgctgctgccctgagcggagaggcaggaaggtccaggtgcagccgacaccaccatgacggacgggcgatggctgaggagaagctggagaggagatggccaatgccatgacacaggccatcagcctggccctgcagcccttacccctcaagaccaggctcccctggccccagctctggcccagcccaggtacctggacactgacaacttgagccctaccaaggaaacaagggctggtataggtgcaaacctctcatctgccagtggacactgggtgctggggagtcagctgtttcaaagactgggtcaactgcctgggcttcttcgcctacctgcactttttaacaaaacaaggaagtaggggtccccataccttgatggagaacagtccccacctgtgggcaattggcccttggggctctgctgatacatgccaaagaggagcaaggcaatcagaggggctttgtgcaatagcttctgcatccgagctcccgccagagcgtgagcatgtcagtattctagtccagtatttgccagtttccaagtaaaagcttttgtgttacgtg

SEQ ID NO: 182321 - DNA, 4344 bp, Homo sapiens
  Payload ID: 15907
  Gene Symbol: SMIM5
  Gene Name: small integral membrane protein 5
  Uniprot ID: Q71RC9
  ENST ID: ENST00000537494
  CDS Start-End: 3608-3841
ggcactccttggcctggctttaaatagcccgctgggaagaccacctggggaccggctggaatgcgcctcctcctctttagagaacaggacccctcagctcccccacctgcgccatgaaggttcagtcgcgggtttacgctccaaatgacaagatatcaactgcaaaacaaagggggtcccggggttcctctccagctctctgggggcagaacagccacgtccaacggtcctacttctgctcactgtgtgacaggataccgtgagtacccctgggtcagaccctggggctgggtgaggctggccatgcctggctggcaaattcagcttccagtcagccccctagggaagccctgggcgcaaagctatgacactgtccacagccgcagcctgctgctgctgggaactgacacttttccccgctggaggccggggtccacccggcatgagtctgcagctctcccactttgcagcccctggaggaggctggccagagcttctcagcaacaaaccccacttttcctgcaccagtaaattcagcctcagtccaaccttcctcctccctgttctggtgagcacagccccaggtctctcgctcacaaggaaaagtgccccctgcaatctctccctgggtctctgggtgtggcacaagcgaaaaagctctccctgcccgctccctctttgaaggagtgtctctgctgggctacattaggccgtgtgggcacagtgccagtcaggctgaaaacgccagaccaagtgtagacagagagggaggggagaaaggcagcccagctcctgaaccacgcgcaaactgtcccgtaagggacactgtcggcattgtcgtccctctaagaatgagggaacctggaaagctggggcgtgaggatggcacggaggtcccggaaccaagaggggaccactgtccttgtgcaagcctgctccacctggccagagagaatgtcccattcagtctgaccagagggttcagtcctacactcaggctggctagactcacaagacctgtacctgtggtgacaaggactccaggtagtctcaaagagcctggtgtggccccggcctggtggtgatatgctgataaaagcagcttcagatccacaaatgtgggctggggctggccgagcacagccagctggcttccagggggctctcgggccctggctcctgtactgagcccactgcacgggcagtaccctcagcggggctgctcctggctatcttgctggtctaagctggagacaggcctccatggagagacagcgtggggcaccagtgggggtgctggctggggccctgtcctgctgtgtaacctcagagaagttgcttgctctctcgggtctcagcttccccacgtatagaaggaaggaggcgggagcggatgatctatagcattctaggaccctatgcctctcagtacatttgaaaactgagatcctcacctccacagaaacgcactcactccaggtgaggtgtgagaagctgggtggatctaactcagggaacccacggcttttgacaagaactcatctaattttccacggagccatcttctgcctgctaccctcatcatcacttaaaaaaacagctccccaggccgggcgcagtggctcacacctgtaatcccaacactttgggaggccgagggcggatcacctgatgtcaggagttcgagaccagtctggctaacatggtgaaatcctgtttctactaaaaatacaaaaattagccgggcatggtggcgcacactcgtgatcccagctactcgggaggctgaggcaggagaatcacttgaatctgggaggcagaggttgcagtgagctgagatcatgccattgcactctagcttgggcaacaagagagaaactccatctcaaagaaaaccaaaaccaacaacaaaaacatagctccccacctccagcttgcctaccttccttcagggcacacaccgcagacaccctaggacagacacccaaaaggtgttgggggtgctagtgacggtgcacgggggtgacagcccccaaagccagtgagacccgtcccgggggggcattctcgtgtgccgggcacccccctatggctgtctacaatgtgctgctagatggtcagtcctcccaatagcctcaaaacacgggcatctcattccatatcagagacatgaagcaacctgttcatgtcacaaaaggaagaagtggaggtggcattcaaggaggagcagctgaaaacactagagcaggcccctggcagagaaggaaatccagaaggtacatgccggctgccatcttgctcctgaagggctacgaggcagaagagggggcaaggtctaagtgaccacaagtgggactaactgggggccagcagggagtccgaccttctgcagtgggtgggctgcctcagcaggcggaggttcctcaccatcctgggtgctcatgcaaagaccacatggcctcaaggatggccgcaggccaattgcagggtggagggccccgttcgatgaccttcacggtggttctaaaccagctctgccaaggcagcggcaccgggagtgactggcctcactgacgtagccatctcagcgagaaccggctgagacctgggacaaggcaacgataattacagccaaaggtctggcaccagcccctggccacctgtccccaccaccacccctggattagagcaactgccttggtgaactggatcaggctgggttgggacaaggttgtctctggctcctctctaaagaggcaccagctccctcatgcccacaggagaggcagaaggggaaagccttctggagtggcaccttgggcctcttgggcaccctgagacaggaagaggctctcctggggcaggggtgggagtggagaggactttcctggtcaggctagagaaacagatgacgccagcaggggaggggctggcttgagcaacctgggcctcctgaccccctcccaacagacaggacagaaaccctggcaaaacctggagggacacggtgcggcctccccctctggcagaacaggcatgagtgtagaaactgggctggtgggagaggttggggggcctgggggacaggggggcagttttcacctctgactgaccctggccagaagccccatgaacctgctctcgggagaacctgctccttctgtccccacattgatggaaggcaagagtaccagcttggcatcctatcccagtctccccaccccgagggagctgtgccagtcccaagcacccaggcaaaacccagtagtggtacctcaagacaagggaatggaacagcgaagccagaaaccaccaccagccgccgccttggccggcagcccccgaagcaagcccttggtctcactgtcctcaccggcttcctccaccctgagctgtgtcagctgggtggggactgagggccaccactaggtggaagtcaccaggggtgcaatgtgtgagacctgacaaacttgttctgcgggctgcggatgggtgcgagggtggaatctcggtgctgcgacgagtgtggggccagccgtggaggctccaggtgttctctctgccccagcagagcccggcaggagccccaacaggaagccagcgcggcatggctgccaccgacttcgtgcaggagatgcgcgccgtgggcgagaggctgctgctcaagctgcagagactgccccaggctgagcccgtggagatcgtggccttctcagtcatcatccttttcacagctactgttctgctgttgctgctgatagcctgcagctgctgctgcactcactgctgctgccctgagcggagaggcaggaaggtccaggtgcagccgacaccaccatgacggacgggcgatggctgaggagaagctggagaggagatggccaatgccatgacacaggccatcagcctggccctgcagcccttacccctcaagaccaggctcccctggccccagctctggcccagcccaggtacctggacactgacaacttgagccctaccaaggaaacaagggctggtataggtgcaaacctctcatctgccagtggacactgggtgctggggagtcagctgtttcaaagactgggtcaactgcctgggcttcttcgcctacctgcactttttaacaaaacaaggaagtaggggtccccataccttgatggagaacagtccccacctgtgggcaattggcccttggggctctgctgatacatgccaaagaggagcaaggcaatcagaggggctttgtgcaatagcttctgcatccgagctcccgccagagcgtgagcatgtcagtattctagtccagtatttgccagtttccaagtaaaagcttttgtgtta

SEQ ID NO: 182322 - DNA, 866 bp, Homo sapiens
  Payload ID: 15908
  Gene Symbol: SMIM6
  Gene Name: small integral membrane protein 6
  Uniprot ID: P0DI80
  ENST ID: ENST00000556126
  CDS Start-End: 268-456
agttaatcattcaccccacaacacaggaagtgagccctacgccagtcccagccccagggcttcctgagctcggggcaggtccgcagtccacacgtcacccagacagaggacagcccagcccagccacagttgcttctttgagtcagggtgcagctctggtcacctggcggcctcttcagctcagccctccacaaagtgtgagcctgaaggaccaccctgaattgcccttgtaggacccagaacagctaccagcagaatcagattctcatggaccaactggtattcaaagagacaatctggaatgatgcgttctggcagaacccctgggaccaggggggcctggcagtgattatcttattcatcaccgctgtcctgcttctcatcttatttgccatcgtgtttggtttactcacttccacagaaaacactcagtgtgaagcgggtgaagaggagtgacctgacttgctggggactgagatggcagcaggggaggcgagctgacctgcccccattccagtggtgggccccttcgcggttccctctggctcaggggccaagccctggtgtcttcctttcccatcaggaaaaagtctagtaaaatactgtatctggcttagggttggtcagactagtaagatggggaggctggtctgagaccaattctggctccttgaccctattgtttttagggttccccgaccagaaccctaaaagcacatggagaggatggctccactgcctcaggtggaaggagctatggctaacaaggttctctaacaggctcacaggcccagccagcaatttcacaaatccttgacagagaaagacacaaccaaatgaaataaaaattccttttcaaatctgct

SEQ ID NO: 182323 - DNA, 957 bp, Homo sapiens
  Payload ID: 15908
  Gene Symbol: SMIM6
  Gene Name: small integral membrane protein 6
  Uniprot ID: P0DI80
  ENST ID: ENST00000579469
  CDS Start-End: 357-545
ctgacttctctcaggagggactcatgaacacgtgccctgagcacccccaaaatgacatcacacaagggcagaaaggagctgaagggggaacgtgaaaggcagaaagggagccgtggttgccaggcaaccagccctagcccacctttgtttgtttggtgacagcaactaaggtctggtcagggccgcttggccacgctcatgccttttcctctcaacagttgcttctttgagtcagggtgcagctctggtcacctggcggcctcttcagctcagccctccacaaagtgtgagcctgaaggaccaccctgaattgcccttgtaggacccagaacagctaccagcagaatcagattctcatggaccaactggtattcaaagagacaatctggaatgatgcgttctggcagaacccctgggaccaggggggcctggcagtgattatcttattcatcaccgctgtcctgcttctcatcttatttgccatcgtgtttggtttactcacttccacagaaaacactcagtgtgaagcgggtgaagaggagtgacctgacttgctggggactgagatggcagcaggggaggcgagctgacctgcccccattccagtggtgggccccttcgcggttccctctggctcaggggccaagccctggtgtcttcctttcccatcaggaaaaagtctagtaaaatactgtatctggcttagggttggtcagactagtaagatggggaggctggtctgagaccaattctggctccttgaccctattgtttttagggttccccgaccagaaccctaaaagcacatggagaggatggctccactgcctcaggtggaaggagctatggctaacaaggttctctaacaggctcacaggcccagccagcaatttcacaaatccttgacagagaaagacacaaccaaatgaaataaaaattccttttcaaatctgctaa

SEQ ID NO: 182324 - DNA, 850 bp, Homo sapiens
  Payload ID: 15909
  Gene Symbol: SMIM7
  Gene Name: small integral membrane protein 7
  ENST ID: ENST00000358726
  CDS Start-End: 33-344
ttccggttctgacggacgcttcggccgtaacgatgatcggagacatcctgctgttcgggacgttgctgatgaatgccggggcggtgctgaactttaagctgaaaaagaaggacacgcagggctttggggaggagtccagggagcccagcacaggtgacaacatccgggaattcttgctgagcctcagatactttcgaatcttcatcgccctgtggaacatcttcatgatgttctgcatgattgtgctgagaaaactcaagcagattgcctttccatctagcactggggccataactctgatactactgttaacgaattgtgagatttgctgtaaatggatttaggaaaagacacgacgggagaatctggtgttcttggcctctgtgggtccatccctgtatgcttcccccagaaagagagaggacaaaaagttgtctgtcctgagtgattgagactccgaatgtggggttgctgtccagtctgcgtgccaccccagtggctgtttgcgaagatgcttccaggacataggagatctggggaggatggcatttcaccctcatcacaaggaccgtgatgtattcccaggaagactgttgccaaggtatcctacctggcagagaggatctgagagcatgtatgagacttgcctaggaacaaagaaggcttgtgaggagatcaaggaacttacatgaaattgtaggaacggccaggggcagtggctcaggcctgtaatcccagtactttgggaggccaaggtgggagaattgcttgagcccaggagttcaagaccagcctgggcagcatggtgaaaccctgtctttaccaaaaataaaaaaattagccgagtgta

SEQ ID NO: 182325 - DNA, 2776 bp, Homo sapiens
  Payload ID: 15909
  Gene Symbol: SMIM7
  Gene Name: small integral membrane protein 7
  Uniprot ID: Q9BQ49
  ENST ID: ENST00000487416
  CDS Start-End: 48-275
ccctggggcttccgcttccggttctgacggacgcttcggccgtaacgatgatcggagacatcctgctgttcgggacgttgctgatgaatgccggggcggtgctgaactttaagctgaaaaagaaggacacgcagggctttggggaggagtccagggagcccagcacaggtgacaacatccgggaattcttgctgagcctcagatactttcgaatcttcatcgccctgtggaacatcttcatgatgttctgcatgattgtgctgttcggctcttgaatcccagcgatgaaaccaggaactcactttcccgggatgccgagtctccattcctccattcctgatgacttcaagaatgtttttgaccagaaaaccgacaaccttcccagaaagtccaagctcgtggtgggtggaaaagtgttcgccgaggtgtgcatggtttcccagccacgtccctgttttcaaagatagtttcactttggtctctgaattgaaatgctgtctactgaaagggtttcaggagcgtttatgtaaggggctgtgatgaaattgcattccccatagataaaagaaaaatcatttctatccagagatctgagcagaaggattggcttgttagtttaacacagccgtatttttggacattcagtgttacttgctgagtctgacagcctctgggcccggccaggggccctgttaacaaactgctttcacatcccaacagggtctgcttggccactcagtgcagctgcgattaaccctaaaggctttaaggaacgggccacctgtaacagagacaccagccttcctgtatagacactaaattgttagcaagagtgttgagctagttcctggtgaagtgtttccacagaagacatgtggagcagttgtggggatattaagggaaactttcctctgccttgacccctttgttaaataaaatgactttgggagccattcattgtacagttgcaggaatgagagtgattttatgatgtggtacattgggaccatgttctaaaaccttgggtttctgagtctgctttttgagtaggtgattttgaggttgaaaaaccaggggccttcatctaggaaatacagcattttccagaagcttctttgaaagggaatcctggttttgttgccaaaatgaaacgcccggggttggcgctgaatcccacaactgtgtgatttgcttgttgagttttttgttgtctggtttttttgtttgtttgtttataccaataagaatgagcctgaatgttggtggtttttgaaatcctgacttggaggtaaacctggaggaaggaaaaaaagtaaatatgcaggcttttaggactgagtagccttgaaaataaacctcatttctaaaaaggaccttttgtttatactttttttttttttttaaccaagaagtcaatttccaacctgagtccttttgaatttaccctgctggaaaaacctaggattcattttggaggccatgagaaagaaaagagtcagtggtagagtttcctttttggatttagctcaataaatgatggtcaagaattgggcaagtggggctgcgcgcagtggctcatacctgtaatcccagcactttgggaggccgaggtaggcggatcacttgaggtcaggagttcgaaactagcctggccaacatggtgaaatcgcatctctactaaaaatagaaaaattagccagatatggtggcacacgcctataatcccagctactcgggtggctgaggcacaagaattgcttaaatctgggaggcggaggttgcagtgagctgagattgagccactgcacttcagcctgggtgagacaatgagattctgtctcaaaaaaaaaaaaaaaaaaagaattgagtaagtggaattttgactggagctgctcctgaaagtattgaaagagtcattgctaatggtgggctcttgctagaccagggtcaagtccacttttgctgcctctcaggttgtggaattctccttgatcacttctgcaattcatttccttgccaaatctcagccaagcatcaccccaaggtctgtaagtagcagagatcggagctgctgggtctggctttgctgaggccggtgtcgctgtcagaacaggcacgccaagatcttggctgggtccctcacaggccagatgaatggtgtgaagaaaccttcctgccttattcagactggcgcggaggtctcaatgaggcgaggcatttgtccattatggggatgaatcgtgctctcagaagagaatcctgtcattgaggttttgtttcaatagtcctctttttctccagagaactgttgtctcattgttaataatagcagcgtggctttttcagatgctggttggtggctgctgtacattttaaaaatggaatctcatggttgtgtctcttaaggaagcttttcaagaactttactggcaccagaggttatcagagtttgaagtttgggtgcctagtgtctcacagtgtttaagcactaatgttctgggtcagttaggtgtgagtacaaatcccatctcagctcattctgagagggaccttggctaattgctttctcctctccaagcctcagtttccacatctctaaaatcggcctgcaagtagtgtgtgcctaaggttgttgtaagtttcaatgaactcgaatgcggctgagtgcctgagagcacctgttgctgtgggtatcatcaccgtgtgtgttttctgtcttctcatccacttttctttgtgcagtctgcacacacaccattaaaggctgatgacagca

SEQ ID NO: 182326 - DNA, 1281 bp, Homo sapiens
  Payload ID: 15909
  Gene Symbol: SMIM7
  Gene Name: small integral membrane protein 7
  ENST ID: ENST00000465250
  CDS Start-End: 21-170
cggacgcttcggccgtaacgatgatcggagacatcctgctgttcgggacgttgctgatgaatgccggggcggtgctgaactttaagctgaaaaagaaggacacgcagggctttggggaggagtccagggagcccagcacaggctgttcggctcttgaatcccagcgatgaaaccaggaactcactttcccgggatgccgagtctccattcctccattcctgatgacttcaagaatgtttttgaccagaaaaccgacaaccttcccagaaagtccaagctcgtggtgggtggaaaagtgttcgccgaggggcttgcttctgacatgtctgatgagcgcattcctgctgttgctcctggctattacaaggtgtcgctgtggaagactattcctgtacagctgtgtgaacctgcctcgtcacggcttcctctgcagtgctcttgaatatcccggttcctgcttaggccacagcagtgagtccagggagaagcatccttctactccctcactgtccaggttggctgaagatgctctgcacttgacctcctgacactaacttccttgccttttcccatggcaagagcaagtcatggactctgaactacttcctctcccttttttctatttattttattttattttatatttgtgatggagtctcgctctgtcacccaggctggagtgtggtggtgtgatcttggctcactgcaacctctgcctcccaggttcatgcaattctcctgcctctacctcccaagtagctgggaatacaggtgcccaccaccatgcccggctaatttttgtattcttagtagaggtggggtttcaccatgttggccaggctggtctcttaactccttacctcaaatgatccacccacctcggcctcccaaagtgctgggattatagatgtgagccactgcacccagcccttcctctccctttctctttggggttcccttcacaaacaggtgaggcagctttttcaagggcattccaagcacaaaagaccttgttgtacctaaatactataagggacctgtcattgaggacgaaccatcacagcaagaggaattatctcgtgccgcatcttcgcataactgacaggatccctggcaaggatgtctcaatgcagaaagttggctaagtgaactgcagtatctaccctggacctaaaagaacttgctaatgttttcaagactacaattcagaggctgtctgatttaatctttgcatttacaaaaacacccttttacgtacattaaatgtggaataaaactaaa

SEQ ID NO: 182327 - DNA, 1126 bp, Homo sapiens
  Payload ID: 15909
  Gene Symbol: SMIM7
  Gene Name: small integral membrane protein 7
  Uniprot ID: Q9BQ49
  ENST ID: ENST00000481671
  CDS Start-End: 21-248
cggacgcttcggccgtaacgatgatcggagacatcctgctgttcgggacgttgctgatgaatgccggggcggtgctgaactttaagctgaaaaagaaggacacgcagggctttggggaggagtccagggagcccagcacaggtgacaacatccgggaattcttgctgagcctcagatactttcgaatcttcatcgccctgtggaacatcttcatgatgttctgcatgattgtgctgttcggctcttgaatcccagcgatgaaaccaggaactcactttcccgggatgccgagtctccattcctccattcctgatgacttcaagaatgtttttgaccagaaaaccgacaaccttcccagaaagtccaagctcgtggtgggtggaaaagtgttcgccgaggggcttgcttctgacatgtctgatgagcgcattcctgctgttgctcctggctattacaaggtgtcgctgtggaagactattcctgtacagctgtgtgaacctgcctcgtcacggcttcctctgcagtgctcttgaatatcccggttcctgcttaggccacagcagtgagtccagggagaagcatccttctactccctcactgtccaggttggctgaagatgctctgcacttgacctcctgacactaacttccttgccttttcccatggcaagagcaagtcatggactctgaactacttcctctcccttttttctatttattttattttattttatatttgtgatggagtctcgctctgtcacccaggctggagtgtggtggtgtgatcttggctcactgcaacctctgcctcccaggttcatgcaattctcctgcctctacctcccaagtagctgggaatacaggtgcccaccaccatgcccggctaatttttgtattcttagtagaggtggggtttcaccatgttggccaggctggtctcttaactccttacctcaaatgatccacccacctcggcctcccaaagtgctgggattatagatgtgagccactgcacccagcccttcctctccctttctctttggggttcccttcacaaacaggtgaggcagctttttcaagggcattccaagcacaaaagaccttgttgtacctaaatactataaggg

SEQ ID NO: 182328 - DNA, 569 bp, Homo sapiens
  Payload ID: 15909
  Gene Symbol: SMIM7
  Gene Name: small integral membrane protein 7
  ENST ID: ENST00000461488
  CDS Start-End: 5-175
aacgatgatcggagacatcctgctgttcgggacgttgctgatgaatgccggggcggtgctgaactttaagctgaaaaagaaggacacgcagggctttggggaggagtccagggagcccagcacaggttggagtgcagtggtgcgatcatggctcactgcagactcgacctcctgagctaaagtgatccttccacctcagcccccttagtagctgggattacaggtgacaacatccgggaattcttgctgagcctcagatactttcgaatcttcatcgccctgtggaacatcttcatgatgttctgcatgattgtgctgttcggctcttgaatcccagcgatgaaaccaggaactcactttcccgggatgccgagtctccattcctccattcctgatgacttcaagaatgtttttgaccagaaaaccgacaaccttcccagaaagtccaagctcgtggtgggtggaaaagtgttcgccgaggtgtgcatggtttcccagccacgtccctgttttcaaagatagtttcactttggtctctgaattgaaatgctgtctactgaaagggtttc

SEQ ID NO: 182329 - DNA, 602 bp, Homo sapiens
  Payload ID: 15909
  Gene Symbol: SMIM7
  Gene Name: small integral membrane protein 7
  ENST ID: ENST00000463051
  CDS Start-End: 5-148
aacgatgatcggagacatcctgctgttcgggacgttgctgatgaatgccggggcggtgctgaactttaagctgaaaaagaaggacacgcagggctttggggaggagtccagggagcccagcacagggcttgagagggagagtgattgactggaaaccctggaagaagggtctagaacccaggtctctggagtcttcacgtactaaattgccttccctcggaggggtttctgttccttggcattcaaggggaccagagtgacaacatccgggaattcttgctgagcctcagatactttcgaatcttcatcgccctgtggaacatcttcatgatgttctgcatgattgtgctgttcggctcttgaatcccagcgatgaaaccaggaactcactttcccgggatgccgagtctccattcctccattcctgatgacttcaagaatgtttttgaccagaaaaccgacaaccttcccagaaagtccaagctcgtggtgggtggaaaagtgttcgccgaggtgtgcatggtttcccagccacgtccctgttttcaaagatagtttcactttggtctctgaattgaaatgctgtctactgaaagggtttc

SEQ ID NO: 182330 - DNA, 2190 bp, Homo sapiens
  Payload ID: 15909
  Gene Symbol: SMIM7
  Gene Name: small integral membrane protein 7
  ENST ID: ENST00000487803
  CDS Start-End: 21-332
cggacgcttcggccgtaacgatgatcggagacatcctgctgttcgggacgttgctgatgaatgccggggcggtgctgaactttaagctgaaaaagaaggacacgcagggctttggggaggagtccagggagcccagcacaggtgacaacatccgggaattcttgctgagcctcagatactttcgaatcttcatcgccctgtggaacatcttcatgatgttctgcatgattgtgctgagaaaactcaagcagattgcctttccatctagcactggggccataactctgatactactgttaacgaattgtgagatttgctgtaaatggatttaggaaaagacacgacgggagaatctggtgttcttggcctctgtgggtccatccctgtatgcttcccccagaaagagagaggacaaaaagttgtctgtcctgagtgattgagactccgaatgtggggttgctgtccagtctgcgtgccaccccagtggctgtttgcgaagatgcttccaggacataggagatctggggaggatggcatttcaccctcatcacaaggaccgtgatgtattcccaggaagactgttgccaaggctgttcggctcttgaatcccagcgatgaaaccaggaactcactttcccgggatgccgagtctccattcctccattcctgatgacttcaagaatgtttttgaccagaaaaccgacaaccttcccagaaagtccaagctcgtggtgggtggaaaagtgttcgccgaggtgtgcatggtttcccagccacgtccctgttttcaaagatagtttcactttggtctctgaattgaaatgctgtctactgaaagggtttcaggagcgtttatgtaaggggctgtgatgaaattgcattccccatagataaaagaaaaatcatttctatccagagatctgagcagaaggattggcttgttagtttaacacagccgtatttttggacattcagtgttacttgctgagtctgacagcctctgggcccggccaggggccctgttaacaaactgctttcacatcccaacagggtctgcttggccactcagtgcagctgcgattaaccctaaaggctttaaggaacgggccacctgtaacagagacaccagccttcctgtatagacactaaattgttagcaagagtgttgagctagttcctggtgaagtgtttccacagaagacatgtggagcagttgtggggatattaagggaaactttcctctgccttgacccctttgttaaataaaatgactttgggagccattcattgtacagttgcaggaatgagagtgattttatgatgtggtacattgggaccatgttctaaaaccttgggtttctgagtctgctttttgagtaggtgattttgaggttgaaaaaccaggggccttcatctaggaaatacagcattttccagaagcttctttgaaagggaatcctggttttgttgccaaaatgaaacgcccggggttggcgctgaatcccacaactgtgtgatttgcttgttgagttttttgttgtctggtttttttgtttgtttgtttataccaataagaatgagcctgaatgttggtggtttttgaaatcctgacttggaggtaaacctggaggaaggaaaaaaagtaaatatgcaggcttttaggactgagtagccttgaaaataaacctcatttctaaaaaggaccttttgtttatactttttttttttttttaaccaagaagtcaatttccaacctgagtccttttgaatttaccctgctggaaaaacctaggattcattttggaggccatgagaaagaaaagagtcagtggtagagtttcctttttggatttagctcaataaatgatggtcaagaattgggcaagtggggctgcgcgcagtggctcatacctgtaatcccagcactttgggaggccgaggtaggcggatcacttgaggtcaggagttcgaaactagcctggccaacatggtgaaatcgcatctctactaaaaatagaaaaattagccagatatggtggcacacgcctataatcccagctactcgggtggctgaggcacaagaattgcttaaatctgggaggcggaggttgcagtgagctgagattgagccactgcacttcagcctgggtgagacaatgagattctgtctcaaaaaaaaaaaaaaaaaaa

SEQ ID NO: 182331 - DNA, 975 bp, Homo sapiens
  Payload ID: 15909
  Gene Symbol: SMIM7
  Gene Name: small integral membrane protein 7
  Uniprot ID: Q9BQ49
  ENST ID: ENST00000597781
  CDS Start-End: 21-248
cggacgcttcggccgtaacgatgatcggagacatcctgctgttcgggacgttgctgatgaatgccggggcggtgctgaactttaagctgaaaaagaaggacacgcagggctttggggaggagtccagggagcccagcacaggtgacaacatccgggaattcttgctgagcctcagatactttcgaatcttcatcgccctgtggaacatcttcatgatgttctgcatgattgtgctgttcggctcttgaatcccagcgatgaaaccaggaactcactttcccgggatgccgagtctccattcctccattcctgatgacttcaagaatgtttttgaccagaaaaccgacaaccttcccagaaagtccaagctcgtggggcttgcttctgacatgtctgatgagcgcattcctgctgttgctcctggctattacaaggtgtcgctgtggaagactattcctgtacagctgtgtgaacctgcctcgtcacggcttcctctgcagtgctcttgaatatcccggttcctgcttaggccacagcagtgagtccagggagaagcatccttctactccctcactgtccaggttggctgaagatgctctgcacttgacctcctgacactaacttccttgccttttcccatggcaagagcaagtcatggactctgaactacttcctctcccttttttctatttattttattttattttatatttgtgatggagtctcgctctgtcacccaggctggagtgtggtggtgtgatcttggctcactgcaacctctgcctcccaggttcatgcaattctcctgcctctacctcccaagtagctgggaatacaggtgcccaccaccatgcccggctaatttttgtattcttagtagaggtggggtttcaccatgttggccaggctggtctcttaactccttacctcaaatgatccacccacctcggcctcccaaagtgctgggattataga

SEQ ID NO: 182332 - DNA, 1123 bp, Homo sapiens
  Payload ID: 15909
  Gene Symbol: SMIM7
  Gene Name: small integral membrane protein 7
  Uniprot ID: Q9BQ49
  ENST ID: ENST00000599310
  CDS Start-End: 333-560
gggaccccagaaagtgagtaggaattgctgcccagctaaccctacggcatcgagacctcacgcatgcgcggcacgcttcgaacgcgtgacccaatcccgcccccaggagaccccgctcctcccattctggctctcggggcctccccagcgaggtggggcgctcgcgctcccctaagggggtctggcctgcagagggcgggaccctcccagccttgaccttcgattggcccagccctcgccactgttgctttaggattggtcggcttgtgctcctctcccctccctccctggggcttccgcttccggttctgacggacgcttcggccgtaacgatgatcggagacatcctgctgttcgggacgttgctgatgaatgccggggcggtgctgaactttaagctgaaaaagaaggacacgcagggctttggggaggagtccagggagcccagcacaggtgacaacatccgggaattcttgctgagcctcagatactttcgaatcttcatcgccctgtggaacatcttcatgatgttctgcatgattgtgctgttcggctcttgaatcccagcgatgaaaccaggaactcactttcccgggatgccgagtctccattcctccattcctgatgacttcaagaatgtttttgaccagaaaaccgacaaccttcccagaaagtccaagctcgtgggtctgcttggccactcagtgcagctgcgattaaccctaaaggctttaaggaacgggccacctgtaacagagacaccagccttcctgtatagacactaaattgttagcaagagtgttgagctagttcctggtgaagtgtttccacagaagacatgtggagcagttgtggggatattaagggaaactttcctctgccttgacccctttgttaaataaaatgactttgggagccattcattgtacagttgcaggaatgagagtgattttatgatgtggtacattgggaccatgttctaaaaccttgggtttctgagtctgctttttgagtaggtgattttgaggttgaaaaaccaggggccttcatctaggaaatacagcattttccagaagcttctttgaaagggaatcctggttttgttgccaaaatgaaacgcccg

SEQ ID NO: 182333 - DNA, 1757 bp, Homo sapiens
  Payload ID: 15909
  Gene Symbol: SMIM7
  Gene Name: small integral membrane protein 7
  Uniprot ID: Q9BQ49
  ENST ID: ENST00000593409
  CDS Start-End: 5-232
aacgatgatcggagacatcctgctgttcgggacgttgctgatgaatgccggggcggtgctgaactttaagctgaaaaagaaggacacgcagggctttggggaggagtccagggagcccagcacaggtgacaacatccgggaattcttgctgagcctcagatactttcgaatcttcatcgccctgtggaacatcttcatgatgttctgcatgattgtgctgttcggctcttgaatcccagcgatgaaaccaggaactcactttcccgggatgccgagtctccattcctccattcctgatgacttcaagaatgtttttgaccagaaaaccgacaaccttcccagaaagtccaagctcgtggtgggtggaaaagtgttcgccgaggtgtgcatggtttcccagccacgtccctgttttcaaagatagtttcactttggtctctgaattgaaatgctgtctactgaaagggtttcaggagcgtttatgtaaggggctgtgatgaaattgcattccccatagataaaagaaaaatcatttctatccagagatctgagcagaaggattggcttgttagtttaacacagccgtatttttggacattcagtgttacttgctgagtctgacagcctctgggcccggccaggggccctgttaacaaactgctttcacatcccaacagggtctgcttggccactcagtgcagctgcgattaaccctaaaggctttaaggaacgggccacctgtaacagagacaccagccttcctgtatagacactaaattgttagcaagagtgttgagctagttcctggtgaagtgtttccacagaagacatgtggagcagttgtggggatattaagggaaactttcctctgccttgacccctttgttaaataaaatgactttgggagccattcattgtacagttgcaggaatgagagtgattttatgatgtggtacattgggaccatgttctaaaaccttgggtttctgagtctgctttttgagtaggtgattttgaggttgaaaaaccaggggccttcatctaggaaatacagcattttccagaagcttctttgaaagggaatcctggttttgttgccaaaatgaaacgcccggggttggcgctgaatcccacaactgtgtgatttgcttgttgagttttttgttgtctggtttttttgtttgtttgtttataccaataagaatgagcctgaattgtggtggtacaggcctgtaatcccagttactagggaggctgaggcaggagaatcacttgaacctgggaagcagaggttgtgatgaaccgagattgcaccattgcactccagcctgggccacaagagtgaaactccatctcaaaaaaaaaaaaaaaaaaagttgtattagaatctggccacacccctttgtgtgtgtattacttagaattgctttagcaacctccatactataacttcaaagtggagtagtggcacagagaccatatggcctgcagaatggaaaatgtcacctgtttggcctcttaccagaaaaatttgccaaccgctcaactagggtgtgatggagaatcccaaggtgtcccttccctcccaaagccactcagggaatcatctgtacccttgtggcctgcattttaacaaacatatacacaaacacattttttaaatttgctagaaatcttccctcccattttcaagtgtggttaatcaattgaccaaaacccagttttctttctttctttctttctttttttgagactct

SEQ ID NO: 182334 - DNA, 1075 bp, Homo sapiens
  Payload ID: 15909
  Gene Symbol: SMIM7
  Gene Name: small integral membrane protein 7
  ENST ID: ENST00000597711
  CDS Start-End: 35-184
gcttccggttctgacggacgcttcggccgtaacgatgatcggagacatcctgctgttcgggacgttgctgatgaatgccggggcggtgctgaactttaagctgaaaaagaaggacacgcagggctttggggaggagtccagggagcccagcacaggctgttcggctcttgaatcccagcgatgaaaccaggaactcactttcccgggatgccgagtctccattcctccattcctgatgacttcaagaatgtttttgaccagaaaaccgacaaccttcccagaaagtccaagctcgtggtgggtggaaaagtgttcgccgaggtgtgcatggtttcccagccacgtccctgttttcaaagatagtttcactttggtctctgaattgaaatgctgtctactgaaagggtttcaggagcgtttatgtaaggggctgtgatgaaattgcattccccatagataaaagaaaaatcatttctatccagagatctgagcagaaggattggcttgttagtttaacacagccgtatttttggacattcagtgttacttgctgagtctgacagcctctgggcccggccaggggccctgttaacaaactgctttcacatcccaacagggtctgcttggccactcagtgcagctgcgattaaccctaaaggctttaaggaacgggccacctgtaacagagacaccagccttcctgtatagacactaaattgttagcaagagtgttgagctagttcctggtgaagtgtttccacagaagacatgtggagcagttgtggggatattaagggaaactttcctctgccttgacccctttgttaaataaaatgactttgggagccattcattgtacagttgcaggaatgagagtgattttatgatgtggtacattgggaccatgttctaaaaccttgggtttctgagtctgctttttgagtaggtgattttgaggttgaaaaaccaggggccttcatctaggaaatacagcattttccagaagcttctttgaaagggaatcctggttttgttgccaaaatgaaacgcccggggttggcgctgaatcccacaa

SEQ ID NO: 182335 - DNA, 534 bp, Homo sapiens
  Payload ID: 15909
  Gene Symbol: SMIM7
  Gene Name: small integral membrane protein 7
  ENST ID: ENST00000602194
  CDS Start-End: 35-184
gcttccggttctgacggacgcttcggccgtaacgatgatcggagacatcctgctgttcgggacgttgctgatgaatgccggggcggtgctgaactttaagctgaaaaagaaggacacgcagggctttggggaggagtccagggagcccagcacaggctgttcggctcttgaatcccagcgatgaaaccaggaactcactttcccgggatgccgagtctccattcctccattcctgatgacttcaagaatgtttttgaccagaaaaccgacaaccttcccagaaagtccaagctcgtggtgggtggaaaagtgttcgccgagggtctgcttggccactcagtgcagctgcgattaaccctaaaggctttaaggaacgggccacctgtaacagagacaccagccttcctgtatagacactaaattgttagcaagagtgttgagctagttcctggtgaagtgtttccacagaagacatgtggagcagttgtggggatattaagggaaactttcctctgccttgacccctttgttaaa

SEQ ID NO: 182336 - DNA, 1076 bp, Homo sapiens
  Payload ID: 15909
  Gene Symbol: SMIM7
  Gene Name: small integral membrane protein 7
  ENST ID: ENST00000594662
  CDS Start-End: 77-268
ggctgggaagagagagccaggcaggacgcgggggcgcccctagtaactgtaattctccctctgcaggacgttgctgatgaatgccggggcggtgctgaactttaagctgaaaaagaaggacacgcagggctttggggaggagtccagggagcccagcacaggtgacaacatccgggaattcttgctgagcctcagatactttcgaatcttcatcgccctgtggaacatcttcatgatgttctgcatgattgtgctgttcggctcttgaatcccagcgatgaaaccaggaactcactttcccgggatgccgagtctccattcctccattcctgatgacttcaagaatgtttttgaccagaaaaccgacaaccttcccagaaagtccaagctcgtggggcttgcttctgacatgtctgatgagcgcattcctgctgttgctcctggctattacaaggtgtcgctgtggaagactattcctgtacagctgtgtgaacctgcctcgtcacggcttcctctgcagtgctcttgaatatcccggttcctgcttaggccacagcagtgagtccagggagaagcatccttctactccctcactgtccaggttggctgaagatgctctgcacttgacctcctgacactaacttccttgccttttcccatggcaagagcaagtcatggactctgaactacttcctctcccttttttctatttattttattttattttatatttgtgatggagtctcgctctgtcacccaggctggagtgtggtggtgtgatcttggctcactgcaacctctgcctcccaggttcatgcaattctcctgcctctacctcccaagtagctgggaatacaggtgcccaccaccatgcccggctaatttttgtattcttagtagaggtggggtttcaccatgttggccaggctggtctcttaactccttacctcaaatgatccacccacctcggcctcccaaagtgctgggattatagatgtgagccactgcacccagcccttcctctccctttctctttggggttcccttcacaaacaggtgaggcagctttttcaagg

SEQ ID NO: 182337 - DNA, 1065 bp, Homo sapiens
  Payload ID: 15909
  Gene Symbol: SMIM7
  Gene Name: small integral membrane protein 7
  Uniprot ID: Q9BQ49
  ENST ID: ENST00000593404
  CDS Start-End: 35-262
gcttccggttctgacggacgcttcggccgtaacgatgatcggagacatcctgctgttcgggacgttgctgatgaatgccggggcggtgctgaactttaagctgaaaaagaaggacacgcagggctttggggaggagtccagggagcccagcacaggtgacaacatccgggaattcttgctgagcctcagatactttcgaatcttcatcgccctgtggaacatcttcatgatgttctgcatgattgtgctgttcggctcttgaatcccagcgatgaaaccaggaactcactttcccgggatgccgagtctccattcctccattcctgatgacttcaagaatgtttttgaccagaaaaccgacaaccttcccagaaagtccaagctcgtggtgggtggaaaagtgttcgccgagggtctgcttggccactcagtgcagctgcgattaaccctaaaggctttaaggaacgggccacctgtaacagagacaccagccttcctgtatagacactaaattgttagcaagagtgttgagctagttcctggtgaagtgtttccacagaagacatgtggagcagttgtggggatattaagggaaactttcctctgccttgacccctttgttaaataaaatgactttgggagccattcattgtacagttgcaggaatgagagtgattttatgatgtggtacattgggaccatgttctaaaaccttgggtttctgagtctgctttttgagtaggtgattttgaggttgaaaaaccaggggccttcatctaggaaatacagcattttccagaagcttctttgaaagggaatcctggttttgttgccaaaatgaaacgcccggggttggcgctgaatcccacaactgtgtgatttgcttgttgagttttttgttgtctggtttttttgtttgtttgtttataccaataagaatgagcctgaatgttggtggtttttgaaatcctgacttggaggtaaacctggaggaaggaaaaaaagtaaatatgcaggcttttaggactgagtagccttgaaaataaacctcatttctaaaaagga

SEQ ID NO: 182338 - DNA, 580 bp, Homo sapiens
  Payload ID: 15909
  Gene Symbol: SMIM7
  Gene Name: small integral membrane protein 7
  ENST ID: ENST00000600740
  CDS Start-End: 97-288
gggtaattagggggaccagaggctgggaagagagagccaggcaggacgcgggggcgcccctagtaactgtaattctccctctgcaggacgttgctgatgaatgccggggcggtgctgaactttaagctgaaaaagaaggacacgcagggctttggggaggagtccagggagcccagcacaggtgacaacatccgggaattcttgctgagcctcagatactttcgaatcttcatcgccctgtggaacatcttcatgatgttctgcatgattgtgctgttcggctcttgaatcccagcgatgaaaccaggaactcactttcccgggatgccgagtctccattcctccattcctgatgacttcaagaatgtttttgaccagaaaaccgacaaccttcccagaaagtccaagctcgtggtgggtggaaaagtgttcgccgagggtctgcttggccactcagtgcagctgcgattaaccctaaaggctttaaggaacgggccacctgtaacagagacaccagccttcctgtatagacactaaattgttagcaagagtgttgagctagttcctggtgaagtgtttc

SEQ ID NO: 182339 - DNA, 603 bp, Homo sapiens
  Payload ID: 15909
  Gene Symbol: SMIM7
  Gene Name: small integral membrane protein 7
  ENST ID: ENST00000598278
  CDS Start-End: 29-178
ggttctgacggacgcttcggccgtaacgatgatcggagacatcctgctgttcgggacgttgctgatgaatgccggggcggtgctgaactttaagctgaaaaagaaggacacgcagggctttggggaggagtccagggagcccagcacaggctgttcggctcttgaatcccagcgatgaaaccaggaactcactttcccgggatgccgagtctccattcctccattcctgatgacttcaagaatgtttttgaccagaaaaccgacaaccttcccagaaagtccaagctcgtggtgggtggaaaagtgttcgccgaggtgtcgctgtggaagactattcctgtacagctgtgtgaacctgcctcgtcacggcttcctctgcagtgctcttgaatatcccggttcctgcttaggccacagcagtgagtccagggagaagcatccttctactccctcactgtccaggttggctgaagatgctctgcacttgacctcctgacactaacttccttgccttttcccatggcaagagcaagtcatggactctgaactacttcctctcccttttttctatttattttattttattttatatttgtgatggag

SEQ ID NO: 182340 - DNA, 2171 bp, Homo sapiens
  Payload ID: 15909
  Gene Symbol: SMIM7
  Gene Name: small integral membrane protein 7
  ENST ID: ENST00000627144
  CDS Start-End: 21-332
cggacgcttcggccgtaacgatgatcggagacatcctgctgttcgggacgttgctgatgaatgccggggcggtgctgaactttaagctgaaaaagaaggacacgcagggctttggggaggagtccagggagcccagcacaggtgacaacatccgggaattcttgctgagcctcagatactttcgaatcttcatcgccctgtggaacatcttcatgatgttctgcatgattgtgctgagaaaactcaagcagattgcctttccatctagcactggggccataactctgatactactgttaacgaattgtgagatttgctgtaaatggatttaggaaaagacacgacgggagaatctggtgttcttggcctctgtgggtccatccctgtatgcttcccccagaaagagagaggacaaaaagttgtctgtcctgagtgattgagactccgaatgtggggttgctgtccagtctgcgtgccaccccagtggctgtttgcgaagatgcttccaggacataggagatctggggaggatggcatttcaccctcatcacaaggaccgtgatgtattcccaggaagactgttgccaaggctgttcggctcttgaatcccagcgatgaaaccaggaactcactttcccgggatgccgagtctccattcctccattcctgatgacttcaagaatgtttttgaccagaaaaccgacaaccttcccagaaagtccaagctcgtggtgggtggaaaagtgttcgccgaggtgtgcatggtttcccagccacgtccctgttttcaaagatagtttcactttggtctctgaattgaaatgctgtctactgaaagggtttcaggagcgtttatgtaaggggctgtgatgaaattgcattccccatagataaaagaaaaatcatttctatccagagatctgagcagaaggattggcttgttagtttaacacagccgtatttttggacattcagtgttacttgctgagtctgacagcctctgggcccggccaggggccctgttaacaaactgctttcacatcccaacagggtctgcttggccactcagtgcagctgcgattaaccctaaaggctttaaggaacgggccacctgtaacagagacaccagccttcctgtatagacactaaattgttagcaagagtgttgagctagttcctggtgaagtgtttccacagaagacatgtggagcagttgtggggatattaagggaaactttcctctgccttgacccctttgttaaataaaatgactttgggagccattcattgtacagttgcaggaatgagagtgattttatgatgtggtacattgggaccatgttctaaaaccttgggtttctgagtctgctttttgagtaggtgattttgaggttgaaaaaccaggggccttcatctaggaaatacagcattttccagaagcttctttgaaagggaatcctggttttgttgccaaaatgaaacgcccggggttggcgctgaatcccacaactgtgtgatttgcttgttgagttttttgttgtctggtttttttgtttgtttgtttataccaataagaatgagcctgaatgttggtggtttttgaaatcctgacttggaggtaaacctggaggaaggaaaaaaagtaaatatgcaggcttttaggactgagtagccttgaaaataaacctcatttctaaaaaggaccttttgtttatactttttttttttttttaaccaagaagtcaatttccaacctgagtccttttgaatttaccctgctggaaaaacctaggattcattttggaggccatgagaaagaaaagagtcagtggtagagtttcctttttggatttagctcaataaatgatggtcaagaattgggcaagtggggctgcgcgcagtggctcatacctgtaatcccagcactttgggaggccgaggtaggcggatcacttgaggtcaggagttcgaaactagcctggccaacatggtgaaatcgcatctctactaaaaatagaaaaattagccagatatggtggcacacgcctataatcccagctactcgggtggctgaggcacaagaattgcttaaatctgggaggcggaggttgcagtgagctgagattgagccactgcacttcagcctgggtgagacaatgagattctgtctc

SEQ ID NO: 182341 - DNA, 2405 bp, Homo sapiens
  Payload ID: 15910
  Gene Symbol: SMIM8
  Gene Name: small integral membrane protein 8
  Uniprot ID: Q96KF7
  ENST ID: ENST00000229570
  CDS Start-End: 64-357
ggggcgtctcgggcgaggagaggaggtgaccccgcgaaagataataaatcatcattgatcaagatgtcttcagcacctgagcctccaacattcaaaaaggaaccacccaaagagaaagagtttcaaagcccagggctcagaggggtgcgcacaacaaccttatttcgtgctgtgaatccagagctcttcattaaacctaacaaacctgtaatggctttcggattggtaactctttcactttgcgtggcatatattggttatctacatgcaatacaagagaataaaaaggacctctatgaagctattgatagtgaggggcacagttatatgaggcggaaaacatccaaatgggattagtagtgctggttagtgcagatggacctttattaaaggttctgaaatcttcaaatgaaagaccttgtgagtgtacagtatcatgtttcttgttctagaacatgctaatgaagagagaagatagcagttgcaaccagacaactgtcgtaaattttgtcctttcacagctgcagccattatctcattctttttccacagagtgagcgtcataatatttttctttccttacctcttataaaagtgccatgagaatggaagttgtttttgttaattattaaattctgtataataaaagtacccatgctgttaaatttgcatgatgttttaaatattttaagatgaattatgccggtgcagctgtcgtgaaagtttacttgtgttttgctacttgcaaaggaaatgttcatgttctccctggcatagaacctatatttttaaagaaagataaatagaaattttaaggcctgaagtcaatattaaaaatatgagatatgagaaactgagttggctctgacaagtagtttttatagtgtcacaaatggttcatatatttcagtttccattttagctatttttgggacagaattttattttaatggaaaagatccttccactcagctactaaaataaggattaagaatatcccagagtaattggagtttttctttaaaaaaaaaaaaaaagtatgttttactgaggtatgatgattttgactacaactaaatgttatctattttagtgtttatgttaattaatgttaattaattttgtttatgttaatttgtgttaattaatgttactgtaatgttataaacataagaccaagtgttcttatagttatttaaaaactacaactactcaatggataaggaatagataaggtctccttattgtaccttttttttcttttgaagtttatatgccagcaggcctttttgtttttttccttttcagaatgtttcttattctctgaagcatcagcattttgaagtgtcttttatggaagtggggacagaaatgggggtaaaaatgagtgtaaacaaagcctagccctacggtcagtacccactggaggtgagaagcagaatggccttggttgtcctggcacctggcccaggggcctaggacagaggtcaaggctaggcccctgtgtctggccagattctgccttatagaattcaaatctttcttacaagggttctggacccgtttcatttctagatatatacctaattctccaaatcattgtcattgggcctcagtagtaaatcttacctctgaagtcttgcttcagtcgctattaatattaccaagtaataataacagcacaggcagagtttatcataatgttatttttaatttgtcatactttattatggttttgtaaggtacatgaaaatgtaattatgtgtgatttgtaggtattaaagaacttagctaattgaatttacatgaaactaaataaaatctttactactgagccccaaatatgtatttgctatgcctgtctgtataatgtacttcatatagtttaaaatgcacttcagtgatacaaaatcccttttaaagactcttttgtttttgttttccctgtgtattttggctatcacaaaactagggttcttctgtttttaacttatgcatttaatgacacattgccatcttttagaattttttactattcaacagaataagctgatgtttggtggcagaggagttattagttgcgtgaactgtcaagagattgcagtgcaggagggcaacagaaactgtacaaggtgcagacttgagtcatgtaagatctatgtgaatgaaccaaagtaactagagtcagtcaagcacaaagctgtgaaaagtagtgtgtggaaagaatcatactgaattttaggaacaagtacctgactatgatactttttacagagtgactacaagttgtaggacagtctttgtgtgtgctgagtgtcaacagctgcctgcctatgtgttgatgttttcatcctttctttgttgaatgagggtataaccatcaaaaataaaatacctttcaaata

SEQ ID NO: 182342 - DNA, 2437 bp, Homo sapiens
  Payload ID: 15910
  Gene Symbol: SMIM8
  Gene Name: small integral membrane protein 8
  Uniprot ID: Q96KF7
  ENST ID: ENST00000392863
  CDS Start-End: 90-383
ggggcggggcgtctcgggcgaggagaggaggtgaccccgcgaaaggaggatggacagaagaaaaagataataaatcatcattgatcaagatgtcttcagcacctgagcctccaacattcaaaaaggaaccacccaaagagaaagagtttcaaagcccagggctcagaggggtgcgcacaacaaccttatttcgtgctgtgaatccagagctcttcattaaacctaacaaacctgtaatggctttcggattggtaactctttcactttgcgtggcatatattggttatctacatgcaatacaagagaataaaaaggacctctatgaagctattgatagtgaggggcacagttatatgaggcggaaaacatccaaatgggattagtagtgctggttagtgcagatggacctttattaaaggttctgaaatcttcaaatgaaagaccttgtgagtgtacagtatcatgtttcttgttctagaacatgctaatgaagagagaagatagcagttgcaaccagacaactgtcgtaaattttgtcctttcacagctgcagccattatctcattctttttccacagagtgagcgtcataatatttttctttccttacctcttataaaagtgccatgagaatggaagttgtttttgttaattattaaattctgtataataaaagtacccatgctgttaaatttgcatgatgttttaaatattttaagatgaattatgccggtgcagctgtcgtgaaagtttacttgtgttttgctacttgcaaaggaaatgttcatgttctccctggcatagaacctatatttttaaagaaagataaatagaaattttaaggcctgaagtcaatattaaaaatatgagatatgagaaactgagttggctctgacaagtagtttttatagtgtcacaaatggttcatatatttcagtttccattttagctatttttgggacagaattttattttaatggaaaagatccttccactcagctactaaaataaggattaagaatatcccagagtaattggagtttttctttaaaaaaaaaaaaaaagtatgttttactgaggtatgatgattttgactacaactaaatgttatctattttagtgtttatgttaattaatgttaattaattttgtttatgttaatttgtgttaattaatgttactgtaatgttataaacataagaccaagtgttcttatagttatttaaaaactacaactactcaatggataaggaatagataaggtctccttattgtaccttttttttcttttgaagtttatatgccagcaggcctttttgtttttttccttttcagaatgtttcttattctctgaagcatcagcattttgaagtgtcttttatggaagtggggacagaaatgggggtaaaaatgagtgtaaacaaagcctagccctacggtcagtacccactggaggtgagaagcagaatggccttggttgtcctggcacctggcccaggggcctaggacagaggtcaaggctaggcccctgtgtctggccagattctgccttatagaattcaaatctttcttacaagggttctggacccgtttcatttctagatatatacctaattctccaaatcattgtcattgggcctcagtagtaaatcttacctctgaagtcttgcttcagtcgctattaatattaccaagtaataataacagcacaggcagagtttatcataatgttatttttaatttgtcatactttattatggttttgtaaggtacatgaaaatgtaattatgtgtgatttgtaggtattaaagaacttagctaattgaatttacatgaaactaaataaaatctttactactgagccccaaatatgtatttgctatgcctgtctgtataatgtacttcatatagtttaaaatgcacttcagtgatacaaaatcccttttaaagactcttttgtttttgttttccctgtgtattttggctatcacaaaactagggttcttctgtttttaacttatgcatttaatgacacattgccatcttttagaattttttactattcaacagaataagctgatgtttggtggcagaggagttattagttgcgtgaactgtcaagagattgcagtgcaggagggcaacagaaactgtacaaggtgcagacttgagtcatgtaagatctatgtgaatgaaccaaagtaactagagtcagtcaagcacaaagctgtgaaaagtagtgtgtggaaagaatcatactgaattttaggaacaagtacctgactatgatactttttacagagtgactacaagttgtaggacagtctttgtgtgtgctgagtgtcaacagctgcctgcctatgtgttgatgttttcatcctttctttgttgaatgagggtataaccatcaaaaataaaatacctttcaaatagtccaa

SEQ ID NO: 182343 - DNA, 735 bp, Homo sapiens
  Payload ID: 15910
  Gene Symbol: SMIM8
  Gene Name: small integral membrane protein 8
  ENST ID: ENST00000608525
  CDS Start-End: 48-278
ggagaggaggtgaccccgcgaaagataataaatcatcattgatcaagatgtcttcagcacctgagcctccaacattcaaaaaggaaccacccaaagagaaagagtttcaaagcccagggctcagaggggtgcgcacaacaaccttatttcgtgctgtgaatccagagctcttcattaaacctaatgtttcttattctctgaagcatcagcattttgaagtgtcttttatggaagtggggacagaaatgggggtaaaaatgagtgtaaacaaagcctagccctacggtcagtacccactggaggtgagaagcagaatggccttggttgtcctggcacctggcccaggggcctaggacagaggtcaaggctaggcccctgtgtctggccagattctgccttatagaattcaaatctttcttacaagggttctggacccgtttcatttctagatatatacctaattctccaaatcattgtcattgggcctcagtagtaaatcttacctctgaagtcttgcttcagtcgctattaatattaccaagtaataataacagcacaggcagagtttatcataatgttatttttaatttgtcatactttattatggttttgtaaggtacatgaaaatgtaattatgtgtgatttgtaggtattaaagaacttagctaattgaatttacatgaaactaaataaaatctttactactgagccccaaatatgtatttgctatgcctg

SEQ ID NO: 182344 - DNA, 1214 bp, Homo sapiens
  Payload ID: 15910
  Gene Symbol: SMIM8
  Gene Name: small integral membrane protein 8
  ENST ID: ENST00000448282
  CDS Start-End: 52-228
gcgaggagaggaggtgaccccgcgaaagataataaatcatcattgatcaagatgtcttcagcacctgagcctccaacattcaaaaaggaaccacccaaagagaaagagtttcaaagcccagggctcagaggggtgcgcacaacaaccttatttcgtgctgtgaatccagagctcttcattaaacctgaactttccatcttacctactttttggactttaagaccataaaggacttcctctgctgaggacccaaactgaaccccaaggccagacagtattcttgatataccactgtatgctgcacagtatatttattgactgcagatggaagcacattgctaaggaatggaaagctgcaagatagaacatgcccttcacctgcgtggttgcatagaaaccagtcgtttgtccaaatcttaaagaactcaagtggaaagcatacttaaaaatgtaaaggttagaatcacaaactacagtttgaattgaaatgactgaaagattgtttcaagaatataagaattctatctaaaagaagtgaatgaaaggtatattctggctggagtgcaatggcgcgatctcagctcaccgcaacctccacctcccggcttcaggtgattctcctgcctcagcctcctgagtagctgggattacagcagtgtatgtatgaggaagtgcccacaggagtgtgcctccgggatgaagcaaagcaacagagatccaagcaggagaggctgcaacaggctggagatatgcagagtcttcatgggggagtgttcttccagctccctgccccacatccacccactgtcctcagacctcagctggggctgcaccccaaccctgagtgtgacagagagaagatgagtgttagagatcatgatcctgaagtgctgacgagaaattcaggaagcctgcaagcctagaggtcagctcagtggccaccttctgaagcccagggcaccattggaagctgcctagtttgaggcacggatggaagaggaaaacactgagaacaacatccctcttcctgaggaatgcatacaagggtgcttgggggtgggttggggatcccaaggcaggagagccaaagctggagtcagaggaagctcttcttctgaaacctgtaatttcaatgtcttttcctttcccttcaaaattgtaatttccttctgaaatcattctaaccctttagtaaagacattaatttaaagatg

SEQ ID NO: 182345 - DNA, 815 bp, Homo sapiens
  Payload ID: 15910
  Gene Symbol: SMIM8
  Gene Name: small integral membrane protein 8
  Uniprot ID: Q96KF7
  ENST ID: ENST00000608868
  CDS Start-End: 292-585
ggtaagcggcggcttcggtggtgttgagtggctgggcgccggcctggaggggccagggcggccgcaccatcacgctcccgtctctgcccttcccagctgccctgccggtctccctcccagggagggagcgtcctctcggatagcccaaatctttgcctctccgtggactccctgtacccgcaccccaagtcggtgaagctctctggccccacagagcccatttcccgtactcaccttgcgggctccagaggatggacagaagaaaaagataataaatcatcattgatcaagatgtcttcagcacctgagcctccaacattcaaaaaggaaccacccaaagagaaagagtttcaaagcccagggctcagaggggtgcgcacaacaaccttatttcgtgctgtgaatccagagctcttcattaaacctaacaaacctgtaatggctttcggattggtaactctttcactttgcgtggcatatattggttatctacatgcaatacaagagaataaaaaggacctctatgaagctattgatagtgaggggcacagttatatgaggcggaaaacatccaaatgggattagtagtgctggttagtgcagatggacctttattaaaggttctgaaatcttcaaatgaaagaccttgtgagtgtacagtatcatgtttcttgttctagaacatgctaatgaagagagaagatagcagttgcaaccagacaactgtcgtaaattttgtcctttcacagctgcagccattatctcattctttttccacagagtgagcgtcataatatttttctttccttacctct

SEQ ID NO: 182346 - DNA, 2111 bp, Homo sapiens
  Payload ID: 15910
  Gene Symbol: SMIM8
  Gene Name: small integral membrane protein 8
  Uniprot ID: Q96KF7
  ENST ID: ENST00000608353
  CDS Start-End: 333-626
gaagcggggcggggcgtctcgggcgaggagaggaggtgaccccgcgaaaggaggatggacagaagaaaaaggtaaagaacattttaccagagagaaacaaatgaagcaaataccccttagtttagaccttttttacaggcacctgtgaaatgttctactctcctctatttttttttttaagaaaagataaataacagtttcttaatcatgcatggaaaagggaacaagaagtgggtgatggaaaaatgaagaagaaataagagtggggcagattgcacagccaggggtgcctgattaattattttgcagataataaatcatcattgatcaagatgtcttcagcacctgagcctccaacattcaaaaaggaaccacccaaagagaaagagtttcaaagcccagggctcagaggggtgcgcacaacaaccttatttcgtgctgtgaatccagagctcttcattaaacctaacaaacctgtaatggctttcggattggtaactctttcactttgcgtggcatatattggttatctacatgcaatacaagagaataaaaaggacctctatgaagctattgatagtgaggggcacagttatatgaggcggaaaacatccaaatgggattagtagtgctggttagtgcagatggacctttattaaaggttctgaaatcttcaaatgaaagaccttgtgagtgtacagtatcatgtttcttgttctagaacatgctaatgaagagagaagatagcagttgcaaccagacaactgtcgtaaattttgtcctttcacagctgcagccattatctcattctttttccacagagtgagcgtcataatatttttctttccttacctcttataaaagtgccatgagaatggaagttgtttttgttaattattaaattctgtataataaaagtacccatgctgttaaatttgcatgatgttttaaatattttaagatgaattatgccggtgcagctgtcgtgaaagtttacttgtgttttgctacttgcaaaggaaatgttcatgttctccctggcatagaacctatatttttaaagaaagataaatagaaattttaaggcctgaagtcaatattaaaaatatgagatatgagaaactgagttggctctgacaagtagtttttatagtgtcacaaatggttcatatatttcagtttccattttagctatttttgggacagaattttattttaatggaaaagatccttccactcagctactaaaataaggattaagaatatcccagagtaattggagtttttctttaaaaaaaaaaaaaaagtatgttttactgaggtatgatgattttgactacaactaaatgttatctattttagtgtttatgttaattaatgttaattaattttgtttatgttaatttgtgttaattaatgttactgtaatgttataaacataagaccaagtgttcttatagttatttaaaaactacaactactcaatggataaggaatagataaggtctccttattgtaccttttttttcttttgaagtttatatgccagcaggcctttttgtttttttccttttcagaatgtttcttattctctgaagcatcagcattttgaagtgtcttttatggaagtggggacagaaatgggggtaaaaatgagtgtaaacaaagcctagccctacggtcagtacccactggaggtgagaagcagaatggccttggttgtcctggcacctggcccaggggcctaggacagaggtcaaggctaggcccctgtgtctggccagattctgccttatagaattcaaatctttcttacaagggttctggacccgtttcatttctagatatatacctaattctccaaatcattgtcattgggcctcagtagtaaatcttacctctgaagtcttgcttcagtcgctattaatattaccaagtaataataacagcacaggcagagtttatcataatgttatttttaatttgtcatactttattatggttttgtaaggtacatgaaaatgtaattatgtgtgatttgtaggtattaaagaacttagctaattgaatttacatgaaactaaataaaatctttactactgagccccaaa

SEQ ID NO: 182347 - DNA, 904 bp, Homo sapiens
  Payload ID: 15911
  Gene Symbol: SMIM9
  Gene Name: small integral membrane protein 9
  Uniprot ID: A6NGZ8
  ENST ID: ENST00000369529
  CDS Start-End: 198-497
aagactgaccagcttcttctgaagacttctgccctctaaagactaaggcctaattccactggtttctttgaattccgtggtcctaagtccattttcagacaaagtttctgtggaaagacctacggacaaagacatctctccttggcagagtgagctaggattaccagctcttcagccgcagctgaaggcgggagtccatggaaccccagaagctgctgataattggatttctgctatgctctctaacttgcctcttgttggagacagtagcttcctctcctttgcctttgtctgccttgggaatacaagaaaaaacaggatcgaaaccacgctcagggggtaatcacaggtcctggctgaacaacttcagggattacttatggcaacttatcaagagtgccttacctccagcagccattgttgcttttcttctcacctcagcactaatggggatcctctgctgcttcaccattcttgtagttgatccagtccactgaagaactagaagattcaacagggcaagtgtggtctctccagttggactccaaaagagtggggcatttgctatctgcttaaaatgaggaagtatctatcagttgaaattaaatcgtcttccaacttgaatcatcctttgccttcattttctccttcaaaagttgcaattttaaaatgtgaatatccttattactgttttggttataatagtaatacatatttattgcaaaaaaaatttgagaaatacagagaaaagagtaagtttccataattctagcaaccagaaataaacatcattaacatcttgatgtacctcccttcaatttttttctatatatgtattacaagttttccaaagtctgttctgtgaaacaatagttctgttttaataaaagtcacaaaacagtga

SEQ ID NO: 182348 - DNA, 2512 bp, Homo sapiens
  Payload ID: 15912
  Gene Symbol: SMLR1
  Gene Name: small leucine-rich protein 1
  Uniprot ID: H3BR10
  ENST ID: ENST00000541421
  CDS Start-End: 9-332
actgagacatgctgagcaaaggccggagccccagaagaaaacaagtacagactcagaggaaagctgccctggtcctgagtgtgactcccatggtccccgtggggtctgtgtggttggcaatgagctctgtgctgtcagctttcatgagggagctccctggctggttcctgttctttggggtcttcctccccgtgactttgctgctgctcctcctcatcgcctacttcaggatcaaactgattgaggttaatgaagaactgtcccagaactgtgatcgccaacataatcccaaggatggctcttccctgtaccagagaatgaaatggacgtgaagttggggactttccaataactaaagcacaatgagtttctactggtcagcaagcaatggccaacagttcagctaataaagtaggttgataaactagaaccatagcaaaatagaaagaatactaagatactcattctgaaccatactgaaaagtggcagctattatctaaggggacttctcagagactcagtataacagcagctcttgaaaagtaccaagaatggatttcctgggtatatacactggacacattgtaactttttaacttttattgtgactgtgtctgctctaaacggcatatttaaaaaataaaattctgcagcatcttactacataatcccataggaacccctattattccgattttagaggtgaagaaaccttggtagagatccaatgaatagcaaaagatgaatgccttggagagagctcagtagattccatatgcaagaatatttccacgttcttcttgcagttcagcaactcttaagtgacacagttcaggtatcatttttggacctgactttgcttctctccttttcctgattgctttcacaaatcattattgtcacaaatatgcacaaaacaagtggagtatccccacactaggtatggatcacccacaaatgtagctttcagcatgatgcgacctggaaatgttggcaatttggtaatgggaaaaggaaagggcagaatgttcacataattcctgaggaggagaatacaagtctttgcctgtaataccaaaatacagggagctatatctaactatgcggataagtcaacatttcactacagttctttttcagtgggagccccaaagagacaacataggtaattgaaaagaaacttaattctaggggtagttaaacgagattgtggttactgttgtgctccccacattcttccagttaacataaatcaaagatgttcaatgcattctaagtgtaagactggttacattccaatctttgtgcaggacattaacaggctgagtgatccactttataaaacataatgaatggggtcacctgtaagaaatgcacctgtttcagtagtggcttacagtcatactaaaggttgtgtggatgacccaaagcaaaaatataccatcagtgctggatttttactgcttcttcccctcagccccaccctaaaattcttgatacccattccgtgagtagtttccatttgcacttcttgcataatataaaacttattgctagaataaagacactcacttctgcattttactgcacttgattacaatgaaaatgtctgccggggttttcagactgaactaattcagagtaacagtgctcttgccatatggaaggaataacaatattctttcagttttgggagagatctctttttagcccctgggggaaatcagcttatgtaaaaatgctttctttaacagaaagtgtgaaaggacagatcgtattcctatctcaggcagctgccagccacatttgtggctcagctatcaaggtttgctccatcttcctccaataatgggcacttcagaaggccagttccagctctggtgggtgctggtccaccatctcagctattgtgataacacatgagctctatatagacatgttttcagcaccaagcactaccaagtactttagaacaaggcctgtttcttttctgccatccaatgagagcagagaatctccaatgaaactgactagatttatgaatgttttttatatgtagagaggggcagaaacatgttcattttcccatgaaggaacaagtcccaagggtttatcatctgcctgaaggcactgctaacgaatttgtcaaatcctttatccagcacagctttaccaagcagctgcacagtcaggcctttgcacttctcattctcataggtccagtttaagatctcattcagtcctgaactgcttcggtcctttgcattcctgctgtcttggcctccacctagaccaagtcggcagtctccctacattaccctacattcagctgcatcctatgctccaaggcctttcaccaggggccagaaatgctcccacaaccctcaatggtctcactacaacagttccgaatcttattccaaatgctatagtatctgaaacggttcaccaatagggataatgtttctccaactggagaccttcaataaaacacttcaataggtgctttaa

SEQ ID NO: 182349 - DNA, 1035 bp, Homo sapiens
  Payload ID: 15913
  Gene Symbol: SMKR1
  Gene Name: small lysine-rich protein 1
  Uniprot ID: H3BMG3
  ENST ID: ENST00000462322
  CDS Start-End: 347-544
cgaggccctgccccacgcccggtgattgtgcgcgcggccccgcccccgaggcgcacgccggcccagcgcccacagctgcggcggcctaggtgccgcgtggggcaagcaggtgcctcgcgtccaggcggctccgcggctggctgcctcccgagccggccgcgctcctcccagcgaggcgtggcggggaggcgtagtgaggctgggcccgtggcggttccctgaggagggccgagaaggggccgggggtgctaggggaacgggcgctgggggcagcggccccggtggatgctaagggcttcgggatcgggagagtccaccacgcctgcctgctcggctgagaatcgccatgccagctaaagggaaaaaaggaaaaggccagggcaagtctcatgggaagaaacagaagaaaccagaagtggacattctcagccccgcggccatgctgaacctctactacatcgcccacaacgtcgctgactgcctgcatctgcgaggcttccattggccgggtgctcccaaaggaaagaaagggagaagcaagtgacagcatttcacaacacatctctgttacagacaacaggacctggggaagagaagtcaggataacacaactgttgccagcaacatagactttactccagacgacttgagatgcaaattaagtgtgcttttctgtgatggtggaagatcaggaaatgcaccttacttcctctgttatgccagatatggttagccactttggttttttaggagctataggatgggaaaagcctgagtaattcctacacagtgtgctgaaattaatagaactttcagaaattattataattctgggtcaggattaaactttgctctcagaaggcagttctagttgcattaattgttttcttttgccaaagagcgtttgtcatttagagaagacacggcaagaaacactgggtttccttaggaacattcctctcttgggcaccatttccttttttttttttaatggaaaataataaatactttgtttctataattttcttctcagca

SEQ ID NO: 182350 - DNA, 938 bp, Homo sapiens
  Payload ID: 15914
  Gene Symbol: SMPX
  Gene Name: small muscle protein, X-linked
  Uniprot ID: Q9UHP9
  ENST ID: ENST00000379494
  CDS Start-End: 235-501
aacacttagccttaacggtttaagttcccctccagccccgagccaggagcagttctcaataccgggagaggcacagagctatttcagccacatgaaaagcatcggaattgagatcgcagctcagaggacaccgggcgccccttccaccttccaaggagctttgtattcttgcatctggctgcctgggacttcccttaggcagtaaacaaatacataaagcagggataagactgcatgaatatgtcgaaacagccagtttccaatgttagagccatccaggcaaatatcaatattccaatgggagcctttcggccaggagcaggtcaaccccccagaagaaaagaatgtactcctgaagtggaggagggtgttcctcccacctcggatgaggagaagaagccaattccaggagcgaagaaacttccaggacctgcagtcaatctatcggaaatccagaatattaaaagtgaactaaaatatgtccccaaagctgaacagtagtaggaagaaaaaaggattgatgtgaagaaataaagaggcagaagatggattcaatagctcactaaaattttatatatttgtatgatgattgtgaacctcctgaatgcctgagactctagcagaaatggcctgtttgtacatttatatctcttccttctagttggctgtatttcttactttatcttcatttttggcacctcacagaacaaattagcccataaattcaacacctggagggtgtggttttgaggagggatatgattttatggagaatgatatggcaatgtgcctaacgattttgatgaaaagtttcccaagctacttcctacagtattttggtcaatatttggaatgcgttttagttcttcaccttttaaattatgtcactaaactttgtatgagttcaaataaatatttgactaaatgtaaaatgtgaa

SEQ ID NO: 182351 - DNA, 7165 bp, Homo sapiens
  Payload ID: 15915
  Gene Symbol: SNRNP200
  Gene Name: small nuclear ribonucleoprotein 200kDa (U5)
  Uniprot ID: O75643
  ENST ID: ENST00000323853
  CDS Start-End: 79-6489
cgggagcagagatctgcggccgtttgcagcttgcggtagggaggcgtggtggtctgaagcctccgagcagccgcggccatggcggatgtaaccgcccgtagtctgcaatacgagtacaaggcgaactcgaatcttgtgctccaagctgaccgttctctcattgaccggacccgccgggatgaacccacaggagaggtgctgtcccttgttgggaagctggagggcacccgtatgggagacaaggctcaacggaccaaaccgcagatgcaggaggaaagaagagccaagcgaagaaagcgtgatgaggaccggcatgacatcaacaagatgaagggttatactctgctgtcggagggcattgatgagatggtgggcatcatctacaagcccaaaactaaagagactcgggagacctatgaggtgctactcagcttcatccaggctgctcttggggaccagccacgtgatatcctttgtggggcagctgatgaagttctagctgttctaaagaatgaaaagctgcgggacaaggaaaggcgaaaggagattgacctgctgctgggtcaaacagatgataccagataccatgtgctagtgaacctgggcaaaaagatcacagactatggtggagataaggaaatccaaaatatggatgacaacattgatgagacatacggtgtgaatgtgcagtttgagtctgatgaggaggaaggtgatgaagacgtatacggggaggttcgagaagaggcatctgatgatgacatggaaggggacgaggctgtcgtgcgctgcaccctctcggctaatctcgtagcctcaggtgaactgatgagttccaagaagaaggatttgcaccctcgggatattgatgcattttggctgcagcggcagctcagtcgtttctatgatgatgccatcgtgtcgcagaagaaggcagatgaagtattggagattttgaagacggccagtgatgatcgggaatgtgaaaatcagctggttctgctgcttggtttcaacacctttgatttcattaaagtgttgcggcagcacaggatgatgattttatactgtaccttgctggccagtgcacaaagtgaagctgaaaaggaaaggattatgggaaagatggaagctgacccagagctatccaagttcctctaccagcttcatgaaaccgagaaggaggatctgatccgagaggaaaggtcccggagagagcgagtgcgtcagtctcgaatggacacagatctggaaaccatggatctcgaccagggtggagaggcactggctccacggcaggttctggacttggaggacctggtttttacccaagggagccactttatggccaataaacgctgtcagcttcctgatggatccttccgtcgccagcgtaagggctatgaagaggtgcatgtgcctgctctgaagcccaagccctttggctcagaagaacaactgcttccagtggaaaagctgccaaagtatgcccaggctgggtttgagggcttcaaaacactgaatcggatccagagtaagctctaccgtgctgcccttgagacggatgagaatctgctgctgtgtgctcctactggtgctgggaagaccaacgtggccctgatgtgcatgctccgagagattgggaaacacataaacatggacggcaccatcaatgtggatgacttcaagattatctacattgcccccatgcgctccttggtgcaggagatggtgggcagctttggaaagcgcctggccacttatggcatcactgttgctgaactgactggggaccaccagctgtgcaaagaagagatcagtgccactcagatcatcgtctgcacccccgagaagtgggacatcatcacccgcaagggtggtgagcgcacctacacccagctggtgcggctcatcattctggatgagattcatcttctccacgatgacagaggtcctgtcttagaagctttagtggccagggccatccgaaacattgagatgacccaagaggatgtccgactcattggtctcagtgccaccctacccaactatgaagatgtagccacctttctacgtgttgaccctgccaagggtctcttttactttgacaacagcttccgtccagtgcctctggaacagacatatgtgggtatcacagagaaaaaagctatcaagcgtttccagatcatgaatgaaatcgtctatgaaaaaatcatggaacatgctggaaaaaatcaggtgctggtgtttgtccactcccggaaggagactggaaagacagccagggccatccgggacatgtgcctagaaaaggacactctgggtctgtttctgagggagggctcagcctccacagaagtcctgcgaacagaagctgagcagtgcaagaacctagagctgaaggatcttctgccttatggctttgctattcatcacgcaggcatgaccagggttgaccgaacactcgtggaggatctttttgctgataaacatattcaggttttagtttccacagcaactctagcttggggtgtgaatctccctgcacatacagtcatcatcaaaggcacccaggtgtacagtccagagaaggggcgttggacagaactgggagcactggacattctgcagatgctgggacgtgccggaagaccccagtatgacaccaagggtgaaggcatactcatcacatctcatggggagctacagtactacctgtccctcctcaatcaacaacttcctattgaaagccagatggtttcaaagcttcctgacatgctcaatgcagaaatcgtgctaggaaatgtccagaatgccaaggatgcggtgaactggctgggctatgcctacctctatatccgaatgctgcgatccccaaccctctatggcatctctcatgatgacctcaagggagatcccctgctggaccagcgccgactagatctggttcatacagctgccctgatgctggacaagaacaatctggtcaagtacgacaagaagacgggcaacttccaggtgacagaactgggccgtatagccagccactactacatcaccaatgatacagtgcagacttacaaccagctgctgaagcccaccctgagtgagattgagcttttcagggtcttctcattgtcctctgagttcaagaacatcacagtgagagaggaggagaagctggagctgcagaagttgctggagagggtgcctatccctgtaaaggagagcattgaggaacccagtgctaagatcaacgttcttctgcaagccttcatctcacagctgaaattggagggctttgcactgatggctgacatggtgtatgtcacacagtcggctggccggttgatgcgagcgatatttgaaattgtcctgaaccgaggttgggcacagcttacagacaagaccctgaacctctgcaagatgatcgacaaacgcatgtggcagtccatgtgtcctctgcgccagttccggaaactccctgaggaagtagtgaagaagattgagaagaagaatttcccctttgagcgtctgtacgacctgaatcataatgagattggggagcttatccgcatgccaaagatggggaagaccatccacaaatatgtccatctgtttcccaagttggagttgtcagtgcacctgcagcctatcacacgctccaccctgaaggtggagctgaccatcacgccagacttccagtgggatgaaaaggtgcatggttcatccgaggctttttggattctggtggaggatgtggacagcgaggtgattctgcaccatgagtattttctcctcaaggccaagtacgcccaggacgagcacctcattacattcttcgtgcctgtctttgaaccgctgccccctcagtacttcatccgagtggtgtctgaccgctggctctcttgtgagacccagctgcctgtctccttccggcacctgatcttgccggagaagtacccccctccaaccgaacttttggacctgcagcccttgcccgtgtctgctctgagaaacagtgcctttgagagtctttaccaagataaatttcctttcttcaatcccatccagacccaggtgtttaacactgtatacaacagtgacgacaacgtgtttgtgggggcccccacgggcagcgggaagactatttgtgcagagtttgccatcctgcgaatgctgctgcagagctcggaggggcgctgtgtgtacatcacccccatggaggccctggcagagcaggtatacatggactggtacgagaagttccaggacaggctcaacaagaaggtggtactcctgacaggcgagaccagcacagacctgaagctgctgggcaaagggaacattatcatcagcacccctgagaagtgggacatactttcccggcgatggaagcagcgcaagaacgtgcagaacatcaacctcttcgtggtggatgaggtccaccttatcgggggcgagaatgggcctgtcttagaagtgatctgctcccgaatgcgctacatctcctcccagattgagcggcccattcgcattgtggcactcagctcttcgctctccaatgccaaggatgtggcccactggctgggctgcagtgccacctccaccttcaacttccatcccaatgtgcgtcccgtccccttggagctgcacatccagggcttcaacatcagccatacacaaacccgcctgctctccatggccaagcctgtgtaccatgctatcaccaagcactcgcccaagaagcctgtcattgtctttgtgccgtctcgcaagcagacccgcctcactgccattgacatcctcaccacctgtgcagcagacatccaacggcagaggttcttgcactgcaccgagaaggatctgattccgtacctggagaagctaagtgacagcacgctcaaggaaacgctgctaaatggggtgggctacctgcatgaggggctcagccccatggagcgacgcctggtggagcagctcttcagctcaggggctatccaggtggtggtggcttctcggagtctctgctggggcatgaacgtggctgcccacctggtaatcatcatggatacccagtactacaatggcaagatccacgcctatgtggattaccccatctatgacgtgcttcagatggtgggccacgccaaccgccctttgcaggacgatgaggggcgctgtgtcatcatgtgtcagggctccaagaaggatttcttcaagaagttcttatatgagccattgccagtagaatctcacctggaccactgtatgcatgaccacttcaatgctgagatcgtcaccaagaccattgagaacaagcaggatgctgtggactacctcacctggacctttctgtaccgccgcatgacacagaaccccaattactacaacctgcagggcatctcccatcgtcacttgtcggaccacttgtcagagctggtggagcagaccctgagtgacctggagcagtccaagtgcatcagcatcgaggacgagatggacgtggcgcctctgaacctaggcatgatcgccgcctactattacatcaactacaccaccattgagctcttcagcatgtccctcaatgccaagaccaaggtgcgagggcttatcgagatcatctccaatgcagcagagtatgagaacattcccatccggcaccatgaagacaatctcctgaggcagttggctcagaaggtcccccacaagctgaataaccctaagttcaatgatccgcacgtcaagaccaacctgctcctgcaggctcacttgtctcgcatgcagctgagtgctgagttgcagtcagatacggaggaaatccttagtaaggcaatccggctcatccaggcctgcgtggatgtcctttccagcaatgggtggctcagccctgctctggcagctatggaactggcccagatggtcacccaagccatgtggtccaaggactcatacctgaagcagctgccacacttcacctctgagcatatcaaacgttgcacagacaagggagtggagagtgttttcgacatcatggagatggaggatgaagaacggaacgcgttgcttcagctgactgacagccagattgcagatgtggctcgcttttgtaaccgctaccctaatatcgaactatcttatgaggtggtagataaggacagcatccgcagtggcgggccagttgtggtgctggtgcagctggagcgagaggaggaagtcacaggccctgtcattgcgcctctcttcccgcagaaacgtgaagagggctggtgggtggtgattggagatgccaagtccaatagcctcatctccatcaagaggctgaccttgcagcagaaggccaaggtgaagttggactttgtggccccagccactggtgcccacaactacactctgtacttcatgagtgacgcttacatgggatgtgaccaggagtacaaattcagcgtggatgtgaaagaagctgagacagacagtgattcagattgagtcctgaggcatttacttttgggtaaaggagagttgagcctgaattaggaatgtgtacattgtaggaatcctggttgtggggaccaggtctgtgggcctcaggtctggccagccagggctggtgctgtccccgcctacctccacttcctttcccttgctcactctggatccagtgacagcaggtgtcatgggtcaagcataaatcatatatagcattttcaggcatgttcctggtagttcttttgagtctgacattctaataaaataatttgtagaaaccatttgtctttgtagtgattccaaattaaaagttttctttctccaacctgagggcacggccaaaaagatctggttattttttagccaggaacgtgcttgttaatgagtatgtctggaggacagacctgctcattaggtgtgctgtcccctgtagcctcgtgagtcagcccagaggagggtacatgcgactgtggcctggcctcagtggtacccacacatcagcactaccacaagaaccaacactgagcctcggaagctagatcacaggttaggggtttctctagatgggggttctgaaatttgcagtgtctgctcctgggaggcagcaccagaaagggcactgaaatgtactagctggatgtgacccagtcttaataaacaggttttctaatccaga

SEQ ID NO: 182352 - DNA, 2637 bp, Homo sapiens
  Payload ID: 15915
  Gene Symbol: SNRNP200
  Gene Name: small nuclear ribonucleoprotein 200kDa (U5)
  ENST ID: ENST00000429650
  CDS Start-End: 389-2176
ttgatacttacactgcttctttctgttggtttccagtgtttaacactgtatacaacagtgacgacaacgtgtttgtgggggcccccacgggcagcgggaagactatttgtgcagagtttgccatcctgcgaatgctgctgcagagctcggaggggcgctgtgtgtacatcacccccatggaggccctggcagagcaggcgagaccagcacagacctgaagctgctgggcaaagggaacattatcatcagcacccctgagaagtgggacatactttcccggcgatggaagcagcgcaagaacgtgcagaacatcaacctcttcgtggtggatgaggtccaccttatcgggggcgagaatgggcctgtcttagaagtgatctgctcccgaatgcgctacatctcctcccagattgagcggcccattcgcattgtggcactcagctcttcgctctccaatgccaaggatgtggcccactggctgggctgcagtgccacctccaccttcaacttccatcccaatgtgcgtcccgtccccttggagctgcacatccagggcttcaacatcagccatacacaaacccgcctgctctccatggccaagcctgtgtaccatgctatcaccaagcactcgcccaagaagcctgtcattgtctttgtgccgtctcgcaagcagacccgcctcactgccattgacatcctcaccacctgtgcagcagacatccaacggcagaggttcttgcactgcaccgagaaggatctgattccgtacctggagaagctaagtgacagcacgctcaaggaaacgctgctaaatggggtgggctacctgcatgaggggctcagccccatggagcgacgcctggtggagcagctcttcagctcaggggctatccaggtggtggtggcttctcggagtctctgctggggcatgaacgtggctgcccacctggtaatcatcatggatacccagtactacaatggcaagatccacgcctatgtggattaccccatctatgacgtgcttcagatggtgggccacgccaaccgccctttgcaggacgatgaggggcgctgtgtcatcatgtgtcagggctccaagaaggatttcttcaagaagttcttatatgagccattgccagtagaatctcacctggaccactgtatgcatgaccacttcaatgctgagatcgtcaccaagaccattgagaacaagcaggatgctgtggactacctcacctggacctttctgtaccgccgcatgacacagaaccccaattactacaacctgcagggcatctcccatcgtcacttgtcggaccacttgtcagagctggtggagcagaccctgagtgacctggagcagtccaagtgcatcagcatcgaggacgagatggacgtggcgcctctgaacctaggcatgatcgccgcctactattacatcaactacaccaccattgagctcttcagcatgtccctcaatgccaagaccaaggtgcgagggcttatcgagatcatctccaatgcagcagagtatgagaacattcccatccggcaccatgaagacaatctcctgaggcagttggctcagaaggtcccccacaagctgaataaccctaagttcaatgatccgcacgtcaagaccaacctgctcctgcaggctcacttgtctcgcatgcagctgagtgctgagttgcagtcagatacggaggaaatccttagtaaggcaatccggctcatccaggcctgcgtggatgtcctttccagcaatgggtggctcagccctgctctggcagctatggaactggcccagatggtcacccaagccatgtggtccaaggactcatacctgaagcagctgccacacttcacctctgagcatatcaaacgttgcacagacaagggagtggagagtgttttcgacatcatggagatggaggatgaagaacggaacgcgttgcttcagctgactgacagccagattgcagatgtggctcgcttttgtaaccgctaccctaatatcgaactatcttatgaggtggtagataaggacagcatccgcagtggcgggccagttgtggtgctggtgcagctggagcgagaggaggaagtcacaggccctgtcattgcgcctctcttcccgcagtttagggccgggcgcagtggctcacgcctgtaatcccagcactttgggaggccaaggcgggcggatcacgaggtcaggagttcgagaccagcctggccaacatagtgaaaccccgtctctactaaaaatacaaaaattagctgtgcgtggtggtgggcacctgtagtcccagctactcaggaggttgagtcaggagaatggtgtgaacccaggaggcggaggctgcagcgagccgagattgccccactgcacaccagcccagaaacgtgaagagggctggtgggtggtgattggagatgccaagtccaatagcctcatctccatcaagaggctgaccttgcagcagaaggccaaggtgaagttggactttgtggccccagccactggtgcccacaactacactctgtacttcatgagtgacgcttacatgggatgtgaccaggagtacaaattcagcgtggatgtgaaagaagctgagacagacagtgattcag

SEQ ID NO: 182353 - DNA, 1905 bp, Homo sapiens
  Payload ID: 15916
  Gene Symbol: SNRNP25
  Gene Name: small nuclear ribonucleoprotein 25kDa (U11/U12)
  ENST ID: ENST00000293861
  CDS Start-End: 1008-1379
gcacgatgagagatcgtccaggaggcggtgttgatgcggcaaagggcaacaggaagggcattaggacttgaaatcggagacgcacgcaggggagggagtcagtgtcggaacctggtaggccctgggagaactccggcttttcgtctgcgtgagctggagaagagccgaaggtttctgcgcacagcacggacctgcgtgcctcagctttaaggaaatcaccgtggccgccgctgtgaacgcagagaagggcgcgagcgtgggagcaggaacccaaggcggtgggaaacggtggggctttctgagtgtattggaaagtagagcccacagatctgctgcagaccagaaaggggcgcgagaaagagcggacagaggcagacgccggggctggcggcgatggagcagcagtcggaggacgcggaaggcctgcgagagtcgcccgcgcccagcgccggccttcgggtcccaccttgcgggtgatgttgtgcacgtaggggcacgtgttgcaggcgaagcggtggcagcgttgtccctcctccacgatcagcccgttcccgcagccggggcagaacagcagcatggtctcgaactccgcaggctccaactcccggcagctcccactgccgctcagcgccgatgcgccgcccgcctcgagctcacattggtcctggcagccttcccgccacaccaaccaaccaatagacagggcgattctgcgctcccggccctgctgcaggctgtctcgcacttgtcattggtcactgcagccgccccaccccccccggcgcgccagtggctgggcggcctcgctggggcgggccgcagttcctgcgcgtgcgcgcttggcctccctagtgcgggctggcagtgcgggcagagcccggctgagaggggcggccctggaggagacggaggccgcgggtgggcccgaggcgcaagaggaagatgaggacgaagaagaggcgctgccgcactccgaggccatggacgtgttccaggagggtctggctatggtggtgcaggacccgctgctctgcgatctgccgatccaggttactctggaagaagtcaactcccaaatagccctagaatacggccaggcaatgacggtccgagtgtgcaagatggatggagaagtaatgcccgtggttgtagtgcagagtgccacagtcctggacctgaagaaggccatccagagatacgtgcagctcaagcaggagcgtgaagggggcattcagcacatcagctggtcctacgtgtggaggacgtaccatctgacctctgcaggagagaaactcacggaagacagaaagaagctccgagactacggcatccggaatcgagacgaggtttccttcatcaaaaagctgaggcaaaagtgagcctccagacaggacaaccctcttcatcactggtggctgagctttttcccagcaggaatgggtcctcgaatcatcgtgcctctttcacagaaaggacgttgtggtggcctcaccccaggcatgcccaacagtaactgtcagcataaacctgggggccctcaggactaggacagggtgagccagtgctccctcctttcatgtacttggcctgagactgacctctccctaggtccaaatgccctagtcacatggcagacccacggcctggcccactgtataaaataaacctgtttgcttcttagtttgaaaagtagaaagccacagtaacctgggtagcaaagactgagattgccccatcacagaggtgagttaaggggagagaattggtacaggcgagtcctatagtccaagatggcgccacaccaccaaagccttgaggccacaccactccccaaaccacacaactgtgttaccatgatctccacagcaaggaggaaataaaagcagagcggctttagggtttgca

SEQ ID NO: 182354 - DNA, 1085 bp, Homo sapiens
  Payload ID: 15916
  Gene Symbol: SNRNP25
  Gene Name: small nuclear ribonucleoprotein 25kDa (U11/U12)
  Uniprot ID: Q9BV90
  ENST ID: ENST00000383018
  CDS Start-End: 162-560
cagttcctgcgcgtgcgcgcttggcctccctagtgcgggctggcagtgcgggcagagcccggctgagaggggcggccctggaggagacggaggccgcgggtgggcccgaggcgcaagaggaagatgaggacgaagaagaggcgctgccgcactccgaggccatggacgtgttccaggagggtctggctatggtggtgcaggacccgctgctctgcgatctgccgatccaggttactctggaagaagtcaactcccaaatagccctagaatacggccaggcaatgacggtccgagtgtgcaagatggatggagaagtaatgcccgtggttgtagtgcagagtgccacagtcctggacctgaagaaggccatccagagatacgtgcagctcaagcaggagcgtgaagggggcattcagcacatcagctggtcctacgtgtggaggacgtaccatctgacctctgcaggagagaaactcacggaagacagaaagaagctccgagactacggcatccggaatcgagacgaggtttccttcatcaaaaagctgaggcaaaagtgagcctccagacaggacaaccctcttcatcactggtggctgagctttttcccagcaggaatgggtcctcgaatcatcgtgcctctttcacagaaaggacgttgtggtggcctcaccccaggcatgcccaacagtaactgtcagcataaacctgggggccctcaggactaggacagggtgagccagtgctccctcctttcatgtacttggcctgagactgacctctccctaggtccaaatgccctagtcacatggcagacccacggcctggcccactgtataaaataaacctgtttgcttcttagtttgaaaagtagaaagccacagtaacctgggtagcaaagactgagattgccccatcacagaggtgagttaaggggagagaattggtacaggcgagtcctatagtccaagatggcgccacaccaccaaagccttgaggccacaccactccccaaaccacacaactgtgttaccatgatctccacagcaaggaggaaataaaagcagagcggctttagggtttgc

SEQ ID NO: 182355 - DNA, 831 bp, Homo sapiens
  Payload ID: 15916
  Gene Symbol: SNRNP25
  Gene Name: small nuclear ribonucleoprotein 25kDa (U11/U12)
  ENST ID: ENST00000397876
  CDS Start-End: 131-409
ccggctgagaggggcggccctggaggagacggaggccgcgggtgggcccgaggcgcaagaggaagatgaggacgaagaagaggcgctgccgcactccgaggccatggacgtgttccaggagggtctggctatggtggtgcaggacccgctgctctgcgatctgccgatccaggttactctggaagaagtcaactcccaaatagccctagaatacggccaggcaatgacggtccgagtgtgcaagatggatggagaagtaatgcccgtggttgtagtgcagagtgccacagtcctggacctgaagaaggccatccagagatacgtgcagctcaagcaggagcgtgaagggggcattcagcacatcagctgcaaggtttgtttggccaagccgccccagacagccctctgagaacagagcctccttgtagctgcctcagacccaatctgcacattgtacagaacagcccaggtcctacgtgtggaggacgtaccatctgacctctgcaggagagaaactcacggaagacagaaagaagctccgagactacggcatccggaatcgagacgaggtttccttcatcaaaaagctgaggcaaaagtgagcctccagacaggacaaccctcttcatcactggtggctgagctttttcccagcaggaatgggtcctcgaatcatcgtgcctctttcacagaaaggacgttgtggtggcctcaccccaggcatgcccaacagtaactgtcagcataaacctgggggccctcaggactaggacagggtgagccagtgctccctcctttcatgtacttggcctgagactgacctctccctag

SEQ ID NO: 182356 - DNA, 408 bp, Homo sapiens
  Payload ID: 15916
  Gene Symbol: SNRNP25
  Gene Name: small nuclear ribonucleoprotein 25kDa (U11/U12)
  ENST ID: ENST00000417493
  CDS Start-End: 119-408
ggcggccctggaggagacggaggccgcgggtgggcccgaggcgcaagaggaagatgaggacgaagaagaggcgctgccgcactccgaggccatggacgtgttccaggagggtctggctatggtggtgcaggacccgctgctctgcgatctgccgatccaggttactctggaagaagtcaactcccaaatagccctagaatacggccaggcaatgacggtccgagtgtgcaagatggatggagaaagtgccacagtcctggacctgaagaaggccatccagagatacgtgcagctcaagcaggagcgtgaagggggcattcagcacatcagctggtcctacgtgtggaggacgtaccatctgacctctgcaggagagaaactcacggaagacagaaagaagctccgaga

SEQ ID NO: 182357 - DNA, 1802 bp, Homo sapiens
  Payload ID: 15917
  Gene Symbol: SNRNP27
  Gene Name: small nuclear ribonucleoprotein 27kDa (U4/U6.U5)
  Uniprot ID: Q8WVK2
  ENST ID: ENST00000244227
  CDS Start-End: 426-893
gggcctttagttttccttccaagagcccataggaggttttgggtgccttctcaatgctggcatgagaaaatataaagcagatggacagtgaactttggtatattcactccttatgaatgttatgtggaaaagtggaagaacataagctgtttgtctatgctatgtttacaattggtttgctctattttgtgcatgtggacaaaaatgggggaaaaatgaaagctgtgttaggataatgggtatacggctgaattttccaggaatttctataataacaccaaatcgcatgttttaatgcccaccgtgaacaaagaagaccggaaccctcgcaactcgttttgacgttttctggtcggcggtaaaagctcggttcccggccctcccggaagttgttgcacagttgtttccgggaagcgggactccaaatgggtcgcagtcgcagccgctctccacggagggaacgtaggcgttcccggtccacatcccgggagagagaacgcaggcgccgagaaaggtccaggtctcgggagagagatcggagaaggagccgctcgcgatccccgcaccgaagacgctcccgatctccaagacgacatagatccacatctccttccccttctcgactgaaagaaagaagagatgaggaaaagaaagaaacaaaagaaacaaagagcaaagaacggcagattactgaggaagacttagagggcaaaacagaggaagaaatagaaatgatgaagttaatgggatttgcctcctttgactccacaaaaggtaagaaggtggatggctctgtaaatgcctatgccataaatgtctctcagaagaggaagtacaggcagtacatgaatcgaaaaggtggattcaacagacctttggatttcattgcatgagaattgaagtgttgaaggatgattttttttcccctcatcttggtcagagagtggattttgtattttgtatttaacttgcattcaaaaaacaggatctcagttctcctttcttgtaaagtaagaaaatcttatttatgatatatgcagttaacttaccttgcctcaacagaagaaaggttaaatattacatttttttcttttaggaaatatcatttgtggcaggcgtcaaccccattttatttgtccttattcctgtggaagcagtatatgttttcttcctgaatgctcattaggacttcttaaaaaacatgaaagtaatttggaagtaagtttatccaataaagcagtatttctacccttttagatttgataaatatttttattactaaagaatctccccagacattttcttttttttttcacacatagatttaagtatcttgattgttagtagtctaaaaatgggaagaatgaaaaagcataactagatttttctatcttctgtggtcgcccgcccccccccaaaaaaataccatttatggttctctccgcaagtataaaagcattacatgcaaaaaaaagatctcagagaaaacaaaagtaaaagaaaagcagaaaatcacctgttatctactcccagaaataatcaatttcaacattttggtatatgtttttccaggcttctttgggttgatcccacctatgagatcagaatatgtatgcagttctttctttaacccttttttctcctatgtactgtgaacatttaaaaagtacttttaaatattctttggaaacttagcttttagtaactacttggttgtatcataatttattaactaatgttttattggtaaacattggcttgcctcccatgacttgccattataattaaaactgtgactacta

SEQ ID NO: 182358 - DNA, 1339 bp, Homo sapiens
  Payload ID: 15917
  Gene Symbol: SNRNP27
  Gene Name: small nuclear ribonucleoprotein 27kDa (U4/U6.U5)
  ENST ID: ENST00000409116
  CDS Start-End: 27-503
gttgtttccgggaagcgggactccaaatgggtcgcagtcgcagccgctctccacggagggaacgtaggcgttcccggtccacatcccgggagagagaacgcaggcgccgagaaaggtccaggtctcgggagagagatcggagaaggagccgctcgcgatccccgcaccgaagacgctcccgatctccaagacgacatagatccacatctccttccccttctcgactgaaagaaagaagagatgaggaaaagaaagaaacaaaagaaacaaagagcaaagaacggcagattactgaggaagacttagagggcaaaacagaggaagaaatagaaatgatgaagttaatgggatttgcctcctttgactccacaaaagcagtacatgaatcgaaaaggtggattcaacagacctttggatttcattgcatgagaattgaagtgttgaaggatgattttttttcccctcatcttggtcagagagtggattttgtattttgtatttaacttgcattcaaaaaacaggatctcagttctcctttcttgtaaagtaagaaaatcttatttatgatatatgcagttaacttaccttgcctcaacagaagaaaggttaaatattacatttttttcttttaggaaatatcatttgtggcaggcgtcaaccccattttatttgtccttattcctgtggaagcagtatatgttttcttcctgaatgctcattaggacttcttaaaaaacatgaaagtaatttggaagtaagtttatccaataaagcagtatttctacccttttagatttgataaatatttttattactaaagaatctccccagacattttcttttttttttcacacatagatttaagtatcttgattgttagtagtctaaaaatgggaagaatgaaaaagcataactagatttttctatcttctgtggtcgcccgcccccccccaaaaaaataccatttatggttctctccgcaagtataaaagcattacatgcaaaaaaaagatctcagagaaaacaaaagtaaaagaaaagcagaaaatcacctgttatctactcccagaaataatcaatttcaacattttggtatatgtttttccaggcttctttgggttgatcccacctatgagatcagaatatgtatgcagttctttctttaacccttttttctcctatgtactgtgaacatttaaaaagtacttttaaatattctttggaaacttagcttttagtaactacttggttgtatcataatttattaactaatgttttattggtaaacattggcttgcctcccatgacttgccattataattaaaactgtgactactat

SEQ ID NO: 182359 - DNA, 766 bp, Homo sapiens
  Payload ID: 15917
  Gene Symbol: SNRNP27
  Gene Name: small nuclear ribonucleoprotein 27kDa (U4/U6.U5)
  Uniprot ID: Q8WVK2
  ENST ID: ENST00000450162
  CDS Start-End: 22-489
ttccgggaagcgggactccaaatgggtcgcagtcgcagccgctctccacggagggaacgtaggcgttcccggtccacatcccgggagagagaacgcaggcgccgagaaaggtccaggtctcgggagagagatcggagaaggagccgctcgcgatccccgcaccgaagacgctcccgatctccaagacgacatagatccacatctccttccccttctcgactgaaagaaagaagagatgaggaaaagaaagaaacaaaagaaacaaagagcaaagaacggcagattactgaggaagacttagagggcaaaacagaggaagaaatagaaatgatgaagttaatgggatttgcctcctttgactccacaaaaggtaagaaggtggatggctctgtaaatgcctatgccataaatgtctctcagaagaggaagtacaggcagtacatgaatcgaaaaggtggattcaacagacctttggatttcattgcatgagaattgaagtgttgaaggatgattttttttcccctcatcttggtcagagagtggattttgtattttgtatttaacttgcattcaaaaaacaggatctcagttctcctttcttgtaaagaaatatcatttgtggcaggcgtcaaccccattttatttgtccttattcctgtggaagcagtatatgttttcttcctgaatgctcattaggacttcttaaaaaacatgaaagtaatttggaagtaagtttatccaataaagcagtatttctaccctttta

SEQ ID NO: 182360 - DNA, 604 bp, Homo sapiens
  Payload ID: 15917
  Gene Symbol: SNRNP27
  Gene Name: small nuclear ribonucleoprotein 27kDa (U4/U6.U5)
  ENST ID: ENST00000487029
  CDS Start-End: 1-55
gcagtacatgaatcgaaaaggtggattcaacagacctttggatttcattgcatgagaattgaagtgttgaaggatgattttttttcccctcatcttggtcagagagtggattttgtattttgtatttaacttgcattcaaaaaacaggatctcagttctcctttcttgtaaagaaatatcatttgtggcaggcgtcaaccccattttatttgtccttattcctgtggaagcagtatatgttttcttcctgaatgctcattaggacttcttaaaaaacatgaaagtaatttggaaggtccgtacttagacgtggcattgctgagtgagattaaaagggccatgtatacatgttttaagacatttggtatctctggctaaaaggtaacagccaactctatccagtaaagtatgagcattcttgtttcagatacatgtacaaatattaagtgtaaaatttgttttaaagtttcctacctgatgggtaaaataatggtactatttggttttgtatttttgtttcatttctagggaggatgaatattttttaaatgtattagccatatttcttttgtaacatgctaattttaaatcttggatctattaa

SEQ ID NO: 182361 - DNA, 942 bp, Homo sapiens
  Payload ID: 15918
  Gene Symbol: SNRNP35
  Gene Name: small nuclear ribonucleoprotein 35kDa (U11/U12)
  Uniprot ID: Q16560
  ENST ID: ENST00000350887
  CDS Start-End: 93-833
tgctgggattacaggcgtgagccaccgcgtctggcctcagccaaggtttttaagtaacatatttcagcattggctctacagcgttgcagaacatgaacgattggatgcccatcgccaaggagtatgatccactcaaagcgggcagcattgatggcaccgatgaagacccacacgaccgcgcggtctggagggcaatgctggcacgatatgtccccaacaaaggtgtcataggagatcccctcctcaccctgtttgtggccagactaaacttgcagaccaaggaggacaaattaaaggaagtcttttcccgctatggtgacatccggcggcttcggctggtcagggacttggtcacaggtttttcaaagggctacgccttcatcgaatacaaggaggagcgtgccgtgatcaaagcttaccgagatgctgatggcctggttattgaccagcatgagatatttgtggactacgagctggaaaggactctcaaagggtggatccctcggcgacttggaggcggtcttgggggaaaaaaggagtctgggcaactgagatttgggggacgggaccggccttttcgaaaacctattaacttgccagttgttaaaaacgacctctatagagagggaaaacgggaaaggcgggagcgatctcgatcccgagaaagacactgggactcgaggacaagggatcgagaccatgacaggggccgggagaagagatggcaagaaagagagccgaccagggtgtggcccgacaatgactgggagagagagagggacttcagagatgacaggatcaaggggagggagaagaaggaaagaggcaagtagaggcccaacagcagaaccccaaagtgaagttacagtggaaatgagtggagggggattgtctttcaacgcagcgtgagtctaatggttgaataaaacttactgatgatca

SEQ ID NO: 182362 - DNA, 1140 bp, Homo sapiens
  Payload ID: 15918
  Gene Symbol: SNRNP35
  Gene Name: small nuclear ribonucleoprotein 35kDa (U11/U12)
  Uniprot ID: Q16560
  ENST ID: ENST00000412157
  CDS Start-End: 367-1122
cacgcctgtaatcccagcactttgggaggctgaggcaggcgggtcatctgacatcaggagtttgagaccagcttggccaacatggtgaaatcctgtctgtactaaaaatgcaaaaattagctgggcgtggtggtgtgtgtctgtaatcccagctactcgggaggctgaggcaggagaatcacttgaacctgggaggcagaggttgcagtgagccgagattggccattgcactccagcctgggtgacagagtgagactttgtctcgagtaaaaaaagagaatgtaaaaatcgaaagagattgttgtaggaaatctcaacctaatgctgccggggaggaagtgcacctagaaagattaatgagaaacaatgaaaccagctaacatgaacgattggatgcccatcgccaaggagtatgatccactcaaagcgggcagcattgatggcaccgatgaagacccacacgaccgcgcggtctggagggcaatgctggcacgatatgtccccaacaaaggtgtcataggagatcccctcctcaccctgtttgtggccagactaaacttgcagaccaaggaggacaaattaaaggaagtcttttcccgctatggtgacatccggcggcttcggctggtcagggacttggtcacaggtttttcaaagggctacgccttcatcgaatacaaggaggagcgtgccgtgatcaaagcttaccgagatgctgatggcctggttattgaccagcatgagatatttgtggactacgagctggaaaggactctcaaagggtggatccctcggcgacttggaggcggtcttgggggaaaaaaggagtctgggcaactgagatttgggggacgggaccggccttttcgaaaacctattaacttgccagttgttaaaaacgacctctatagagagggaaaacgggaaaggcgggagcgatctcgatcccgagaaagacactgggactcgaggacaagggatcgagaccatgacaggggccgggagaagagatggcaagaaagagagccgaccagggtgtggcccgacaatgactgggagagagagagggacttcagagatgacaggatcaaggggagggagaagaaggaaagaggcaagtagaggcccaacagcagaacc

SEQ ID NO: 182363 - DNA, 1975 bp, Homo sapiens
  Payload ID: 15918
  Gene Symbol: SNRNP35
  Gene Name: small nuclear ribonucleoprotein 35kDa (U11/U12)
  Uniprot ID: Q16560
  ENST ID: ENST00000526639
  CDS Start-End: 580-1320
agcactttgggaggccgaggcgggcggatcacttgaggtcagaagttcgagaccagcctggccaacatggcaaaaccctgtctctactaaaaatacaaaaaatagccgggcgtggtggcgggcgccagtaatcccagctacgcgggaggctgaggcaggaaaatcacttgaacccgggaggcggaggttgcagtgagccgagttcgcaccactgcactccagcctgggcgacagagggagtctccgtctcaagaaaaaataataaataagaataaataaataataaagtaaaatgtcccaggtaactgcatattcgatagtctttctttcaacttagttgttgaattagcaatttttctcttaaaaaaatttttttttagcttattgtcttcggagatgataacaccctcgttgcgtgggagtaaaattttaaaggtaaaacaaacaggaaacgagcgtcggcggcgaatctgctgctaccaatgtaaaggtcaggccgaggccggcgcggagaatctgctgtcgcctgcagctgctcgcctgtctccgtcggaagggagcccaagctttgcagagaacatgaacgattggatgcccatcgccaaggagtatgatccactcaaagcgggcagcattgatggcaccgatgaagacccacacgaccgcgcggtctggagggcaatgctggcacgatatgtccccaacaaaggtgtcataggagatcccctcctcaccctgtttgtggccagactaaacttgcagaccaaggaggacaaattaaaggaagtcttttcccgctatggtgacatccggcggcttcggctggtcagggacttggtcacaggtttttcaaagggctacgccttcatcgaatacaaggaggagcgtgccgtgatcaaagcttaccgagatgctgatggcctggttattgaccagcatgagatatttgtggactacgagctggaaaggactctcaaagggtggatccctcggcgacttggaggcggtcttgggggaaaaaaggagtctgggcaactgagatttgggggacgggaccggccttttcgaaaacctattaacttgccagttgttaaaaacgacctctatagagagggaaaacgggaaaggcgggagcgatctcgatcccgagaaagacactgggactcgaggacaagggatcgagaccatgacaggggccgggagaagagatggcaagaaagagagccgaccagggtgtggcccgacaatgactgggagagagagagggacttcagagatgacaggatcaaggggagggagaagaaggaaagaggcaagtagaggcccaacagcagaaccccaaagtgaagttacagtggaaatgagtggagggggattgtctttcaacgcagcgtgagtctaatggttgaataaaacttactgatgatcatggggtttggaatagttttctttccaatctggaacttcggttcaagctgataggaatttatcatcttcctcacatagttctaaggacatgttatttaacaggatcaagaagcaattttgtagttactggcatctgtacagaagggcattttcttttcttttcttttttttttttttgagacagagtctcactctgttgccagggctggagtgcagtggtaaaatcttggctcactgtaacctctgcctcctgggttcaagtgattctcctgcctcagcctccccagtagttgggattacaggcatgtgccaccatgcccgactaatttttgtatttttagtggagatggggtttcaccatgttggtcaggctgttttcgaactcctgacctcagatgatccacctgccttggcctcccaaagtgctgggattacaggtgtgagccactactcctggcctggtctccaactcttgacctcaaatgagccacctgccttagcctcccaaagtgctgggattacaggcataagccactgcgcccagcca

SEQ ID NO: 182364 - DNA, 1597 bp, Homo sapiens
  Payload ID: 15919
  Gene Symbol: SNRNP40
  Gene Name: small nuclear ribonucleoprotein 40kDa (U5)
  Uniprot ID: Q96DI7
  ENST ID: ENST00000263694
  CDS Start-End: 20-1093
gaagagaccggttgccgccatgatagaacagcagaagcgtaagggcccagagttgccgctggttccagtcaagcggcagcggcatgagttgctgttgggagcggggtctggcccaggagccgggcagcagcaggcgacgccgggagccttgctgcaagcgggacctccaagatgttcctcccttcaagccccaatcatgctgctctctggacatgaaggggaagtctactgctgcaagttccaccccaacggatccaccttagcatctgcaggatttgaccgactgatattactgtggaatgtctatggtgactgtgataactatgccacactgaagggacacagtggagcagtgatggaattgcattacaacacagatggcagtatgcttttctcagcatccacagataaaaccgtggctgtgtgggatagtgaaacaggtgagagggttaaaaggctaaagggacatacttcctttgtgaattcctgttatccagccaggagaggccctcagcttgtctgcactggcagtgacgatggcacagttaagctttgggacatccggaagaaagcagccatccagacatttcagaacacgtaccaggtgttagctgtgaccttcaatgacacaagtgatcagattatttctggtggaatagacaatgatatcaaggtctgggacctgcgccagaacaagctaacctacaccatgagaggccatgcagattcagtgactggcctgagtttaagttctgaaggctcttatcttttgtccaatgcaatggacaatacagttcgtgtctgggatgtccggccatttgcccccaaagagagatgtgtaaagatatttcaaggaaatgtgcacaactttgaaaagaaccttctgagatgttcttggtcacctgatggaagcaaaatagcagctggctcagccgacaggtttgtttatgtgtgggataccacaagcaggagaatattgtataagctgcccggccatgctggctccatcaatgaagtggctttccaccctgatgagcccatcattatctcagcatcgagtgacaagagactgtatatgggagagattcagtgaagatatggactggaagactccaaggccgcttgtctttgagacctcagactgcataagtgatgccaaatgttggatgtccaggctagcaccctcccttcagatgaccattgctagcaagaaacaggaggcggtggccatattccaaaaaccacttctgtcccatttcaccaggatgactaaggcaagctccctgtggcctctaaaaaccacctgccagatttcagggactgtttttttttttctttttcttttttcctgttttctaatgcaggcccaatgtgacaaatttgttggttgggattttttttttttttttgtaactggcttgtatgatattttctttctgtatttctctatatcattttgtattaaaagccaaatagatgcctttttacaagagccatgtggattggatttattgctgtcttttttttgaggcttgattgctataaatcagaatagagcatgatgtggccacagaatacaattcatttaaacttccaa

SEQ ID NO: 182365 - DNA, 1087 bp, Homo sapiens
  Payload ID: 15919
  Gene Symbol: SNRNP40
  Gene Name: small nuclear ribonucleoprotein 40kDa (U5)
  ENST ID: ENST00000373720
  CDS Start-End: 342-725
agggaaattaggaaagggcgatgtaagtttggcttttataagttcattgtcacagtagttcctggtatttagtttgtcacattgaagctttgctggatgtgactaagctggcagagaaatcttgcaaaatatctttttgaaattagtatcacacccaactgcattctgttgcaaattaccaacattgtgtgtgacatttttccttcctgccccctcagctagccccagttattgggatttagatgtgttttcctgcttgaaaaagaaaagagccttaacaggtagcagtatgtcaagttggactttgcccaccgaggaaacagcatctgccattgattgacatgatactaatttcagctgggtgcccaggaggcctctggccgatagttgttttggttggtttgtttatttggatttgttttgcagttcgtgtctgggatgtccggccatttgcccccaaagagagatgtgtaaagatatttcaaggaaatgtgcacaactttgaaaagaaccttctgagatgttcttggtcacctgatggaagcaaaatagcagctggctcagccgacaggtttgtttatgtgtgggataccacaagcaggagaatattgtataagctgcccggccatgctggctccatcaatgaagtggctttccaccctgatgagcccatcattatctcagcatcgagtgacaagagactgtatatgggagagattcagtgaagatatggactggaagactccaaggccgcttgtctttgagacctcagactgcataagtgatgccaaatgttggatgtccaggctagcaccctcccttcagatgaccattgctagcaagaaacaggaggcggtggccatattccaaaaaccacttctgtcccatttcaccaggatgactaaggcaagctccctgtggcctctaaaaaccacctgccagatttcagggactgtttttttttttctttttcttttttcctgttttctaatgcaggcccaatgtgacaaatttgttggttgggattttttttttttttttgtaactggcttgtatgatattttctttctgtatttctctatatcat

SEQ ID NO: 182366 - DNA, 4173 bp, Homo sapiens
  Payload ID: 15920
  Gene Symbol: SNRNP48
  Gene Name: small nuclear ribonucleoprotein 48kDa (U11/U12)
  Uniprot ID: Q6IEG0
  ENST ID: ENST00000342415
  CDS Start-End: 60-1079
gaggcctgcgcgtgcggtctgcagttcggccgcttcctcttggcgggtgggctgcagctatggagggcgagcctccacctgtggaggagcggcggcggctgcaggaggagctgaacgagttcgtggagagcggctgccggacgttggaggaggtgaccgcgtccctgggctgggacctagatagtctggatcccggggaagaggaggcggcggaggatgaagttgtgatatgtccatacgattccaatcatcacatgcctaaatcatctttggcaaagcacatggcatcttgtagattgaggaaaatgggctataccaaagaagaagaggatgaaatgtataatcctgagtttttctatgaaaatgtgaagataccttcgattactttgaataaggactcacaattccagataattaaacaagctagaactgcagttgggaaagacagtgattgttataatcaaagaatttattcttcattgcctgttgaagttcctttgaatcacaaacggtttgtttgtgatctaactcaagctgatcgtcttgccctctatgatttcgtagttgaggagacaaagaaaaagcgctctgattctcaaattattgaaaatgacagcgatctctttgtagacttggctgccaaaatcaatcaagacaatagtcgaaaaagtccaaaatcctaccttgaaatcctggcagaagtacgagattataaaagaagacgccagtcctatagagccaagaatgttcacataaccaagaaatcatatactgaggtgattcgagatgtgataaatgtgcacatggaagaactcagcaatcattggcaagaagagcaagagaaggcagaggatgatgccgaaaagaatgaagaaaggcgatcagcttcagtagattcacggcagtctggtggaagctatttggatgctgagtgttcacgacatagaagggataggagtagaagcccacataaaagaaaaagaaacaaagataaggataaaaactgtgagtcgagaagaaggaaagagagggatggggaaagacaccatagtcataaaagaagaaagcaaaaaatataaatgaagtacttgtacctatattaattatgcttacgccatgataaccaatatacagatatattaattggaattcctttgcataggagaatgtttttatgatctgtttagtgcttattattttttttatgatctgtttagtgcttattattttccagtaaatatgcttcaaaccatgagtacactattaggccctacaactttgttttccttatattttattagatgatttgcttcctataactgatgttgttttgttcgttttgctaatatatgtatctcaaaattctttaagtcaatatttatcatatgtaaattaaacatgaatacattctcatcttataactacatcttataaataaggctaataacccttagaacaccacctgcggttctgtcctcaccccagtggtgactactgtttaccactacactggtgaattgtagtagggaaaaacaatctaaatattgaagaggaatggcctaattaaaatatgatgtagtcataggatagattattgtattggagttaaaagaaataatctagatccatattaacctggattggtctcaaaaacataatgctcagtgaaaatagcaagttgtagaaagttatatacaaattatatatatgtacaaaacaatactatgcattctctatggctatataatgtacgtaaatctatttttaaaggttcagaggaatccataccaaagttctaacagcgagtaggaggtatagatgagagattaggggtgcaaatcaggattgggagggtggtcagagggaactttagctttatccataacattaatttttttaaaaaataaggtcttaatgtttcatttaatttaaaatatactgtcatgttgtgttttgtaaatcaactgaattgaggtactatttacttagatttattgcaccctttttacgtgtgtattttattgggttttgacagattcatacctctgtgcagccactatcacgatcaagatacaaatattttcattgcccccaaaattctcataccccctttcccaatcaattcctctacccctagccctaggcagccacagatttgcttttggttaccgattagatctatccattgtagaattcatgtaaatagaatactgtagtatgtactttgccttcttcctctctgcagatttttgagattgatccctgtgtgtcagttgtgcattttttttgttgctgagtagtatgttctatcttatgtcagatcattcacgtgagactttggcatgaaatgttaagcatccgacatctaaatagcaatattttgaatactggaaactcaggttaaagattttgtttccaagtagaaatgaaatcttattattttaataagtagctgacagtgacagaaagattggatttggatcagattggctgttaggcttcaggtatgggaaacagctctcagatttataaattggaaatcaccaggttacttgccaatatatagtcatattgctgccattgtacttaatttctaaatatataaaatccacatttaaaaattataaaagcaaggacttgggagtgactgatgaatcatgaaattgctgcttttatagatcaaaactacttgaatcatcaggaatttcatatttttcatattgtgtgacaacttataattttgtttcaaattgtgatttcattgattttactaactggaaggaagaagagtaaaattggcatatttaggttttttgtagaagaaagatacaagtgaaaattaggagtggattggagaaattggggggaaatagaagagtacggagaaaggaagagattgaaaatgttaccagagttctttaaagctcacattttatagtatcactgctacaaactatttaatgaaatgtggcatcgggtgaaaagaggcatttgtttgatccttgaacgaattaatctcacgtacttccctgtttgtggtttgagcctttcactggatgtgagctacttgagagcagggtttatgccttcatcagcgtgacccctgtgcctgcagcctcataggtgttaatctgtaattttaaattttgacaaaagcattttcacagccctgccacataagatctagtttttatttctagagtgctgctatgaataattactatagctgctgtccatcttgcccatccattaaggtaccttctcacaaacatttctaatctactggctggagtgcagtggtgcagtctgtagctcactgcagcctcaaactcctaggctcaggcgatcctcttgccctggcctcccatgtagctgcaactataggtgtgtgccactacacctggctaatgtttttagttttttagagatggagtcttgctctgttgcctaggctggtcttgaactcctgggctcagatgatcctcctgtcctcagcctcccaaaatgctgggagccaccaggcaccaggtgtgatctaccacacctgtctaaaaagtatgtatttttaaatttttttgtagagacaggatctcactatgttctccagctggtctcaagctcctggcctcggcctcctaaagtgctgggattacaagtgtgagccactgtgcctagtcactttaattgagatattggcaagtcaactgccatgcagagcccagggcactggttatattcagtaggaaactgaactcagcactcagaattttaaattaaatcaatgatcttcaagtatttgccactttcgagtacagctaattggataatctcaaaccctttagtgaaaatatcttaaatgcattgagaatattttctaattacctgtgtatgctacagtacagacattaattctataaacatgttcataggtcttccccctcgccccgcccgtcttctaagggcattttctgtttctttttagtgagttcatgaatgtttaacggttctggcgcaaagctttcttgcattctgagcataaaaataataaaacccacttatatttgcttgagtgtgtttacaagtcaatttccttttatgtagcttgctttttcatttgctataattgatcctgcaggtgtgtgaattattaaactaacgctcttttaaaccaca

SEQ ID NO: 182367 - DNA, 781 bp, Homo sapiens
  Payload ID: 15920
  Gene Symbol: SNRNP48
  Gene Name: small nuclear ribonucleoprotein 48kDa (U11/U12)
  ENST ID: ENST00000634363
  CDS Start-End: 33-482
ggccgcttcctcttggcgggtgggctgcagctatggagggcgagcctccacctgtggaggagcggcggcggctgcaggaggagctgaacgagttcgtggagagcggctgccggacgttggaggaggtgaccgcgtccctgggctgggacctagatagtctggatcccggggaagaggaggcggcggaggatgaagttgtgatatgtccatacgattccaatcatcacatgcctaaatcatctttggcaaagcacatggcatcttgtagattgaggaaaatgggctataccaaagaagaagaggatgaaatgtataatcctgagtttttctatgaaaatgtgaagataccttcgattactttgaataaggactcacaattccagataattaaacaagctagaactgcagttgggaaagacagtgattgttataatcaaataattggggaatttattcttcattgcctgttgaagttcctttgaatcacaaacggtttgtttgtgatctaactcaagctgatcgtcttgccctctatgatttcgtagttgaggagacaaagaaaaagcgctctgattctcaaattattgaaaatgacagcgatctctttgtagacttggctgccaaaatcaatcaagacaatagtcgaaaaagtccaaaatcctaccttgaaatcctggcagaagtacgagattataaaagaagacgccagtcctatagagccaagaatgttcacataaccaagaaatcatatactgaggtgattcgagatgtgataaatgtg

SEQ ID NO: 182368 - DNA, 1603 bp, Homo sapiens
  Payload ID: 15921
  Gene Symbol: SNRNP70
  Gene Name: small nuclear ribonucleoprotein 70kDa (U1)
  Uniprot ID: P08621
  ENST ID: ENST00000221448
  CDS Start-End: 197-1483
agtcgctatcggaggccgcgcgggtggctgagcagcggcctggtgcgctcgcttagcgggcgacggaatcagacggacgtggacgcccccggagtggaagccgaagcaggagttgttgttgctgaggggctgccgcagccgccgcgagcctccggacagacgccagagcgaggagggcgctacgcgacttggcaagatgacccagttcctgccgcccaaccttctggccctctttgccccccgtgaccctattccatacctgccacccctggagaaactgccacatgaaaaacaccacaatcaaccttattgtggcattgcgccgtacattcgagagtttgaggaccctcgagatgcccctcctccaactcgtgctgaaacccgagaggagcgcatggagaggaaaagacgggaaaagattgagcggcgacagcaagaagtggagacagagcttaaaatgtgggaccctcacaatgatcccaatgctcagggggatgccttcaagactctcttcgtggcgagagtgaattatgacacaacagaatccaagctccggagagagtttgaggtgtacggacctatcaaaagaatacacatggtctacagtaagcggtcaggaaagccccgtggctatgccttcatcgagtacgaacacgagcgagacatgcactccgcttacaaacacgcagatggcaagaagattgatggcaggagggtccttgtggacgtggagaggggccgaaccgtgaagggctggaggccccggcggctaggaggaggcctcggtggtaccagaagaggaggggctgatgtgaacatccggcattcaggccgcgatgacacctcccgctacgatgagagggaccgggaccgggaccgtgagcgggagcgcagagagcggagccgggagcgagacaaggagcgagaacggcgacgctcccgctcccgggaccggcggaggcgctcacggagtcgcgacaaggaggagcggaggcgctccagggagcggagcaaggacaaggaccgggaccggaagcggcgaagcagccggagtcgggagcgggcccggcgggagcgggagcgcaaggaggagctgcgtggcggcggtggcgacatggcggagccctccgaggcgggtgacgcgccccctgatgatgggcctccaggggagctcgggcctgacggccctgacggtccagaggaaaagggccgggatcgtgaccgggagcgacggcggagccaccggagcgagcgcgagcggcgccgggaccgggatcgtgaccgtgaccgtgaccgcgagcacaaacggggggagcggggcagtgagcggggcagggatgaggcccgaggtgggggcggtggccaggacaacgggctggagggtctgggcaacgacagccgagacatgtacatggagtctgagggcggcgacggctacctggctccggagaatgggtatttgatggaggctgcgccggagtgaagaggtcgtcctctccatctgctgtgtttggacgcgttcctgcccagccccttgctgtcatcccctcccccaaccttggccacttgagtttgtcctccaagggtaggtgtctcatttgtt

SEQ ID NO: 182369 - DNA, 3144 bp, Homo sapiens
  Payload ID: 15921
  Gene Symbol: SNRNP70
  Gene Name: small nuclear ribonucleoprotein 70kDa (U1)
  Uniprot ID: P08621
  ENST ID: ENST00000401730
  CDS Start-End: 197-697
agtcgctatcggaggccgcgcgggtggctgagcagcggcctggtgcgctcgcttagcgggcgacggaatcagacggacgtggacgcccccggagtggaagccgaagcaggagttgttgttgctgaggggctgccgcagccgccgcgagcctccggacagacgccagagcgaggagggcgctacgcgacttggcaagatgacccagttcctgccgcccaaccttctggccctctttgccccccgtgaccctattccatacctgccacccctggagaaactgccacatgaaaaacaccacaatcaaccttattgtggcattgcgccgtacattcgagagtttgaggaccctcgagatgcccctcctccaactcgtgctgaaacccgagaggagcgcatggagaggaaaagacgggaaaagattgagcggcgacagcaagaagtggagacagagcttaaaatgtgggaccctcacaatgatcccaatgctcagggggatgccttcaagactctcttcgtggcgagagtgaattatgacacaacagaatccaagctccggagagagtttgaggtgtacggacctatcaaaagaatacacatggtctacagtaagcggtcaggaaagccccgtggctatgccttcatcgagtacgaacacgagcgagacatgcactccaccacgcagctggcttgcagctgatgcttacgctccccttacaacacctcagtgtatggttggtataagggtttgtatcatgggtaagatcactcagcaccgcacaccagcccagcttagccaggcagctcaggagcagcgaggcgcccctcctcccaccccagtcgcccccgtagcctccccgcacccatggccctttccttgtttgggtgccctttgtccctcctgccccgatccgtatgctctctgagaatcttgctgatcccaggaggggaaggatgaacctggtgggaaaggcggcggcctctccgcttgggttccacccagcctctgatgacccggcttcgtgatgtcagcggcgaggtggcaggaacaccgagggcagggctccaggccagggctccactggagcccttcagccttccctccctgcccccgtgctttctatggggctgctactgtgctggccctggagagtctttttggctgctagttttggggtgctctgccccctttctgtcttccttactgtggttgaggcctcccgagggggctggctgtggtgtccagcagctctccagaggtggtcaggagctccctaaagtgcatggaattggggcttggggtgtgggagggaccaaggggtaggctgctagcagctgaaggtgtcgtaggtttttactaaagaaccttccactgtctagagacttgagagagggaaagagagagagaggcctagacgaacacaatcacatgttttctttgctgttcctcccgggatgggcctgttttggggtttgggactctgaacccgagcggggttccttcgcttgactttgatcctggtccttaaatgcctttccccactcccctcccgtgggttcaggggccaagcggcccctcctcagagcacgggcagcaccgtctcctggacccctgtgtgccagcctctgcagacgcagctggtgggagggagcatggatttggaggtggagaagtcactcctggtcctcggagggggtgggctgtgtgcctagttcagtgtgactcggggattggtgagggcggacaggtttctgaggcctccctagccttctttgtaaattcacacgagatagtccagggctttccagcgcccagcttggatgataatcctcgtctcccccactctaaggcctccttgagatttctttggggtctaccacgtcctctgcctgtctccaggtggtacaggagatgtggttcctctccctctcctggctccctagaaccccccacttcccctccctgtagctttagctgaccccgtggtggtgggtgtggggtctgtgcgcgtgctcaggtaagcttgggggctccaggtaagcggtcccgtgtcccccccccgggaagcccgcctcctcgccaggcccccaggagttgccgagccccccccatcccgctcggtttggacacccgcaaggccggcatcgccgcttacaaacacgcagatggcaagaagattgatggcaggagggtccttgtggacgtggagaggggccgaaccgtgaagggctggaggccccggcggctaggaggaggcctcggtggtaccagaagaggaggggctgatgtgaacatccggcattcaggccgcgatgacacctcccgctacgatgagaggcccggcccctccccgcttccgcacagggaccgggaccgggaccgtgagcgggagcgcagagagcggagccgggagcgagacaaggagcgagaacggcgacgctcccgctcccgggaccggcggaggcgctcacggagtcgcgacaaggaggagcggaggcgctccagggagcggagcaaggacaaggaccgggaccggaagcggcgaagcagccggagtcgggagcgggcccggcgggagcgggagcgcaaggaggagctgcgtggcggcggtggcgacatggcggagccctccgaggcgggtgacgcgccccctgatgatgggcctccaggggagctcgggcctgacggccctgacggtccagaggaaaagggccgggatcgtgaccgggagcgacggcggagccaccggagcgagcgcgagcggcgccgggaccgggatcgtgaccgtgaccgtgaccgcgagcacaaacggggggagcggggcagtgagcggggcagggatgaggcccgaggtgggggcggtggccaggacaacgggctggagggtctgggcaacgacagccgagacatgtacatggagtctgagggcggcgacggctacctggctccggagaatgggtatttgatggaggctgcgccggagtgaagaggtcgtcctctccatctgctgtgtttggacgcgttcctgcccagccccttgctgtcatcccctcccccaaccttggccacttgagtttgtcctccaagggtaggtgtctcatttgttctggccccttggatttaaaaataaaattaatttcctgttg

SEQ ID NO: 182370 - DNA, 377 bp, Homo sapiens
  Payload ID: 15921
  Gene Symbol: SNRNP70
  Gene Name: small nuclear ribonucleoprotein 70kDa (U1)
  ENST ID: ENST00000601411
  CDS Start-End: 278-377
gccacccctggagaaactgccacatgaaaaacaccacaatcaaccttattgtggcattgcgccgtacattcgagagtttgagggtcatctcttaggtgcatcagagcacacctgagaaaagctggcacacagtcggaagttacaagaagaacgttctagcattgggtaggtaagggcagctggaggcgagggagttgcagagcagaatttcgtagataacagaaaggaccctcgagatgcccctcctccaactcgtgctgaaacccgagaggagcgcatggagaggaaaagacgggaaaagattgagcggcgacagcaagaagtggagacagagcttaaaatgtgggaccctcacaatgatcccaatgctcaggggg

SEQ ID NO: 182371 - DNA, 1757 bp, Homo sapiens
  Payload ID: 15921
  Gene Symbol: SNRNP70
  Gene Name: small nuclear ribonucleoprotein 70kDa (U1)
  Uniprot ID: P08621
  ENST ID: ENST00000601065
  CDS Start-End: 229-729
gggatttgcggccgggacccaccccctgctccagtcgctatcggaggccgcgcgggtggctgagcagcggcctggtgcgctcgcttagcgggcgacggaatcagacggacgtggacgcccccggagtggaagccgaagcaggagttgttgttgctgaggggctgccgcagccgccgcgagcctccggacagacgccagagcgaggagggcgctacgcgacttggcaagatgacccagttcctgccgcccaaccttctggccctctttgccccccgtgaccctattccatacctgccacccctggagaaactgccacatgaaaaacaccacaatcaaccttattgtggcattgcgccgtacattcgagagtttgaggaccctcgagatgcccctcctccaactcgtgctgaaacccgagaggagcgcatggagaggaaaagacgggaaaagattgagcggcgacagcaagaagtggagacagagcttaaaatgtgggaccctcacaatgatcccaatgctcagggggatgccttcaagactctcttcgtggcgagagtgaattatgacacaacagaatccaagctccggagagagtttgaggtgtacggacctatcaaaagaatacacatggtctacagtaagcggtcaggaaagccccgtggctatgccttcatcgagtacgaacacgagcgagacatgcactccaccacgcagctggcttgcagctgatgcttacgctccccttacaacacctcagtgtatgccgcttacaaacacgcagatggcaagaagattgatggcaggagggtccttgtggacgtggagaggggccgaaccgtgaagggctggaggccccggcggctaggaggaggcctcggtggtaccagaagaggaggggctgatgtgaacatccggcattcaggccgcgatgacacctcccgctacgatgagaggcccggcccctccccgcttccgcacagggaccgggaccgggaccgtgagcgggagcgcagagagcggagccgggagcgagacaaggagcgagaacggcgacgctcccgctcccgggaccggcggaggcgctcacggagtcgcgacaaggaggagcggaggcgctccagggagcggagcaaggacaaggaccgggaccggaagcggcgaagcagccggagtcgggagcgggcccggcgggagcgggagcgcaaggaggagctgcgtggcggcggtggcgacatggcggagccctccgaggcgggtgacgcgccccctgatgatgggcctccaggggagctcgggcctgacggccctgacggtccagaggaaaagggccgggatcgtgaccgggagcgacggcggagccaccggagcgagcgcgagcggcgccgggaccgggatcgtgaccgtgaccgtgaccgcgagcacaaacggggggagcggggcagtgagcggggcagggatgaggcccgaggtgggggcggtggccaggacaacgggctggagggtctgggcaacgacagccgagacatgtacatggagtctgagggcggcgacggctacctggctccggagaatgggtatttgatggaggctgcgccggagtgaagaggtcgtcctctccatctgctgtgtttggacgcgttcctgcccagccccttgctgtcatcccctcccccaaccttggccacttgagtttgtcctccaagggtaggtgtctcatttgttctggccccttggatttaaaaataaaattaatttcc

SEQ ID NO: 182372 - DNA, 547 bp, Homo sapiens
  Payload ID: 15921
  Gene Symbol: SNRNP70
  Gene Name: small nuclear ribonucleoprotein 70kDa (U1)
  ENST ID: ENST00000598984
  CDS Start-End: 266-547
tttgcggccgggacccaccccctgctccagtcgctatcggaggccgcgcgggtggctgagcagcggcctggtgcgctcgcttagcgggcgacggaatcagacggacgtggacgcccccggagtggaagccgaagcaggagttgttgttgctgaggggctgccgcagccgccgcgagcctccggacagacgccagagcgaggagggcgctacgcggaccctcgagatgcccctcctccaactcgtgctgaaacccgagaggagcgcatggagaggaaaagacgggaaaagattgagcggcgacagcaagaagtggagacagagcttaaaatgtgggaccctcacaatgatcccaatgctcagggggatgccttcaagactctcttcgtggcgagagtgaattatgacacaacagaatccaagctccggagagagtttgaggtgtacggacctatcaaaagaatacacatggtctacagtaagcggtcaggaaagccccgtggctatgccttcatcgagtacgaacacgagcgagacatgcactccacc

SEQ ID NO: 182373 - DNA, 1673 bp, Homo sapiens
  Payload ID: 15921
  Gene Symbol: SNRNP70
  Gene Name: small nuclear ribonucleoprotein 70kDa (U1)
  Uniprot ID: P08621
  ENST ID: ENST00000595231
  CDS Start-End: 153-653
gcgctcgcttagcgggcgacggaatcagacggacgtggacgcccccggagtggaagccgaagcaggagttgttgttgctgaggggctgccgcagccgccgcgagcctccggacagacgccagagcgaggagggcgctacgcgacttggcaagatgacccagttcctgccgcccaaccttctggccctctttgccccccgtgaccctattccatacctgccacccctggagaaactgccacatgaaaaacaccacaatcaaccttattgtggcattgcgccgtacattcgagagtttgaggaccctcgagatgcccctcctccaactcgtgctgaaacccgagaggagcgcatggagaggaaaagacgggaaaagattgagcggcgacagcaagaagtggagacagagcttaaaatgtgggaccctcacaatgatcccaatgctcagggggatgccttcaagactctcttcgtggcgagagtgaattatgacacaacagaatccaagctccggagagagtttgaggtgtacggacctatcaaaagaatacacatggtctacagtaagcggtcaggaaagccccgtggctatgccttcatcgagtacgaacacgagcgagacatgcactccaccacgcagctggcttgcagctgatgcttacgctccccttacaacacctcagtgtatggttggtataaggccgcttacaaacacgcagatggcaagaagattgatggcaggagggtccttgtggacgtggagaggggccgaaccgtgaagggctggaggccccggcggctaggaggaggcctcggtggtaccagaagaggaggggctgatgtgaacatccggcattcaggccgcgatgacacctcccgctacgatgagagggaccgggaccgggaccgtgagcgggagcgcagagagcggagccgggagcgagacaaggagcgagaacggcgacgctcccgctcccgggaccggcggaggcgctcacggagtcgcgacaaggaggagcggaggcgctccagggagcggagcaaggacaaggaccgggaccggaagcggcgaagcagccggagtcgggagcgggcccggcgggagcgggagcgcaaggaggagctgcgtggcggcggtggcgacatggcggagccctccgaggcgggtgacgcgccccctgatgatgggcctccaggggagctcgggcctgacggccctgacggtccagaggaaaagggccgggatcgtgaccgggagcgacggcggagccaccggagcgagcgcgagcggcgccgggaccgggatcgtgaccgtgaccgtgaccgcgagcacaaacggggggagcggggcagtgagcggggcagggatgaggcccgaggtgggggcggtggccaggacaacgggctggagggtctgggcaacgacagccgagacatgtacatggagtctgagggcggcgacggctacctggctccggagaatgggtatttgatggaggctgcgccggagtgaagaggtcgtcctctccatctgctgtgtttggacgcgttcctgcccagccccttgctgtcatcccctcccccaaccttggccacttgagtttgtcctccaagggtaggtgtctcatttgttctggccccttggatttaaaaataaaattaatttcctgttgat

SEQ ID NO: 182374 - DNA, 1574 bp, Homo sapiens
  Payload ID: 15921
  Gene Symbol: SNRNP70
  Gene Name: small nuclear ribonucleoprotein 70kDa (U1)
  Uniprot ID: P08621
  ENST ID: ENST00000598441
  CDS Start-End: 225-1538
tttgcggccgggacccaccccctgctccagtcgctatcggaggccgcgcgggtggctgagcagcggcctggtgcgctcgcttagcgggcgacggaatcagacggacgtggacgcccccggagtggaagccgaagcaggagttgttgttgctgaggggctgccgcagccgccgcgagcctccggacagacgccagagcgaggagggcgctacgcgacttggcaagatgacccagttcctgccgcccaaccttctggccctctttgccccccgtgaccctattccatacctgccacccctggagaaactgccacatgaaaaacaccacaatcaaccttattgtggcattgcgccgtacattcgagagtttgaggaccctcgagatgcccctcctccaactcgtgctgaaacccgagaggagcgcatggagaggaaaagacgggaaaagattgagcggcgacagcaagaagtggagacagagcttaaaatgtgggaccctcacaatgatcccaatgctcagggggatgccttcaagactctcttcgtggcgagagtgaattatgacacaacagaatccaagctccggagagagtttgaggtgtacggacctatcaaaagaatacacatggtctacagtaagcggtcaggaaagccccgtggctatgccttcatcgagtacgaacacgagcgagacatgcactccgcttacaaacacgcagatggcaagaagattgatggcaggagggtccttgtggacgtggagaggggccgaaccgtgaagggctggaggccccggcggctaggaggaggcctcggtggtaccagaagaggaggggctgatgtgaacatccggcattcaggccgcgatgacacctcccgctacgatgagaggcccggcccctccccgcttccgcacagggaccgggaccgggaccgtgagcgggagcgcagagagcggagccgggagcgagacaaggagcgagaacggcgacgctcccgctcccgggaccggcggaggcgctcacggagtcgcgacaaggaggagcggaggcgctccagggagcggagcaaggacaaggaccgggaccggaagcggcgaagcagccggagtcgggagcgggcccggcgggagcgggagcgcaaggaggagctgcgtggcggcggtggcgacatggcggagccctccgaggcgggtgacgcgccccctgatgatgggcctccaggggagctcgggcctgacggccctgacggtccagaggaaaagggccgggatcgtgaccgggagcgacggcggagccaccggagcgagcgcgagcggcgccgggaccgggatcgtgaccgtgaccgtgaccgcgagcacaaacggggggagcggggcagtgagcggggcagggatgaggcccgaggtgggggcggtggccaggacaacgggctggagggtctgggcaacgacagccgagacatgtacatggagtctgagggcggcgacggctacctggctccggagaatgggtatttgatggaggctgcgccggagtgaagaggtcgtcctctccatctgctgtgtttggacgcg

SEQ ID NO: 182375 - DNA, 4909 bp, Homo sapiens
  Payload ID: 15922
  Gene Symbol: SNRPD1
  Gene Name: small nuclear ribonucleoprotein D1 polypeptide 16kDa
  Uniprot ID: P62314
  ENST ID: ENST00000300413
  CDS Start-End: 164-523
gcgcagcctcggcgtttccgccatgcgcctgcagtgctccgcgcgctcttgacgtccggagcccctggagtaggcgcttccggccattcatactgcagtcggtcagtgttcggttgaaggattctgtgtgctgtcggacccagagggtgacggcgccgctaggatgaagctcgtgagatttttgatgaaattgagtcatgaaactgtaaccattgaattgaagaacggaacacaggtccatggaacaatcacaggtgtggatgtcagcatgaatacacatcttaaagctgtgaaaatgaccctgaagaacagagaacctgtacagctggaaacgctgagtattcgaggaaataacattcggtattttattctaccagacagtttacctctggatacactacttgtggatgttgaacctaaggtgaaatctaagaaaagggaagctgttgcaggaagaggcagaggaagaggaagaggaagaggacgtggccgtggcagaggaagagggggtcctaggcgataatgtctctcaagatttcaaagtcatatgagatttgggatattttttgtacaggttgtgtttgtttatgtcagtttttaataaacataaatgtgggacagagctgtctatttagtatatcaaagttttagtagtttcctccacattcacgaaattaccacagtgagagctaagcatttctactgggcagtttcatttttagttgatcaggttttaagtttttgaactaaaatttttctttttctttttatgatgaataaggttaaaataaaagccttagacaaattaaatttggcagagtttaattgagcaaaggacaattcacaaatcaggtagcccctgaaccataataggctcagaggcttcagcccagctgcatagttgaagatttatggacagaaggaaagtgatgtatggaaaatggaagtgagatacagcaacagccggattagttacagttcagcgtttgccttatttgaatatggtttgaacagttcgctgtctttggttggctgaaacttagtgattgccacaagagtagggtaccgtctgtttacacgtccagttaggctacagttctatgtactgagaaacctttaagctgaacttgagatatgtaaagagactttaggctaaacttaacaatatatataggatatatacccttctacttcacatgcactgaatatgcattttattgctttactcttcattctgtggcacctacccacaggggaagtaagaagtttgttttggtatttcggaaactaaagtccttatgggatggggtctagaattgattctcctttcctgagttttactccacggagtcttaggtacctggtaaaaagttgtcttctaaattaagggtcattgctttgttgtctagctgctaatgtcttacttttgtttcttttgctttttaatcagttcttaataggatatagttttatgttttccaagttataacttggagttaatggtcactagattatcagttatgagcagtgttaaaatctcctattaatgtgtaatgtacctgtcagtgcctcctttattaaggggttctttgagaataaaagagaaaagacctactttatttgacagcaaaactgttctaattgttaataaggacttttaaaaattgtttttgatttgctaagctcagaaaaaatgtctctcagtgcatcagttctttgtaaagcttactacgaagtatttatatgctaaggaaaacaactgaggatgtgggtggcttaaatctgtattttcatcatgtatgtgagtttttttttttttaagtaaagaaattttctgcaaagatcgttaccttaaaaaagtttagcctgggtgtggtggctcacgcctgtaatcccagcactttgggaggccgaggcaggtggatcacgaggtcaggagttgaagaccagcttggccaagagggtgaaaccccatttctactaaaaatacaaaagttagccaggtgcagtgacaggcgcctgtaatcccagctactcatgaggccgaggcaggagaattgcttgaacccaggaggcggaggttgcagtgagccgagattgtgccactgcactccagcctgggcgatggagtgagactacgtctcaaaaaaaaatcgagagagagatatatatatgtatttatatatatatgtatttatactaatatataaatatatactaatagatatattagtatacatgtagaatgtacctgtcatatatattagatatataaatgtatatattggtataaataaatactagatatatatttttttaagtatcttacctcatcaagtaaattcaaatgctttttgatttttccacagttgataatttttttttgtaagtcattgaagttatatagtaattagcgttttttcccccacaaattattggcagtggtcacccagttgtattacaggttctatgatccaaaaagggatgtatgaaattcatgatgattaagacaattttttctttctttcttttgagacagagtcttgctgtgtcacccaggctggagtgcagtggtgcgatcttggctcactgcaacctctgcgtcccgggttcaagagattattgtgcctcagcctccagagtagctgggattataagcgtgcgccaccacacccagctaatttttttgtatttttagtagagacggggtttcaccatgttggccagacttaagacaattctttaatagtaaatatattaaaggtgagttggcttgacaagatacaaccaatatgtaatttttctccacacgttttttttttttttttttttttttttctggagacagtcttgctctgttgcccaggctggagtacagtggcgcgatcttggctcactgcaagctctgcctcccgggttcaggccattctcctgcctcagcctcccgagtagctgggactacaggtgcctgccaccacacccagctaattttttgtctttttagtagagacggggtttcactgtgttaggatggtctcgttctcctgacctcatgatctgcacgaggcctcccaatgtgctgggattacaggcgtgagccaccgtgcgtccccggcctatacctttcattaattaataagctgggggaataaataactggatttcattcttttccatcttctgacctgttggtgctcctattgcttgtatccaagtagaaggcaaaaggcaagagacccctgtaatgcagcaagtggagagatttgttgaaggggtcaaacaaaaccctgcaagagtaggaaataaacagttggctcctgtcctcgtggagcttatagacagaagcagataacaaataaaaattggagcttagtgccgtggtgcacacttgtagtccctgctactggggaggctaaggcaagaggatcgctatagcctgggaatttgaagctgtagcgtgctatgattgcaagcagcctgggtaacctagtgagacctggctcttaaatttaaaatttaaatgaaaatggccacttagcataagagatctaaaattacgttttgtcctggcatggtggctcatgcctgtgacctcagcactttgggaggccgagatgggcgaatcacttgaggtcaggagttcgagaccagcctgggtaacatggtgaaaccctgtctactgaaaatacaaaaattagcttggtgtggtggcgggtgcctgtaatctcagttactcaggaggcttaggcaggagaatcacttgaaccctggaggcagaggttgcagtgagctgagatcacaccactgcacttcagcctgagtgacagagcgagactgtttcaaaaaaaaaaaaaaaatttgttttgagagtttttgtgtctaggatgtttgcagtgtgaagccagtctagtaacagtttaaatgtaataataaatcacagtgggtactagattgagtttattccactagaggtcattatttcatttccatgtgaaagggctaaaattgggtgaagaaaaagctatttgaactgattaccatcatttgctataaaggaagcattatagtatgaatagaaaacagactagagtttaacatgcttctcttgacccctcttcaccaccccctaaaaggcagatgggatcttaggactgcagcattttgtacacatctgatatttaatgagatgttacatatgaactttagttttttttcttttcttttcttttcttttcttttctttttttttttttgagacagagtctagctctgtcacccaggctggagtgcagtggtgcaatctcggctcactgcaaactctgcctcccgggttcacgccattctcctgcctcagcctcctgagtagctgagactacaggtgcccaccactatgcccggctaatgttttgtacttttagtagagacggggtttcactgtgttagccaggatggtctgaatctcctgacctcgtgattcgcccgcctcggcctcccaaagtgctgggattacaggcgtgagccaccgcgtccggccgaacattagtttttaaagaaatgtattatgaatatagatagaaaacccaaagtgaaggaatagaaaatgaaatatcagtttcttttaatctatcataattatgtgagcataacttagtattttgaaatagattaatgtagtcagcaaacaattcatgtattacctataatagatatcatacatataacatttaataacatacagttcttgttcctgaagacttaacctagaaaataactccataacaagaagaatctctgtcataataaaccaacagcagacattttctaaaggcattaaaagtatatctgatactggcctttattaatgtgaaattcttgtggatctgtgaaataaagaggagtactttctttt

SEQ ID NO: 182376 - DNA, 723 bp, Homo sapiens
  Payload ID: 15922
  Gene Symbol: SNRPD1
  Gene Name: small nuclear ribonucleoprotein D1 polypeptide 16kDa
  ENST ID: ENST00000582475
  CDS Start-End: 155-382
ctggagtaggcgcttccggccattcatactgcagtcggtcagtgttcggttgaaggattctgtgtgctgtcggacccagagggtgacggcgccgctaggatgaagctcgtgaggtgtggatgtcagcatgaatacacatcttaaagctgtgaaaatgaccctgaagaacagagaacctgtacagctggaaacgctgagtattcgaggaaataacattcggtattttattctaccagacagtttacctctggatacactacttgtggatgttgaacctaaggtgaaatctaagaaaagggaagctgttgcaggaagaggcagaggaagaggaagaggaagaggacgtggccgtggcagaggaagagggggtcctaggcgataatgtctctcaagatttcaaagtcatatgagatttgggatattttttgtacaggttgtgtttgtttatgtcagtttttaataaacataaatgtgggacagagctgtctatttagtatatcaaagttttagtagtttcctccacattcacgaaattaccacagtgagagctaagcatttctactgggcagtttcatttttagttgatcaggttttaagtttttgaactaaaatttttctttttctttttatgatgaataaggttaaaataaaagccttagacaaattaaatttggcagagtttaattgagcaaaggacaattcacaaatcaggtagcccctgaa

SEQ ID NO: 182377 - DNA, 320 bp, Homo sapiens
  Payload ID: 15922
  Gene Symbol: SNRPD1
  Gene Name: small nuclear ribonucleoprotein D1 polypeptide 16kDa
  ENST ID: ENST00000579618
  CDS Start-End: 117-251
cttgacgtccggagcccctggagtaggcgcttccggccattcatactgcagtcggtcagtgttcggttgaaggattctgtgtgctgtcggacccagagggtgacggcgccgctaggatgaagctcgtgagatttttgatgaaattgagtcatgaaactgtaaccattgaattgaagaacggaacacaggtccatggaacaatcacagtttacctctggatacactacttgtggatgttgaacctaaggtgaaatctaagaaaagggaagctgttgcaggaagaggcagaggaagaggaagaggaagaggacgtggccgtg

SEQ ID NO: 182378 - DNA, 901 bp, Homo sapiens
  Payload ID: 15923
  Gene Symbol: SNRPD2
  Gene Name: small nuclear ribonucleoprotein D2 polypeptide 16.5kDa
  Uniprot ID: P62316
  ENST ID: ENST00000342669
  CDS Start-End: 446-802
agtagatacgtcagtaacgcgtcccagagggaagaggggcggtgcctgtctccgaagcgaggagcggattggcttcacggaggccgcgcccccgaagtcacggccggcgggcatttggaaatagcttgtcatttccctccttcaacctgtaccattcttcaagaaacggtttgaatcagactgcctttccttttgtcttcattgtcataaacatctgcccccgtgtggttctgactggccgcgaacccctacccgaagcttttattccatcattgtgcaccgttggtggggaatgctgtggcaacaggccacgcctccacttactggttggctttgcgcaggcgccaacggaagtgggtcgcaggaagaggaagtcccgcctctctctcctcaggcagcagcaacgcggaggaaacgggagtgaacggagagcgtagtgaccatcatgagcctcctcaacaagcccaagagtgagatgaccccagaggagctgcagaagcgagaggaggaggaatttaacaccggtccactctctgtgctcacacagtcagtcaagaacaatacccaagtgctcatcaactgccgcaacaataagaaactcctgggccgcgtgaaggccttcgataggcactgcaacatggtgctggagaacgtgaaggagatgtggactgaggtacccaagagtggcaagggcaagaagaagtccaagccagtcaacaaagaccgctacatctccaagatgttcctgcgcggggactcagtcatcgtggtcctgcggaacccgctcatcgccggcaagtaggggccgcctgtctgttgacagaactcactcctctgtcctatgaagaccgctgccattggtgttgagaataataaagctctgtgtttttttctagtggta

SEQ ID NO: 182379 - DNA, 615 bp, Homo sapiens
  Payload ID: 15923
  Gene Symbol: SNRPD2
  Gene Name: small nuclear ribonucleoprotein D2 polypeptide 16.5kDa
  Uniprot ID: P62316
  ENST ID: ENST00000391932
  CDS Start-End: 199-525
aggcagcagcaacgcggaggaaacgggagtgaacggagagcgtagtgaccatcatgttttagcacaaccccctcagaccactctgtggagaacagactgtcagggaacgtgggtggaggcagagagaccagaaagattccaggacagagatgacagaggcttaggccatggagcctcctcaacaagcccaagagtgagatgaccccagaggagctgcagaagcgagaggaggaggaatttaacaccggtccactctctgtgctcacacagtcagtcaagaacaatacccaagtgctcatcaactgccgcaacaataagaaactcctgggccgcgtgaaggccttcgataggcactgcaacatggtgctggagaacgtgaaggagatgtggactgaggtacccaagagtggcaagggcaagaagaagtccaagccagtcaacaaagaccgctacatctccaagatgttcctgcgcggggactcagtcatcgtggtcctgcggaacccgctcatcgccggcaagtaggggccgcctgtctgttgacagaactcactcctctgtcctatgaagaccgctgccattggtgttgagaataataaagctctgtgttttttt

SEQ ID NO: 182380 - DNA, 379 bp, Homo sapiens
  Payload ID: 15923
  Gene Symbol: SNRPD2
  Gene Name: small nuclear ribonucleoprotein D2 polypeptide 16.5kDa
  ENST ID: ENST00000585392
  CDS Start-End: 122-286
gggagtgaacggagagcgtagtgaccatcattcagtcaagaacaatacccaagtgctcatcaactgccgcaacaataagaaactcctgggccgcgtgaaggccttcgataggcactgcaacatggtgctggagaacgtgaaggagatgtggactgaggtacccaagagtggcaagggcaagaagaagtccaagccagtcaacaaagaccgctacatctccaagatgttcctgcgcggggactcagtcatcgtggtcctgcggaacccgctcatcgccggcaagtaggggccgcctgtctgttgacagaactcactcctctgtcctatgaagaccgctgccattggtgttgagaataataaagctctgtgtttttttcta

SEQ ID NO: 182381 - DNA, 702 bp, Homo sapiens
  Payload ID: 15923
  Gene Symbol: SNRPD2
  Gene Name: small nuclear ribonucleoprotein D2 polypeptide 16.5kDa
  Uniprot ID: P62316
  ENST ID: ENST00000588301
  CDS Start-End: 256-612
cgcgtcccagagggaagaggggcggtgcctgtctccgaagcgaggagcggattggcttcacggaggccgcgcccccgaagtcacggccggcgggcatttggaaatagcttgtcatttccctccttcaacctgtaccattcttcaagaaacggcgccaacggaagtgggtcgcaggaagaggaagtcccgcctctctctcctcaggcagcagcaacgcggaggaaacgggagtgaacggagagcgtagtgaccatcatgagcctcctcaacaagcccaagagtgagatgaccccagaggagctgcagaagcgagaggaggaggaatttaacaccggtccactctctgtgctcacacagtcagtcaagaacaatacccaagtgctcatcaactgccgcaacaataagaaactcctgggccgcgtgaaggccttcgataggcactgcaacatggtgctggagaacgtgaaggagatgtggactgaggtacccaagagtggcaagggcaagaagaagtccaagccagtcaacaaagaccgctacatctccaagatgttcctgcgcggggactcagtcatcgtggtcctgcggaacccgctcatcgccggcaagtaggggccgcctgtctgttgacagaactcactcctctgtcctatgaagaccgctgccattggtgttgagaataataaagctctgtgttttttt

SEQ ID NO: 182382 - DNA, 596 bp, Homo sapiens
  Payload ID: 15923
  Gene Symbol: SNRPD2
  Gene Name: small nuclear ribonucleoprotein D2 polypeptide 16.5kDa
  Uniprot ID: P62316
  ENST ID: ENST00000587367
  CDS Start-End: 179-505
ggcagcagcaacgcggaggaaacgggagtgaacggagagcgtagtgaccatcattagagaccaggtttcaccatgttggccaagctggtctcaaactcctgacctcaaatgatccacccgcctcgaccttccaaagtgctgggattacaggagcctcctcaacaagcccaagagtgagatgaccccagaggagctgcagaagcgagaggaggaggaatttaacaccggtccactctctgtgctcacacagtcagtcaagaacaatacccaagtgctcatcaactgccgcaacaataagaaactcctgggccgcgtgaaggccttcgataggcactgcaacatggtgctggagaacgtgaaggagatgtggactgaggtacccaagagtggcaagggcaagaagaagtccaagccagtcaacaaagaccgctacatctccaagatgttcctgcgcggggactcagtcatcgtggtcctgcggaacccgctcatcgccggcaagtaggggccgcctgtctgttgacagaactcactcctctgtcctatgaagaccgctgccattggtgttgagaataataaagctctgtgtttttttc

SEQ ID NO: 182383 - DNA, 805 bp, Homo sapiens
  Payload ID: 15923
  Gene Symbol: SNRPD2
  Gene Name: small nuclear ribonucleoprotein D2 polypeptide 16.5kDa
  Uniprot ID: P62316
  ENST ID: ENST00000588599
  CDS Start-End: 389-715
gcagcgtcctgcttttctcctgatgagtttgagaacgggcgtggggcctttgacgcatcgtgacttcgggagaggggacagctttatcagataacgccctgggctgggcgcgggggctcattcctgtgatcccagcactttagtaggccaaggcggagcatcgctggaacacaggagttcgagactagcctaggcaacatagcgagacccccgtctctacaaaaaaaaaaaaaaatttaattatgaaaaacatgttttaaacgataacgggagtggtcctagataattagtcctattgaaatgaatgttaaggggcagcgattttacgaatactgggggaggccgagcgcggtggctcaggagcctcctcaacaagcccaagagtgagatgaccccagaggagctgcagaagcgagaggaggaggaatttaacaccggtccactctctgtgctcacacagtcagtcaagaacaatacccaagtgctcatcaactgccgcaacaataagaaactcctgggccgcgtgaaggccttcgataggcactgcaacatggtgctggagaacgtgaaggagatgtggactgaggtacccaagagtggcaagggcaagaagaagtccaagccagtcaacaaagaccgctacatctccaagatgttcctgcgcggggactcagtcatcgtggtcctgcggaacccgctcatcgccggcaagtaggggccgcctgtctgttgacagaactcactcctctgtcctatgaagaccgctgccattggtgttgagaataataaagctctgtgttttttt

SEQ ID NO: 182384 - DNA, 454 bp, Homo sapiens
  Payload ID: 15923
  Gene Symbol: SNRPD2
  Gene Name: small nuclear ribonucleoprotein D2 polypeptide 16.5kDa
  ENST ID: ENST00000590212
  CDS Start-End: 30-266
gggagtgaacggagagcgtagtgaccatcatgagcctcctcaacaagcccaagagtgagatgaccccagaggagctgcagaagcgagaggaggaggaatttaacaccggtccactctctgtgctcacacagtcagtcaagaacaatacccaagtgctcatcaactgccgcaacaataagaaactcctgggccgcgtgaaggccttcgatagtgcctcccctccctgttccccaccaggcactgcaacatggtgctggagaacgtgaaggagatgtggactgaggtacccaagagtggcaagggcaagaagaagtccaagccagtcaacaaagaccgctacatctccaagatgttcctgcgcggggactcagtcatcgtggtcctgcggaacccgctcatcgccggcaagtaggggccgcctgtctgttgacagaactcactcctctgtcctatg

SEQ ID NO: 182385 - DNA, 1763 bp, Homo sapiens
  Payload ID: 15924
  Gene Symbol: SNRPD3
  Gene Name: small nuclear ribonucleoprotein D3 polypeptide 18kDa
  Uniprot ID: P62318
  ENST ID: ENST00000215829
  CDS Start-End: 588-968
aagcaactctcctccaactgtctttagggataaccctgagcgggcagccgctctactctatacctaactttatccgtaccagatacctagcctcactcagggccccccttacctggcggtgccgggatcaacaaatgaaattgtgacgggaagtcctggcccttggcccaacctcctgctgtccccggtctgagggcccaagccccgcgtctccgccttgccgtccagcctgtccttggtgtggggtgcttggaagtgtgagcaccctctctggctctttgccggccccaagggtcgttgcggcggcccccgggcccagtcatcagccctcttttccggtgccggaactatcgtactggtgccctagtttcccagccggcaggcggagtgaggaggaagcggaggcgagaccgcgctcaacactggggaaaggaaggaggcgggccctgcgcgcagcattttgggaaagagtggaattctgggtgttaggcccgccattcgcttgactcacgccttcgccgtagcatctttcgcagcggaccgaagagaagaaaagtaggccagagccgaactctcttcctgccaagatgtctattggtgtgccgattaaagtactgcatgaggccgagggccacattgtgacatgtgagacgaacaccggtgaggtatatcgggggaagctcattgaagcagaggacaacatgaactgccagatgtccaacatcacagtcacatacagagatggccgagtggcacagctggagcaggtatacatccgtggcagcaaaatccgctttctgattttgcctgacatgctgaagaacgcacccatgttaaagagcatgaaaaataaaaaccaaggctcaggggctggccgaggaaaagctgctattctcaaggcccaagtggccgcaagaggaagaggacgtggaatgggacgtggaaacatctttcaaaagcgaagataattttctaagttgaacagaactttgtccttttttctttcaggttatctgagttcattggagtgggtgcttgtgcatatatgctaggtatcttttgccatctttctctttagatcaggggaaatgtttaagctaaataaatctggggggttttttgttctgttttgttttgttttctttgagaaaataaggactttgtgttcatttgaagtttgctttggctaaattttgacaccctgggggatgtcctgggagaatgccagtactttgaaatagcacagctattgatgagattttaagctgctgttcctggccagttgcaggttaagccccagaaaagttcaccttggagaagctccgagaacacacagattgtgtctcattcatcttcagacacaggcacatagtgtggcactttgttcagttaacatttgtggagctgtcatcagctcagctttaacaacacaggtgactctttcccttgataaagtcataggtaattcaggggctgggtgcggcggctcacgcatgtaatcccagcactttgggaggccaaggcgggcggatcacgaggtcaggagttcgagaccagcctggccaatatggtgaaacctcgtgtgtactaaaaataaaaaaattagccgggtgcggtggcatgtacctgtagtcccagctactcgggaggctgaggcagaagattcgcttgaacccaggaggtggacattgcagtgagcagagatcatgccactgtactccagcttgggtgacagagcgagactgcacctcaaaaaaaaaaaa

SEQ ID NO: 182386 - DNA, 567 bp, Homo sapiens
  Payload ID: 15924
  Gene Symbol: SNRPD3
  Gene Name: small nuclear ribonucleoprotein D3 polypeptide 18kDa
  Uniprot ID: P62318
  ENST ID: ENST00000402849
  CDS Start-End: 84-446
gactcacgccttcgccgtagcatctttcgcagcggaccgaagagaagaaaagtaggccagagccgaactctcttcctgccaagatgtctattggtgtgccgattaaagtactgcatgaggccgagggccacattgtgacatgtgagacgaacaccggtgaggtatatcgggggaagctcattgaagcagaggacaacatgaactgccagatgtccaacatcacagtcacatacagagatggccgagtggcacagctggagcaggtatacatccgtggcagcaaaatccgctttctgattttgcctgacatgctgaagaacgcacccatgttaaagagcatgaaaaataaaaaccaaggctcaggggctggccgaggaaaagctgctattctcaaggcccaaggttatctgagttcattggagtgggtgcttgtgcatatatgctaggtcccagagaaaaacctccatgctgggttgatagcagcagctaggatcagttgcccaagactctggattctcgagatgaagaccgtcagcagaggctgatctctcctgtgggctcatgtcc

SEQ ID NO: 182387 - DNA, 715 bp, Homo sapiens
  Payload ID: 15924
  Gene Symbol: SNRPD3
  Gene Name: small nuclear ribonucleoprotein D3 polypeptide 18kDa
  Uniprot ID: P62318
  ENST ID: ENST00000404603
  CDS Start-End: 82-462
ctcacgccttcgccgtagcatctttcgcagcggaccgaagagaagaaaagtaggccagagccgaactctcttcctgccaagatgtctattggtgtgccgattaaagtactgcatgaggccgagggccacattgtgacatgtgagacgaacaccggtgaggtatatcgggggaagctcattgaagcagaggacaacatgaactgccagatgtccaacatcacagtcacatacagagatggccgagtggcacagctggagcaggtatacatccgtggcagcaaaatccgctttctgattttgcctgacatgctgaagaacgcacccatgttaaagagcatgaaaaataaaaaccaaggctcaggggctggccgaggaaaagctgctattctcaaggcccaagtggccgcaagaggaagaggacgtggaatgggacgtggaaacatctttcaaaagcgaagataattttctaagttgaacagaactttgtccttttttctttcaggctctggctccgctactgcatcgtgtgcttctgtccaagaggcagagagactgaaactatctgctgccgcctggattctcccagagattgcctggaacaccagctcgggtcctcgcacaccatcctgcgggtgcagcccagaactgtcttctgaggaagaggtgctctcctgggcccccactgtccccaggcctcagcaaggcaagtgaggtg

SEQ ID NO: 182388 - DNA, 640 bp, Homo sapiens
  Payload ID: 15924
  Gene Symbol: SNRPD3
  Gene Name: small nuclear ribonucleoprotein D3 polypeptide 18kDa
  ENST ID: ENST00000439775
  CDS Start-End: 59-247
ttcgcagcggaccgaagagaagaaaagtaggccagagccgaactctcttcctgccaagatgtctattggtgtgccgattaaagtactgcatgaggccgagggccacattgtgacatgtgagacgaacaccggtgaggtatatcgggggaagctcattgaagcagaggacaacatgaactgccagatgtccaacatcacagtcacatacagagatggccgagtggcacagctggagcaggttatctgagttcattggagtgggtgcttgtgcatatatgctaggctctggctccgctactgcatcgtgtgcttctgtccaagaggcagagagactgaaactatctgctgccgcctggattctcccagagattgcctggaacaccagctcgggtcctcgcacaccatcctgcgggtgcagcccagaactgtcttctgaggaagaggtgctctcctgggcccccactgtccccaggcctcagatgctgcatattgctggcccagctcctgaggctctttggacctccaggaatcggtgtctctatcaggaacccttaaccctgacccggactcccagctgggacccggggtgtcggagtggcaagagcgctgtcaggcctggtgaagggtgtgagctgtccaa

SEQ ID NO: 182389 - DNA, 1621 bp, Homo sapiens
  Payload ID: 15925
  Gene Symbol: SNRPA
  Gene Name: small nuclear ribonucleoprotein polypeptide A
  Uniprot ID: P09012
  ENST ID: ENST00000243563
  CDS Start-End: 551-1399
ggccaggagagaaagctttgtggtttggtctcagggaagtagcaggcgccggttgagagaactacggccctgtcggaaggtaacctccggtgcaaacgaccatcggcggcaggcgagcggtacgcttggcgtccgggccttcctgggcccgtctgaggaaacttgctgctcgaggccaggctgcctaggacctgtcccttttttctatactggctcccacatccgggttttttctccgggacggcccttcggatgcttgggccaatgggaatcgccatttagggtgctccgcccaccgggtcgcgtagagcatcctggaagtcgtagtaaatctctcgagagttctctccgcacgcgggctggagaagcgggtcctacgcacgctttgttgtcgcgctttgcctccgtccttgcccctactcccgccttacctgacttccttttcggaggaagatccttgagcagccgacgttgggacaaaggatttggagaaacccagggctaaagtcacgtttttcctcctttaagacttacctcaacacttcactccatggcagttcccgagacccgccctaaccacactatttatatcaacaacctcaatgagaagatcaagaaggatgagctaaaaaagtccctgtacgccatcttctcccagtttggccagatcctggatatcctggtatcacggagcctgaagatgaggggccaggcctttgtcatcttcaaggaggtcagcagcgccaccaacgccctgcgctccatgcagggtttccctttctatgacaaacctatgcgtatccagtatgccaagaccgactcagatatcattgccaagatgaaaggcaccttcgtggagcgggaccgcaagcgggagaagaggaagcccaagagccaggagaccccggccaccaagaaggctgtgcaaggcgggggagccacccccgtggtgggggctgtccaggggcctgtcccgggcatgccgccgatgactcaggcgccccgcattatgcaccacatgccgggccagccgccctacatgccgccccctggtatgatccccccgccaggccttgcacctggccagatcccaccaggggccatgcccccgcagcagcttatgccaggacagatgccccctgcccagcctctttctgagaatccaccgaatcacatcttgttcctcaccaacctgccagaggagaccaacgagctcatgctgtccatgcttttcaatcagttccctggcttcaaggaggtccgtctggtacccgggcggcatgacatcgccttcgtggagtttgacaatgaggtacaggcaggggcagctcgcgatgccctgcagggctttaagatcacgcagaacaacgccatgaagatctcctttgccaagaagtagcaccttttccccccatgcctgccccttcccctgttctggggccacccctttcccccttggctcagccccctgaaggtaagtccccccttgggggccttcttggagccgtgtgtgagtgagtggtcgccacacagcattgtacccagagtctgtccccagacattgcacctggcgctgttaggccggaattaaagtggctttttgaggtttggtttttcacaa

SEQ ID NO: 182390 - DNA, 519 bp, Homo sapiens
  Payload ID: 15925
  Gene Symbol: SNRPA
  Gene Name: small nuclear ribonucleoprotein polypeptide A
  ENST ID: ENST00000601253
  CDS Start-End: 134-519
gagaaagctttgtggtttggtctcagggaagtagcaggcgccggttgagagaactacggccctgtcggaaggtaacctccggtgcaaacgaccatcggcggcaggcgagcgacttacctcaacacttcactccatggcagttcccgagacccgccctaaccacactatttatatcaacaacctcaatgagaagatcaagaaggatgagctaaaaaagtccctgtacgccatcttctcccagtttggccagatcctggatatcctggtatcacggagcctgaagatgaggggccaggcctttgtcatcttcaaggaggtcagcagcgccaccaacgccctgcgctccatgcagggtttccctttctatgacaaacctatgtatgccaagaccgactcagatatcattgccaagatgaaaggcaccttcgtggagcgggaccgcaagcgggagaagaggaagcccaagagccaggagaccccggccaccaagaaggctgtgcaaggcgggggagccacccc

SEQ ID NO: 182391 - DNA, 695 bp, Homo sapiens
  Payload ID: 15925
  Gene Symbol: SNRPA
  Gene Name: small nuclear ribonucleoprotein polypeptide A
  ENST ID: ENST00000601545
  CDS Start-End: 143-695
gcgagacgcgtacagactcgtgaccttcactgattggtccgtagacccgggcgccacggaaggagagctaaaaaagtccctgtacgccatcttctcccagtttggccagatcctggatatcctggtatcacggagcctgaagatgaggggccaggcctttgtcatcttcaaggaggtcagcagcgccaccaacgccctgcgctccatgcagggtttccctttctatgacaaacctatgcgtatccagtatgccaagaccgactcagatatcattgccaagatgaaaggcaccttcgtggagcgggaccgcaagcgggagaagaggaagcccaagagccaggagaccccggccaccaagaaggctgtgcaaggcgggggagccacccccgtggtgggggctgtccaggggcctgtcccgggcatgccgccgatgactcaggcgccccgcattatgcaccacatgccgggccagccgccctacatgccgccccctggtatgatccccccgccaggccttgcacctggccagatcccaccaggggccatgcccccgcagcagcttatgccaggacagatgccccctgcccagcctctttctgagaatccaccgaatcacatcttgttcctcaccaacctgccagaggagaccaacgagctcatgctgtccatgcttttcaatcagttccctggcttca

SEQ ID NO: 182392 - DNA, 592 bp, Homo sapiens
  Payload ID: 15925
  Gene Symbol: SNRPA
  Gene Name: small nuclear ribonucleoprotein polypeptide A
  ENST ID: ENST00000600456
  CDS Start-End: 112-375
cttttcggaggaagatccttgagcagccgacgttgggacaaaggatttggagaaacccagggctaaagtcacgtttttcctcctttaagacttacctcaacacttcactccatggcagttcccgagacccgccctaaccacactatttatatcaacaacctcaatgagaagatcaagaaggatgagctaaaaaagtccctgtacgccatcttctcccagtttggccagatcctggatatcctggtatcacggagcctgaagatgaggggccaggcctttgtcatcttcaaggaggtcagcagcgccaccaacgccctgcgctccatgcagggtttccctttctatgacaaacctatgtggtgccatctcagctgactgcaaccttcgcctcctgggttcaagcgattcttctgcctcagcctcttgagtagctgggactacagcgtatccagtatgccaagaccgactcagatatcattgccaagatgaaaggcaccttcgtggagcgggaccgcaagcgggagaagaggaagcccaagagccaggagaccccggccaccaagaaggctgtgcaaggcgggggagccacccc

SEQ ID NO: 182393 - DNA, 555 bp, Homo sapiens
  Payload ID: 15925
  Gene Symbol: SNRPA
  Gene Name: small nuclear ribonucleoprotein polypeptide A
  ENST ID: ENST00000599362
  CDS Start-End: 130-555
aagctttgtggtttggtctcagggaagtagcaggcgccggttgagagaactacggccctgtcggaaggtaacctccggtgcaaacgaccatcggcggcaggcgagcgacttacctcaacacttcactccatggcagttcccgagacccgccctaaccacactatttatatcaacaacctcaatgagaagatcaagaaggatgagctaaaaaagtccctgtacgccatcttctcccagtttggccagatcctggatatcctggtatcacggagcctgaagatgaggggccaggcctttgtcatcttcaaggaggtcagcagcgccaccaacgccctgcgctccatgcagggtttccctttctatgacaaacctatgcgtatccagtatgccaagaccgactcagatatcattgccaagatgaaaggcaccttcgtggagcgggaccgcaagcgggagaagaggaagcccaagagccaggagaccccggccaccaagaaggctgtgcaaggcgggggagccacccccgtggtgggggctgtccaggggcctgtcccg

SEQ ID NO: 182394 - DNA, 969 bp, Homo sapiens
  Payload ID: 15925
  Gene Symbol: SNRPA
  Gene Name: small nuclear ribonucleoprotein polypeptide A
  ENST ID: ENST00000601393
  CDS Start-End: 201-969
gcacgcgggctggagaagcgggtcctacgcacgctttgttgtcgcgctttgcctccgtccttgcccctactcccgccttacctgacttccttttcggaggaagatccttgagcagccgacgttgggacaaaggatttggagaaacccagggctaaagtcacgtttttcctcctttaagacttacctcaacacttcactccatggcagttcccgagacccgccctaaccacactatttatatcaacaacctcaatgagaagatcaagaaggatgagctaaaaaagtccctgtacgccatcttctcccagtttggccagatcctggatatcctggtatcacggagcctgaagatgaggggccaggcctttgtcatcttcaaggagcgtatccagtatgccaagaccgactcagatatcattgccaagatgaaaggcaccttcgtggagcgggaccgcaagcgggagaagaggaagcccaagagccaggagaccccggccaccaagaaggctgtgcaaggcgggggagccacccccgtggtgggggctgtccaggggcctgtcccgggcatgccgccgatgactcaggcgccccgcattatgcaccacatgccgggccagccgccctacatgccgccccctggtatgatccccccgccaggccttgcacctggccagatcccaccaggggccatgcccccgcagcagcttatgccaggacagatgccccctgcccagcctctttctgagaatccaccgaatcacatcttgttcctcaccaacctgccagaggagaccaacgagctcatgctgtccatgcttttcaatcagttccctggcttcaaggaggtccgtctggtacccgggcggcatgacatcgccttcgtggagtttgacaatgaggtacaggcaggggcagctcgcgatgccctgcagggctttaagatcacgcagaacaacgccatgaagatct

SEQ ID NO: 182395 - DNA, 538 bp, Homo sapiens
  Payload ID: 15925
  Gene Symbol: SNRPA
  Gene Name: small nuclear ribonucleoprotein polypeptide A
  ENST ID: ENST00000597353
  CDS Start-End: 93-538
agaaagctttgtggtttggtctcagggaagtagcaggcgccggttgagagaactacggccctgtcggaagacttacctcaacacttcactccatggcagttcccgagacccgccctaaccacactatttatatcaacaacctcaatgagaagatcaagaaggatgagctaaaaaagtccctgtacgccatcttctcccagtttggccagatcctggatatcctggtatcacggagcctgaagatgaggggccaggcctttgtcatcttcaaggaggtcagcagcgccaccaacgccctgcgctccatgcagggtttccctttctatgacaaacctatgcgtatccagtatgccaagaccgactcagatatcattgccaagatgaaaggcaccttcgtggagcgggaccgcaagcgggagaagaggaagcccaagagccaggagaccccggccaccaagaaggctgtgcaaggcgggggagccacccccgtggtgggggctgtccaggggcctgtcccgggcatgccgccgatgactca

SEQ ID NO: 182396 - DNA, 1055 bp, Homo sapiens
  Payload ID: 15926
  Gene Symbol: SNRPA1
  Gene Name: small nuclear ribonucleoprotein polypeptide A'
  Uniprot ID: P09661
  ENST ID: ENST00000254193
  CDS Start-End: 74-841
ggggcacgctgggacgtctcgctggcgggaggccacgggctttccacagcgcgggggaacgggaggctgcaggatggtcaagctgacggcggagctgatcgagcaggcggcgcagtacaccaacgcggtgcgcgaccgggagctggacctccgggggtataaaattcccgtcattgaaaatctaggtgctacgttagaccagtttgatgctattgatttttctgacaatgagatcaggaaactggatggttttcctttgttgagaagactgaaaacattgttagtgaacaacaacagaatatgccgtataggtgagggacttgatcaggctctgccctgtctgacagaactcattctcaccaataatagtctcgtggaactgggtgatctggaccctctggcatctctcaaatcgctgacttacctaagtatcctaagaaatccggtaaccaataagaagcattacagattgtatgtgatttataaagttccgcaagtcagagtactggatttccagaaagtgaaactaaaagagcgtcaggaagcagagaaaatgttcaagggcaaacggggtgcacagcttgcaaaggatattgccaggagaagcaaaacttttaatccaggtgctggtttgccaactgacaaaaagaaaggtgggccatctccaggggatgtagaagcaatcaagaatgccatagcaaatgcttcaactctggctgaagtggagaggctgaaggggttgctgcagtctggtcagatccctggcagagaacgcagatcagggcccactgatgatggtgaagaagagatggaagaagacacagtcacaaacgggtcctgagcagtgaggcagatgtataataataggccctcttggaacaagtcttgcttttcgaacatggtataatagccttgtttgtgttagcaaagtggaatctatcagcattgttgaaatgcttaagactgctgctgataattttgtaatataagttttgaaatctaaatgtcaattttctacaaattataaaaataaactccactcactatgctaccaa

SEQ ID NO: 182397 - DNA, 924 bp, Homo sapiens
  Payload ID: 15926
  Gene Symbol: SNRPA1
  Gene Name: small nuclear ribonucleoprotein polypeptide A'
  ENST ID: ENST00000559309
  CDS Start-End: 27-491
agcgcgggggaacgggaggctgcaggatggtcaagctgacggcggagctgatcgagcaggcggcgcagtacaccaacgcggtgcgcgaccgggagctggacctccgggggtataaaattcccgtcattgaaaatctaggtgctacgttagaccagtttgatgctattgatttttctgacaatgagatcaggaaactggatggttttcctttgttgagaagactgaaaacattgttagtgaacaacaacagaatatgccgtataggtgagggacttgatcaggctctgccctgtctgacagaactcattctcaccaataatagtctcgtggaactgggtgatctggaccctctggcatctctcaaatcgctgacttacctaagtatcctaagaaatccggtaaccaataagaagcattacagattgtatgtgatttataaagttccgcaagtcagagtactggatttccagaaagtgaaactaaaattttaatccaggtgctggtttgccaactgacaaaaagaaaggtgggccatctccaggggatgtagaagcaatcaagaatgccatagcaaatgcttcaactctggctgaagtggagaggctgaaggggttgctgcagtctggtcagatccctggcagagaacgcagatcagggcccactgatgatggtgaagaagagatggaagaagacacagtcacaaacgggtcctgagcagtgaggcagatgtataataataggccctcttggaacaagtcttgcttttcgaacatggtataatagccttgtttgtgttagcaaagtggaatctatcagcattgttgaaatgcttaagactgctgctgataattttgtaatataagttttgaaatctaaatgtcaattttctacaaattataaaaataaactccactcactatgcta

SEQ ID NO: 182398 - DNA, 824 bp, Homo sapiens
  Payload ID: 15926
  Gene Symbol: SNRPA1
  Gene Name: small nuclear ribonucleoprotein polypeptide A'
  ENST ID: ENST00000560496
  CDS Start-End: 558-824
ggagccttctgttagcgccgtgcctcttgacaggcacgggtgacttcattacttcctgattctaagcttcatggcactggggacttgagactcgttcagcgttttctctctagtatcttaaacagcggcaagtcatgcgtgacccgacataggtgctagggtataaaattcccgtcattgaaaatctaggtgctacgttagaccagtttgatgctattgatttttctgacaatgagatcaggaaactggatggttttcctttgttgagaagactgaaaacattgttagtgaacaacaacagaatatgccgtataggtgagggacttgatcaggctctgccctgtctgacagaactcattctcaccaataatagtctcgtggaactgggtgatctggaccctctggcatctctcaaatcgctgacttacctaagtatcctaagaaatccggtaaccaataagaagcattacagattgtatgtgatttataaagttccgcaagtcagagtactggatttccagaaagtgaaactaaaagagcgtcaggaagcagagaaaatgttcaagggcaaacggggtgcacagcttgcaaaggatattgccaggagaagcaaaacttttaatccaggtgctggtttgccaactgacaaaaagaaaggtgggccatctccaggggatgtagaagcaatcaagaatgccatagcaaatgcttcaactctggctgaagtggagaggctgaaggggttgctgcagtctggtcagatccctggcagagaacgcagatcagggcccactgatgatggtgaagaagagatggaagaagac

SEQ ID NO: 182399 - DNA, 625 bp, Homo sapiens
  Payload ID: 15926
  Gene Symbol: SNRPA1
  Gene Name: small nuclear ribonucleoprotein polypeptide A'
  ENST ID: ENST00000559686
  CDS Start-End: 1-429
ctggaccctctggcatctctcaaatcgctgacttacctaagtatcctaagaaatccggtaaccaataagaagcattacagattgtatgtgatttataaagttccgcaagtcagagtactggatttccagaaagtgaaactaaaagagcgtcaggaagcagagaaaatgttcaagggcaaacggggtgcacagcttgcaaaggatattgccaggagaagcaaaacttttaatccaggtgctggtttgccaactgacaaaaagaaaggtgggccatctccaggggatgtagaagcaatcaagaatgccatagcaaatgcttcaactctggctgaagtggagaggctgaaggggttgctgcagtctggtcagatccctggcagagaacgcagatcaggtgaacaaatggtgttctttgtatgttcaaattaatgttacactcagagtgtaactcacaaccatttagatgccatgactctggaatgccagagtagtgcctccttacatcaaatctaatatatgaaatctctttaaatgctctttgaagataaagtatttgatgggttgggtgcagtggctcacgcctgtaatcccagcactttgggagcctgaggcgggcggatcacct

SEQ ID NO: 182400 - DNA, 539 bp, Homo sapiens
  Payload ID: 15926
  Gene Symbol: SNRPA1
  Gene Name: small nuclear ribonucleoprotein polypeptide A'
  ENST ID: ENST00000626000
  CDS Start-End: 78-539
gcgcggggcacgctgggacgtctcgctggcgggaggccacgggctttccacagcgcgggggaacgggaggctgcaggatggtcaagctgacggcggagctgatcgagcaggcggcgcagtacaccaacgcggtgcgcgaccgggagctggacctccgggggtataaaattcccgtcattgaaaatctaggtgctacgttagaccagtttgatgctattgatttttctgacaatgagatcaggaaactggatggttttcctttgttgagaagactgaaaacattgttagtgaacaacaacagaatatgccgtataggtgagggacttgatcaggctctgccctgtctgacagaactcattctcaccaataatagtctcgtggaactgggtgatctggaccctctggcatctctcaaatcgctgacttacctaagtatcctaagaaatccggtaaccaataagaagcattacagattgtatgtgatttataaagttccgcaagtcagagtactggatttccagaaagtgaaactaaaattt

SEQ ID NO: 182401 - DNA, 2452 bp, Homo sapiens
  Payload ID: 15927
  Gene Symbol: SNRPB2
  Gene Name: small nuclear ribonucleoprotein polypeptide B
  Uniprot ID: P08579
  ENST ID: ENST00000246071
  CDS Start-End: 217-894
tgaggagcgtggctacgttgcttccggtgcctggctccgtttcctgcttttggttcttacagtagtcggcgtaggccttaggtgggttcgtgcgccttctacctcgctgtttcggttttcctggctcctcggcccttttctcccctgttgcagctgggagcggacgaagcgcgaagctgggattttttactgtctcctgaagaatttaacacaaacatggatatcagaccaaatcatacaatttatatcaacaatatgaatgacaaaattaaaaaggaagaattgaagagatccctatatgccctgttttctcagtttggtcatgtggtggacattgtggctttaaagaccatgaagatgagggggcaggcctttgtcatatttaaggaactgggctcatccacaaatgccttgagacagctacaaggatttccattttatggtaaaccaatgcgaatacagtatgcaaaaacagattcggatataatatcaaaaatgcgtggaacttttgctgacaaagaaaagaaaaaagaaaagaaaaaagccaaaactgtggaacagactgcaacaaccacaaacaaaaagcctggccagggaactccaaattcagctaatacccaaggaaattcaacaccaaatcctcaggtccctgattaccctccaaactatattttattccttaataacttaccagaagagactaatgagatgatgttatccatgctgtttaatcagttccctggcttcaaggaagtacgtctggtaccagggaggcatgacattgcttttgttgaatttgaaaatgatgggcaggctggagctgccagggatgctttacagggatttaagatcacaccgtcccatgctatgaagatcacctatgccaagaaataacatttgggatagtcgtctttaaaagacttggtgttatttacagtgtttgttttgataacatttggctgggtcattttaatagttagagatgaggaggagtaaaagtgaaatttttgtgaaggacttaaattatccagtgtttctttagccttggtgaactatgaaatacgaaggccttaattttgtacaataaacttttatttgtattctgtgtatataatgctttcttgattgacccatctccctatcatcaaatgacttctagtctagaacacacttaaggtttataaacttgtgtaataggatgcttttctagtgttactttggaggagctaattatacaacatcattgaaccattcaataaaagttaagtaaaattagatcacagaagctagtagatgactgttgtattaatggtaacaatgattgttctgggtattagaagaaaatgagacccaggcaggatctaaatttgatctttgtatccttttaagaaatgaatatattattttgctgctagtagggattccacaagttttcttcattcagtattaaataaaggctgttcttactgtttactgagaaaacagaaagggaatgctatcttcacactttgcatttaatgctgtttccttcatgaggcaggactgttctaaggttaatatgcaatctctttattgaaagacctccagggtaaaaattttttgatctatagtctcttttcccccttaagacaaatagactgattaataaagagttgccagtgctaagcttgctacttctttgtaattcttaaacaccaatgttcaaatatttccaaagcccattttctttagcttttgatttatgtttaaggctattgattcagtcctctgctgagtaaaccatgggtatctccagaagtggacaatttgtttttacaagtatggtacatattaatagtaacaacaacaaaaaagaaaacagtacttatttttctggtgttcctgttttagtattccttgaacaaaacctttatcacttggaatttttattgtctacttatggaaagacttttagacttacgtagacagtatcacatcactcttatgcatacataaagaggaaaaaaatgtttcctataactttgtcacagttagtctgactcttctgaataacttttttaatcccagtagtcaagctcctgtacttttgtaaaatatattaacagtgaattactagaaaatgggccatgttcttgtatattacagtgatgtcaattgctgataaattttctaactgcttactctcggataccgtacttgtctaagaactgaaaataattcacagactgatcccatgcccagtcctggccatgctttgagtggctgtattggagcagaaaagccagggtggctcacctggggtgagaatgaggggggtgaatagtaagaggggtcgtgtaggtcttcttcaggatttgcttatactctgagtgaaatgggggactattttagagaatttttttaaagtgggttagaatttacgtacaataaagttcacccatgttagtgttcc

SEQ ID NO: 182402 - DNA, 1588 bp, Homo sapiens
  Payload ID: 15927
  Gene Symbol: SNRPB2
  Gene Name: small nuclear ribonucleoprotein polypeptide B
  Uniprot ID: P08579
  ENST ID: ENST00000377943
  CDS Start-End: 140-817
ttctagacttgtcggcgctcgattgaggagcgtggctacgttgcttccggtgcctggctccgtttcctgcttttggttcttacagtagtcggcgtaggccttagattttttactgtctcctgaagaatttaacacaaacatggatatcagaccaaatcatacaatttatatcaacaatatgaatgacaaaattaaaaaggaagaattgaagagatccctatatgccctgttttctcagtttggtcatgtggtggacattgtggctttaaagaccatgaagatgagggggcaggcctttgtcatatttaaggaactgggctcatccacaaatgccttgagacagctacaaggatttccattttatggtaaaccaatgcgaatacagtatgcaaaaacagattcggatataatatcaaaaatgcgtggaacttttgctgacaaagaaaagaaaaaagaaaagaaaaaagccaaaactgtggaacagactgcaacaaccacaaacaaaaagcctggccagggaactccaaattcagctaatacccaaggaaattcaacaccaaatcctcaggtccctgattaccctccaaactatattttattccttaataacttaccagaagagactaatgagatgatgttatccatgctgtttaatcagttccctggcttcaaggaagtacgtctggtaccagggaggcatgacattgcttttgttgaatttgaaaatgatgggcaggctggagctgccagggatgctttacagggatttaagatcacaccgtcccatgctatgaagatcacctatgccaagaaataacatttgggatagtcgtctttaaaagacttggtgttatttacagtgtttgttttgataacatttggctgggtcattttaatagttagagatgaggaggagtaaaagtgaaatttttgtgaaggacttaaattatccagtgtttctttagccttggtgaactatgaaatacgaaggccttaattttgtacaataaacttttatttgtattctgtgtatataatgctttcttgattgacccatctccctatcatcaaatgacttctagtctagaacacacttaaggtttataaacttgtgtaataggatgcttttctagtgttactttggaggagctaattatacaacatcattgaaccattcaataaaagttaagtaaaattagatcacagaagctagtagatgactgttgtattaatggtaacaatgattgttctgggtattagaagaaaatgagacccaggcaggatctaaatttgatctttgtatccttttaagaaatgaatatattattttgctgctagtagggattccacaagttttcttcattcagtattaaataaaggctgttcttactgtttactgagaaaacagaaagggaatgctatcttcacactttgcatttaatgctgtttccttcatgaggcaggactgttctaaggttaatatgcaatctctttattgaaagacctccagggtaaaaattttttgatctatagtctcttttcccccttaagacaaatagactgattaataaagagttgccagtgctaa

SEQ ID NO: 182403 - DNA, 842 bp, Homo sapiens
  Payload ID: 15928
  Gene Symbol: SNRPC
  Gene Name: small nuclear ribonucleoprotein polypeptide C
  Uniprot ID: P09234
  ENST ID: ENST00000244520
  CDS Start-End: 139-618
gcccctcgctcggctgctggaggcgagggcttcggaagtcttcatgctagtctcgtggggttccgcggtgtcgtcgctggctgtgcgcgtcatttccgggcgtcacgtaacggagtggccaacggcctgcagagcaacatgcccaagttttattgtgactactgcgatacatacctcacccatgactctccatctgtgagaaagacacactgcagtggaaggaaacacaaagagaatgtgaaagactattatcagaaatggatggaagagcaggctcagagcctgattgacaaaacaacggctgcatttcaacaaggaaagatacctcctactccattctctgctcctcctcctgcaggggcgatgataccacctccccccagccttccgggtcctcctcgccctggtatgatgccagcaccccatatggggggccctcccatgatgccaatgatgggccctcctcctcctgggatgatgccagtgggacctgctcctggaatgaggccgcccatgggaggccatatgccaatgatgcctgggcccccaatgatgagacctcctgcccgtcccatgatggtgcccactcggcccggaatgactcgaccagacagataaggatagaggggaggccttattgtatcggttttatattacctgttctgcttcaccaggagatcatgctgctgtgatactgagttttctaaacagcataaggaagacttgctcccctgtcctatgaaagagaatagttttggaggggagaagtgggacaaaaaagatgcagttttcctttgtattgggaaatgtgaaaataaaattgtcaactctttcagttaaaa

SEQ ID NO: 182404 - DNA, 1054 bp, Homo sapiens
  Payload ID: 15928
  Gene Symbol: SNRPC
  Gene Name: small nuclear ribonucleoprotein polypeptide C
  ENST ID: ENST00000374017
  CDS Start-End: 288-830
gagtggggccccgaaatctgagggtgatcgtagtcactagttgtggcccccatgcaggagcggagagcgggttctggtttctgaaacctcgagggatgggagagtatctgggccgggtggacggaggcagggagatggagagcgctagacaccccattttagagtgcagatggatcccgcttaaggcaacaaaaaaaagcctggtttatgtgtcgacgctttgatgcttttgagtcgtgaggcggtctggctttttgttttgtttgtttgttttgtttttatcttccatgaacagcgcttccgtggatgggcatctcagtggttgtcgtctttttctcttcctttcacctcttttcaggttttattgtgactactgcgatacatacctcacccatgactctccatctgtgagaaagacacactgcagtggaaggaaacacaaagagaatgtgaaagactattatcagaaatggatggaagagcaggctcagagcctgattgacaaaacaacggctgcatttcaacaaggaaagatacctcctactccattctctgctcctcctcctgcaggggcgatgataccacctccccccagccttccgggtcctcctcgccctggtatgatgccagcaccccatatggggggccctcccatgatgccaatgatgggccctcctcctcctgggatgatgccagtgggacctgctcctggaatgaggccgcccatgggaggccatatgccaatgatgcctgggcccccaatgatgagacctcctgcccgtcccatgatggtgcccactcggcccggaatgactcgaccagacagataaggatagaggggaggccttattgtatcggttttatattacctgttctgcttcaccaggagatcatgctgctgtgatactgagttttctaaacagcataaggaagacttgctcccctgtcctatgaaagagaatagttttggaggggagaagtgggacaaaaaagatgcagttttcctttgtattgggaaatgtgaaaataaaattgtcaactctttcagttaaaa

SEQ ID NO: 182405 - DNA, 600 bp, Homo sapiens
  Payload ID: 15928
  Gene Symbol: SNRPC
  Gene Name: small nuclear ribonucleoprotein polypeptide C
  ENST ID: ENST00000374018
  CDS Start-End: 100-456
caacggcctgcagagcaacatgcccaaccatctgtgagaaagacacactgcagtggaaggaaacacaaagagaatgtgaaagactattatcagaaatggatggaagagcaggctcagagcctgattgacaaaacaacggctgcatttcaacaaggaaagatacctcctactccattctctgctcctcctcctgcaggggcgatgataccacctccccccagccttccgggtcctcctcgccctggtatgatgccagcaccccatatggggggccctcccatgatgccaatgatgggccctcctcctcctgggatgatgccagtgggacctgctcctggaatgaggccgcccatgggaggccatatgccaatgatgcctgggcccccaatgatgagacctcctgcccgtcccatgatggtgcccactcggcccggaatgactcgaccagacagataaggatagaggggaggccttattgtatcggttttatattacctgttctgcttcaccaggagatcatgctgctgtgatactgagttttctaaacagcataaggaagacttgctcccctgtcctatgaaagagaatagttttggaggg

SEQ ID NO: 182406 - DNA, 355 bp, Homo sapiens
  Payload ID: 15929
  Gene Symbol: SNRPE
  Gene Name: small nuclear ribonucleoprotein polypeptide E
  ENST ID: ENST00000367208
  CDS Start-End: 78-236
ttctttttttaacgtttccacttttatgattatttcagagatcgcggattcaggtgtggctctatgagcaagtgaatatgcggatagaaggctgtatcattggttttgatgagtatatgaaccttgtattagatgatgcagaagagattcattctaaaacaaagtcaagaaaacaactgggtcggatcatgctaaaaggagataatattactctgctacaaagtgtctccaactagaaatgatcaatgaagtgagaaattgttgagaaggatacagtttgtttttagatgtcctttgtccaatgtgaacatttattcatattgttttgattaccctcgtgttactacaagatggc

SEQ ID NO: 182407 - DNA, 942 bp, Homo sapiens
  Payload ID: 15929
  Gene Symbol: SNRPE
  Gene Name: small nuclear ribonucleoprotein polypeptide E
  Uniprot ID: P62304
  ENST ID: ENST00000414487
  CDS Start-End: 46-324
gctctcagaggcagcgtgcgggtgtgctctttgtgaaattccaccatggcgtaccgtggccagggtcagaaagtgcagaaggttatggtgcagcccatcaacctcatcttcagatacttacaaaatagatcgcggattcaggtgtggctctatgagcaagtgaatatgcggatagaaggctgtatcattggttttgatgagtatatgaaccttgtattagatgatgcagaagagattcattctaaaacaaagtcaagaaaacaactgggtcggatcatgctaaaaggagataatattactctgctacaaagtgtctccaactagaaatgatcaatgaagtgagaaattgttgagaaggatacagtttgtttttagatgtcctttgtccaatgtgaacatttattcatattgttttgattaccctcgtgttactacaagatggcaataaatactatgggattgtttgtattaaaaaatttacattgcttcttactattcagcagtagaaactttttacacagtaacaccattcgttgctggtatttagttttctgaagggtcgcagttgccttgagcacttggtattcgcagagcttggacctgtagattttgaggcagattaggaattctgcctgatgggtaagcttccagtattgggaggtggagaaggggagggttcagaaaaataaataagagttattgcactaacaaaagtcttcatcacttgtagttctggatgctggaataccagagtttctaacctaaatatgttgggtacattatttaatggggtcagtattgctcaacactctcattgagtcactgtgaggtctttgtgaattttatcgctaagatcagaatgtgagaagtatttggatatagggaaagaatgaagtgcctttcaagtacattaaaaatcagttaagagtttacaggaaagag

SEQ ID NO: 182408 - DNA, 1389 bp, Homo sapiens
  Payload ID: 15930
  Gene Symbol: SNRPF
  Gene Name: small nuclear ribonucleoprotein polypeptide F
  Uniprot ID: P62306
  ENST ID: ENST00000266735
  CDS Start-End: 147-407
ggtgggaggtgaaaggtcatagtcctgtttggcggccatttctcttgaaactgcggctcgggacctgcggtacctgctgtagtcacgagggacgggcggcggcctggtcggcagagagtagcctgcaacattcggccgtggttacgatgagtttacccctcaatcccaaacctttcctcaatggactaacaggaaagccagtgatggtgaaacttaagtggggaatggagtacaagggctatctggtatctgtagatggctacatgaacatgcagcttgcaaatacagaagaatacatagatggagctttgtctggacatctgggtgaagttttaataaggtgtaataatgtcctttatatcagaggtgtggaagaagaggaagaagatggggaaatgagagaatagcatcttttgtgggggattttttttatatatatttctagacaataaagatttgtttgtttttcaacttgacttgtgaactatttgtattcagatatttacaagcaaagctgaaatgatgaaccaattgggaaagattactcactgaactaatgctttaaaagccactgaatttcatttaagttgcttttcttttgtaagcccaatattcttttttttcccataaaggataattatttatatgctttagatatttttatgaaggtgaatttcagaccttttcttgtaaaattatctattagctgagaccttttaaatgcaactttttcttttaaagttatttttgagctacttttaacgtataaaattaaacattttcttggtattaataatatactgtcttattttacttagtagtcaataaattacatgttaattctgtgtcaatataagctaaatgcacatattgcagctaaaattgaagcatcttctaaaaattaaaatgattgtacagacagggcacaacagaaattgggaactgacattcaggctgaaggcatacggtttgttcactgaagagaaaaaagttctctgaacaaaatgtaatgtcaaataaaaaccagtctccccattatgttctgagacataacctcgaggttgagttttaagcccctcaaaacccttcaggtattttagggttgtacattgttaaaatgtatagtccatagtaataacagtatgctatgaacttccctacagatgggttgagaaaatacatcatttacattctcatgttgtaagagaatggccattattacacttcagtgttcatttaccatagttttatcagtaaactatctttgtgtatccccaagtgggacaactcaaagtatagaagaaagtgtttagctatatggaataatacttatgatatgaatacttaaagacttaaaatttacaaaatacacctaagacattctggtaa

SEQ ID NO: 182409 - DNA, 815 bp, Homo sapiens
  Payload ID: 15930
  Gene Symbol: SNRPF
  Gene Name: small nuclear ribonucleoprotein polypeptide F
  ENST ID: ENST00000552085
  CDS Start-End: 106-489
ctcttgaaactgcggctcgggacctgcggtacctgctgtagtcacgagggacgggcggcggcctggtcggcagagagtagcctgcaacattcggccgtggttacgatgagtttacccctcaatcccaaacctttcctcaatggactaacaggaaagccagtgatggtgaaacttaagtggggaatggagtacaagggctatctggtatctgtagatggctacatgaacatgcagattttcatctacatcttgggaatattgaaacaaaatggagtttcactctcgtcgcccaggctggagtgcaatggcatgatctcggctcattgcaacctctgtctcccaggttcaagcgattctcctgcctcagcctcccgagtagctgggattacagctaggacctccagaacactgacaaaaagaagtggtgcagtggaaatccttgccttgttcctaatcttagggggaaagcattcagtcttttaccattagatatgtaatgttagtgataagtttctagtagatgtccttttataaagttgaggaacttctcttctgttcctactttgctgagagtctccatcaagaatgaattttggatattgttgagtggtttttctgcatcaattgggataatcatatgggttttcatttttaatttgttaatgtgtattacattgatttatttttaaatgttaaattacttttgtattcttagattaaaccctaatttgtcataatgtattatctttttagtattattggatttggtttgttacattttgttcagaatgtttgcatatttgcttacgagagat

SEQ ID NO: 182410 - DNA, 552 bp, Homo sapiens
  Payload ID: 15930
  Gene Symbol: SNRPF
  Gene Name: small nuclear ribonucleoprotein polypeptide F
  ENST ID: ENST00000553192
  CDS Start-End: 110-313
atttctcttgaaactgcggctcgggacctgcggtacctgctgtagtcacgagggacgggcggcggcctggtcggcagagagtagcctgcaacattcggccgtggttacgatgagtttacccctcaatcccaaacctttcctcaatggactaacaggaaagccagtgatggtgaaacttaagtggggaatggagtacaagggctatctggtatctgtagatggctacatgaacatgcagattttcatctacatcttgggaatattgaaacaaagtaagattctgctcttccagctctctgaggacttgaagtaactcctctggttccttgaaataaagtgctggctcctaattaatcaataatgaagaatataatttacttaaaaatatgctacctatgcacatgtgacttatctagaaaatacagtggggtaaaggaagacagttctaaggatgagggagacacaggtaggaacttgtatgggaaactcgcctatttccaagtgagagctggctttcagaaagagcacatttgcagtgttgtggggagatga

SEQ ID NO: 182411 - DNA, 625 bp, Homo sapiens
  Payload ID: 15931
  Gene Symbol: SNRPG
  Gene Name: small nuclear ribonucleoprotein polypeptide G
  Uniprot ID: P62308
  ENST ID: ENST00000272348
  CDS Start-End: 123-353
caacaatccattggctaacgaggtcgatgacgccagacgcaagacgccgggcctacagcgggagcgtgaggaaagccgtgcgttgcgttccaaggcatctgtgagcccgcggagtatacaccatgagcaaagctcaccctcccgagttgaaaaaatttatggacaagaagttatcattgaaattaaatggtggcagacatgtccaaggaatattgcggggatttgatccctttatgaaccttgtgatagatgaatgtgtggagatggcgactagtggacaacagaacaatattggaatggtggtaatacgaggaaatagtatcatcatgttagaagccttggaacgagtataaataatggctgttcagcagagaaacccatgtcctctctccatagggcctgttttactatgatgtaaaaattaggtcatgtacattttcatattagactttttgttaaataaacttttgtaatagtcaaaaatgctttctcagatgttctgaatatagaatatcagctctcattccagttttttctaacatgaattttcctggttgacattgatttcaaagggttttatgcattaaagtgaaagaatcttattaaatgtgaaacatggcaagga

SEQ ID NO: 182412 - DNA, 428 bp, Homo sapiens
  Payload ID: 15931
  Gene Symbol: SNRPG
  Gene Name: small nuclear ribonucleoprotein polypeptide G
  ENST ID: ENST00000449935
  CDS Start-End: 107-301
tgcaaaatttttacagggatcagttttttctggcgtagcatgtggttggctttgtgtatagttagttcatttattaccaggcccatggaagtcagacaaaagatttatggacaagaagttatcattgaaattaaatggtggcagacatgtccaaggaatattgcggggatttgatccctttatgaaccttgtgatagatgaatgtgtggagatggcgactagtggacaacagaacaatattggaatggtggtaatacgaggaaatagtatcatcatgttagaagccttggaacgagtataaataatggctgttcagcagagaaacccatgtcctctctccatagggcctgttttactatgatgtaaaaattaggtcatgtacattttcatattagactttttgttaaataaacttttgtaatagtcaa

SEQ ID NO: 182413 - DNA, 527 bp, Homo sapiens
  Payload ID: 15931
  Gene Symbol: SNRPG
  Gene Name: small nuclear ribonucleoprotein polypeptide G
  ENST ID: ENST00000454893
  CDS Start-End: 63-353
ggagcgtgaggaaagccgtgcgttgcgttccaaggcatctgtgagcccgcggagtatacaccatgagcaaagctcaccctcccgagttgaaaaaatttatggacaagaagttatcattgaaattaaatggtggcagacatgtccaaggaatattgcggggatttgatccctttatgaaccttgtgatagatgaatgtgtggagatggcgactagtggacaacagaacaatattggaatggtggacaacatacctaataaagcggtaagcccaaagttcttgaaaaaggtgaaccaaaaaggacaacttacttttagcaaattattaagcataaagacctccaaggagtggtaatacgaggaaatagtatcatcatgttagaagccttggaacgagtataaataatggctgttcagcagagaaacccatgtcctctctccatagggcctgttttactatgatgtaaaaattaggtcatgtacattttcatattagactttttgttaaataaacttttgtaatagtcaa

SEQ ID NO: 182414 - DNA, 515 bp, Homo sapiens
  Payload ID: 15931
  Gene Symbol: SNRPG
  Gene Name: small nuclear ribonucleoprotein polypeptide G
  ENST ID: ENST00000438261
  CDS Start-End: 192-386
cgcagagctcgcgcgtcggtgtggttacagccggcagccacggcacctccttccggccgactagtctccaggtcccgcggtctggcccctggtcacccggcgctgtccctcgttccttgaagatctccagtgctaccttttgttgaacatctcgaatacaccaaaccttctagctgctaatactcagatttatggacaagaagttatcattgaaattaaatggtggcagacatgtccaaggaatattgcggggatttgatccctttatgaaccttgtgatagatgaatgtgtggagatggcgactagtggacaacagaacaatattggaatggtggtaatacgaggaaatagtatcatcatgttagaagccttggaacgagtataaataatggctgttcagcagagaaacccatgtcctctctccatagggcctgttttactatgatgtaaaaattaggtcatgtacattttcatattagactttttgttaaataaacttttgtaatagtcaaaa

SEQ ID NO: 182415 - DNA, 398 bp, Homo sapiens
  Payload ID: 15931
  Gene Symbol: SNRPG
  Gene Name: small nuclear ribonucleoprotein polypeptide G
  ENST ID: ENST00000413456
  CDS Start-End: 65-271
ggaaggaagtgtttttaaaactacgtgaggcatcagaatccgaaagccactttagtcttagcaaatgtgtttatttatggacaagaagttatcattgaaattaaatggtggcagacatgtccaaggaatattgcggggatttgatccctttatgaaccttgtgatagatgaatgtgtggagatggcgactagtggacaacagaacaatattggaatggtggtaatacgaggaaatagtatcatcatgttagaagccttggaacgagtataaataatggctgttcagcagagaaacccatgtcctctctccatagggcctgttttactatgatgtaaaaattaggtcatgtacattttcatattagactttttgttaaataaacttttgtaatagtcaa

SEQ ID NO: 182416 - DNA, 1093 bp, Homo sapiens
  Payload ID: 15931
  Gene Symbol: SNRPG
  Gene Name: small nuclear ribonucleoprotein polypeptide G
  ENST ID: ENST00000482975
  CDS Start-End: 769-963
gcgcgtcggtgtggttacagccggcagccacggcacctccttccggccgactagtctccaggtcccgcggtctggcccctggtcacccggcgctgtccctcgttccttgaagatctccagtgctaccttttgttgaacatctcgaatagtatcatgttctagatagacggctagagggggaaattctctgaaggaactaaggaggggctggaagggaaggaagtgtttttaaaactacgtgaggcatcagaatccgaaagccactttagtcttagcaaatgtgtttgtaggtgtttgagcttttacttagaaacctcattcctttttcttgccttcttttacgttaagcttgaatgtcatgtgttatcttgctctgatgttgaaactatataagaacattcatttttctttttttttaagaacattaattttttctagtcagagaaggctaattttttgaagttttttctacacacccagtaaagtcaaacaactttaagtaggagagccttactttaggtaggactcaacgtaaagctttgaattcctcaaatactttttgagtggacttaacaggttatgtgtttcctgactacgtttctgttttgcttatacttcctgatgctggaattctacatgtattagttggattgcacaaaggatgcaaaatttttacagggatcagttttttctggcgtagcatgtggttggctttgtgtatagttagttcatttattaccaggcccatggaagtcagacaaaagatttatggacaagaagttatcattgaaattaaatggtggcagacatgtccaaggaatattgcggggatttgatccctttatgaaccttgtgatagatgaatgtgtggagatggcgactagtggacaacagaacaatattggaatggtggtaatacgaggaaatagtatcatcatgttagaagccttggaacgagtataaataatggctgttcagcagagaaacccatgtcctctctccatagggcctgttttactatgatgtaaaaattaggtcatgtacattttcatattagactttttgttaaataaacttttgtaatagtcaaaaa

SEQ ID NO: 182417 - DNA, 1304 bp, Homo sapiens
  Payload ID: 15932
  Gene Symbol: SNRPN
  Gene Name: small nuclear ribonucleoprotein polypeptide N
  Uniprot ID: P63162
  ENST ID: ENST00000346403
  CDS Start-End: 443-1165
atgctcaggcggggatgtgtgcgaagcctgccgctgctgcagcgagtctggcgcagagtggagcggccgccggagatgcctgacgcatctgtctgaggagcggtcagtgacgcgatggagcgggcaagggatcgcttacacctgagacgaactacagaacagcacgtaccagaggtggaagtccaagtcaaacgcagaaggactgcctcactgagcaaccaagagtgtcagttgtacccgaggcgttctcagcagcagcaagtacctgtggtggatttccaggctgaactgaggcaggcattcttagctgagacaccaagaggtggttaaagccatattggagtagcgaggaatctgattccaagcaaaaaccagccttcccctaggtcttcagaagcatcaagttttaactgtggacattggatttggtggaacagcaatcatgactgttggcaagagtagcaagatgctgcagcacattgactatagaatgagatgtatcctgcaagatggccgaatcttcattggcacctttaaggcttttgacaagcatatgaatttgatcctctgtgattgtgatgagttcagaaagatcaagccaaagaatgcgaagcaaccagagcgtgaagaaaagcgggttttgggtctggtgttgctgcgtggggagaacttggtatccatgactgtggaggggccaccccccaaagatactggcattgctcgggtaccacttgctggagctgctggaggccctggggttggtagggcagctggtagaggagtaccagctggtgtgccaattccccaggcccctgctggattggcaggccctgtccgaggagttgggggaccatcccagcaggtaatgactccacagggaagaggcactgtagcagctgctgctgttgctgcgactgccagtattgctggagccccaacacagtacccaccaggacggggcactccgcccccacccgtcggcagagcaaccccacctccaggcattatggctcctccacctggtatgagaccacccatgggcccaccaattgggcttccccctgctcgagggacgccaataggcatgccgcctccgggaatgagaccccctccaccaggcattagaggtccacctcccccaggaatgcgtccaccaagaccttagcatactgttgatccatctcagtcactttttcccctgcaatgcgtcttgtgaaattgtgtagagtgtttgtgagctttttgttccctcattctgcattaataatagctaataataaatgcatagagcaattaaactgtga

SEQ ID NO: 182418 - DNA, 1528 bp, Homo sapiens
  Payload ID: 15932
  Gene Symbol: SNRPN
  Gene Name: small nuclear ribonucleoprotein polypeptide N
  Uniprot ID: P63162
  ENST ID: ENST00000390687
  CDS Start-End: 527-1249
tggcgcgcatgctcaggcggggatgtgtgcgaagcctgccgctgctgcagcgagtctggcgcagagtggagcggccgccggagatgcctgacgcatctgtctgaggagcggtcagtgacgcgatggagcgggcaagggatcgcttacacctgagacgaactacagaacagcacgtaccagaggtggaagtccaagtcaaacgcagaaggactgcctcactgagcaaccaagagtgtcagttgtacccgaggcgttctcagcagcagcaagtacctgtggtggatttccaggctgaactgaggcaggcattcttagctgagacaccaagaggtggttaaagccatattggagtagcgaggaatctgattccaagcaaaaaccaggctccatctactctttgaagcttctgcccagcttgcattgtttctaggagaacctgcgtcatacctttatctatagccttcccctaggtcttcagaagcatcaagttttaactgtggacattggatttggtggaacagcaatcatgactgttggcaagagtagcaagatgctgcagcacattgactatagaatgagatgtatcctgcaagatggccgaatcttcattggcacctttaaggcttttgacaagcatatgaatttgatcctctgtgattgtgatgagttcagaaagatcaagccaaagaatgcgaagcaaccagagcgtgaagaaaagcgggttttgggtctggtgttgctgcgtggggagaacttggtatccatgactgtggaggggccaccccccaaagatactggcattgctcgggtaccacttgctggagctgctggaggccctggggttggtagggcagctggtagaggagtaccagctggtgtgccaattccccaggcccctgctggattggcaggccctgtccgaggagttgggggaccatcccagcaggtaatgactccacagggaagaggcactgtagcagctgctgctgttgctgcgactgccagtattgctggagccccaacacagtacccaccaggacggggcactccgcccccacccgtcggcagagcaaccccacctccaggcattatggctcctccacctggtatgagaccacccatgggcccaccaattgggcttccccctgctcgagggacgccaataggcatgccgcctccgggaatgagaccccctccaccaggcattagaggtccacctcccccaggaatgcgtccaccaagaccttagcatactgttgatccatctcagtcactttttcccctgcaatgcgtcttgtgaaattgtgtagagtgtttgtgagctttttgttccctcattctgcattaataatagctaataataaatgcatagagcaattaaactgtgaggtactgttgtatatatttttttgcctgttgattttgatgagatcttaagttactgtggatgagggtgatgcctattaagcagttgattcaaatcatattctctttaattcttaggataaaaaggttttctgctatctaa

SEQ ID NO: 182419 - DNA, 1605 bp, Homo sapiens
  Payload ID: 15932
  Gene Symbol: SNRPN
  Gene Name: small nuclear ribonucleoprotein polypeptide N
  Uniprot ID: P63162
  ENST ID: ENST00000400097
  CDS Start-End: 745-1467
agctgagctcagagccttctgtggggtctgcagtggcaaggccagccgccccctgtcttccctctggagctgtttgaggaatgcagttcttttgcataagaaaggcttttctctccagtcattctgcttgctgatcaagaacacttaacagcttcaggctttcctgatactttgacgaaggtaattgggactcccatcaagtctccacacagctagcagccacgtggggcacttctccagcatatgtaagtggaactcagaaggcaacattccctgaacatactcttccaccagaatctcctctacagatttttgctgccccttttaccagtggctgaatctactttctcttatggatcgcttacacctgagacgaactacagaacagcacgtaccagaggtggaagtccaagtcaaacgcagaaggactgcctcactgagcaaccaagagtgtcagttgtacccgaggcgttctcagcagcagcaagtacctgtggtggatttccaggctgaactgaggcaggcattcttagctgagacaccaagaggtggttaaagccatattggagtagcgaggaatctgattccaagcaaaaaccaggctccatctactctttgaagcttctgcccagcttgcattgtttctaggagaacctgcgtcatacctttatctatagccttcccctaggtcttcagaagcatcaagttttaactgtggacattggatttggtggaacagcaatcatgactgttggcaagagtagcaagatgctgcagcacattgactatagaatgagatgtatcctgcaagatggccgaatcttcattggcacctttaaggcttttgacaagcatatgaatttgatcctctgtgattgtgatgagttcagaaagatcaagccaaagaatgcgaagcaaccagagcgtgaagaaaagcgggttttgggtctggtgttgctgcgtggggagaacttggtatccatgactgtggaggggccaccccccaaagatactggcattgctcgggtaccacttgctggagctgctggaggccctggggttggtagggcagctggtagaggagtaccagctggtgtgccaattccccaggcccctgctggattggcaggccctgtccgaggagttgggggaccatcccagcaggtaatgactccacagggaagaggcactgtagcagctgctgctgttgctgcgactgccagtattgctggagccccaacacagtacccaccaggacggggcactccgcccccacccgtcggcagagcaaccccacctccaggcattatggctcctccacctggtatgagaccacccatgggcccaccaattgggcttccccctgctcgagggacgccaataggcatgccgcctccgggaatgagaccccctccaccaggcattagaggtccacctcccccaggaatgcgtccaccaagaccttagcatactgttgatccatctcagtcactttttcccctgcaatgcgtcttgtgaaattgtgtagagtgtttgtgagctttttgttccctcattctgcattaataatagctaataataaatgcatagagcaattaaactgtg

SEQ ID NO: 182420 - DNA, 1751 bp, Homo sapiens
  Payload ID: 15932
  Gene Symbol: SNRPN
  Gene Name: small nuclear ribonucleoprotein polypeptide N
  Uniprot ID: P63162
  ENST ID: ENST00000400100
  CDS Start-End: 891-1613
caccaagggctggccgcagccactgtagctgagctcagagccttctgtgtggtttgcgggggcaaggtcagctgccccctgccctctctctggggctatttgaggaatgcggcctttttgcataagaaaggcttttctctacagtaactgtggtcgctgatcaatgacaccttcctggtaacatttcatattgcttttttggagatgtaagtgggatctgtggatctgaaaattcacagtggccagctcaccaccacctgatgaaagatacaccacagggtgagagcatcctaacagcaaactgcaaatgagatactttgacgaaggtaattgggactcccatcaagtctccacacagctagcagccacgtggggcacttctccagcatatgtaagtggaactcagaaggcaacattccctgaacatactcttccaccagaatctcctctacagatttttgctgccccttttaccagtggctgaatctactttctcttatggatcgcttacacctgagacgaactacagaacagcacgtaccagaggtggaagtccaagtcaaacgcagaaggactgcctcactgagcaaccaagagtgtcagttgtacccgaggcgttctcagcagcagcaagtacctgtggtggatttccaggctgaactgaggcaggcattcttagctgagacaccaagaggtggttaaagccatattggagtagcgaggaatctgattccaagcaaaaaccaggctccatctactctttgaagcttctgcccagcttgcattgtttctaggagaacctgcgtcatacctttatctatagccttcccctaggtcttcagaagcatcaagttttaactgtggacattggatttggtggaacagcaatcatgactgttggcaagagtagcaagatgctgcagcacattgactatagaatgagatgtatcctgcaagatggccgaatcttcattggcacctttaaggcttttgacaagcatatgaatttgatcctctgtgattgtgatgagttcagaaagatcaagccaaagaatgcgaagcaaccagagcgtgaagaaaagcgggttttgggtctggtgttgctgcgtggggagaacttggtatccatgactgtggaggggccaccccccaaagatactggcattgctcgggtaccacttgctggagctgctggaggccctggggttggtagggcagctggtagaggagtaccagctggtgtgccaattccccaggcccctgctggattggcaggccctgtccgaggagttgggggaccatcccagcaggtaatgactccacagggaagaggcactgtagcagctgctgctgttgctgcgactgccagtattgctggagccccaacacagtacccaccaggacggggcactccgcccccacccgtcggcagagcaaccccacctccaggcattatggctcctccacctggtatgagaccacccatgggcccaccaattgggcttccccctgctcgagggacgccaataggcatgccgcctccgggaatgagaccccctccaccaggcattagaggtccacctcccccaggaatgcgtccaccaagaccttagcatactgttgatccatctcagtcactttttcccctgcaatgcgtcttgtgaaattgtgtagagtgtttgtgagctttttgttccctcattctgcattaataatagctaataataaatgcatagagcaattaaactgtg

SEQ ID NO: 182421 - DNA, 1763 bp, Homo sapiens
  Payload ID: 15932
  Gene Symbol: SNRPN
  Gene Name: small nuclear ribonucleoprotein polypeptide N
  Uniprot ID: P63162
  ENST ID: ENST00000554227
  CDS Start-End: 934-1668
gatgtgtgcgaagcctgccgctgctgcagcgagtctggcgcagagtggagcggccgccggagatgcctgacgcatctgtctgaggagcggtcagtgacgcgatggagcgggcaagggatcgcttacacctgagacgaactacagaacagcacgtaccagaggtggaagtccaagtcaaacgcagaaggactgcctcactgagcaaccaagagtagtgacttgtcaggaggatcaatatgaaggacggcctaaacatctccctgcaaatgctttagcagcatctccctcccctcacccctggggagaaaggattgttcacacaggataatttgaaagtgtcagttgtacccgaggcgttctcagcagcagcaagtacctgtggtggatttccaggctgaactgaggcaggcattcttagctgagacaccaagaggtggttaaagccatattggagtagcgaggaatctgattccaagcaaaaaccaggctccatctactctttgaagcttctgcccagcttgcattgtttctaggagaacctgcgtcatacctttatctatagccttcccctaggtcttcagaagcatcaagttttaactgtggacattggatttggtggaacagcaatcatgacggggtcttgctctgtctcccagtctggagtgcagtggtgcggtcttggctcactgcaaccctgggttcaagagattctcgtgcctcagcctctttattagaaacagggtttcactgtgttggccaggctggtctcaggctcctgacctctggtgatccacccacctcggcctcccaaagtgctgggattacaggcatgagatgagccactgtgcctggccatgagaaatgtttcatgatgtgagaaaatacaggagtttttggtcatgattccaccagtggtgaaggactgtcctgcagatgatggactctcagactgttggcaagagtagcaagatgctgcagcacattgactatagaatgagatgtatcctgcaagatggccgaatcttcattggcacctttaaggcttttgacaagcatatgaatttgatcctctgtgattgtgatgagttcagaaagatcaagccaaagaatgcgaagcaaccagagcgtgaagaaaagcgggttttgggtctggtgttgctgcgtggggagaacttggtatccatgactgtggaggggccaccccccaaagatactggcattgctcgggtaccacttgctggagctgctggaggccctggggttggtagggcagctggtagaggagtaccagctggtgtgccaattccccaggcccctgctggattggcaggccctgtccgaggagttgggggaccatcccagcaggtaatgactccacagggaagaggcactgtagcagctgctgctgttgctgcgactgccagtattgctggagccccaacacagtacccaccaggacggggcactccgcccccacccgtcggcagagcaaccccacctccaggcattatggctcctccacctggtatgagaccacccatgggcccaccaattgggcttccccctgctcgagggacgccaataggcatgccgcctccgggaatgagaccccctccaccaggcattagaggtccacctcccccaggaatgcgtccaccaagaccttagcatactgttgatccatctcagtcactttttcccctgcaatgcgtcttgtgaaattgtgtagagtgtttgtgagctttttgttccctcattctgca

SEQ ID NO: 182422 - DNA, 908 bp, Homo sapiens
  Payload ID: 15932
  Gene Symbol: SNRPN
  Gene Name: small nuclear ribonucleoprotein polypeptide N
  ENST ID: ENST00000584968
  CDS Start-End: 731-908
atgctcaggcggggatgtgtgcgaagcctgccgctgctgcagcgagtctggcgcagagtggagcggccgccggagatgcctgacgcatctgtctgaggagcggtcagtgacgcgatggagcgggcaagggatcgcttacacctgagacgaactacagaacagcacgtaccagaggtggaagtccaagtcaaacgcagaaggactgcctcactgagcaaccaagagtagtgacttgtcaggaggatcaatatgaaggacggcctaaacatctccctgcaaatgctttagcagcatctccctcccctcacccctggggagaaaggattgttcacacaggataatttgaaagtgagtgactatatatggtactgatggtgtttcttcaaggctgccagctcttgtgtttttagttcttttggaaatatttctagacttggtgtcagttgtacccgaggcgttctcagcagcagcaagtacctgtggtggatttccaggctgaactgaggcaggcattcttagctgagacaccaagaggtggttaaagccatattggagtagcgaggaatctgattccaagcaaaaaccaggctccatctactctttgaagcttctgcccagcttgcattgtttctaggagaacctgcgtcatacctttatctatagccttcccctaggtcttcagaagcatcaagttttaactgtggacattggatttggtggaacagcaatcatgactgttggcaagagtagcaagatgctgcagcacattgactatagaatgagatgtatcctgcaagatggccgaatcttcattggcacctttaaggcttttgacaagcatatgaatttgatcctctgtgattgtgatgagttcagaaagatcaagccaaagaatgcgaagcaaccag

SEQ ID NO: 182423 - DNA, 1298 bp, Homo sapiens
  Payload ID: 15932
  Gene Symbol: SNRPN
  Gene Name: small nuclear ribonucleoprotein polypeptide N
  Uniprot ID: P63162
  ENST ID: ENST00000577565
  CDS Start-End: 472-1194
cggagatgcctgacgcatctgtctgaggagcggtcagtgacgcgatggagcgggcaagggatcgcttacacctgagacgaactacagaacagcacgtaccagaggtggaagtccaagtcaaacgcagaaggactgcctcactgagcaaccaagagtgtcagttgtacccgaggcgttctcagcagcagcaagtacctgtggtggatttccaggctgaactgaggcaggcattcttagctgagacaccaagaggtggttaaagccatattggagtagcgaggaatctgattccaagcaaaaaccagctttaacatgctttcctctgcaggctccatctactctttgaagcttctgcccagcttgcattgtttctaggagaacctgcgtcatacctttatctatagccttcccctaggtcttcagaagcatcaagttttaactgtggacattggatttggtggaacagcaatcatgactgttggcaagagtagcaagatgctgcagcacattgactatagaatgagatgtatcctgcaagatggccgaatcttcattggcacctttaaggcttttgacaagcatatgaatttgatcctctgtgattgtgatgagttcagaaagatcaagccaaagaatgcgaagcaaccagagcgtgaagaaaagcgggttttgggtctggtgttgctgcgtggggagaacttggtatccatgactgtggaggggccaccccccaaagatactggcattgctcgggtaccacttgctggagctgctggaggccctggggttggtagggcagctggtagaggagtaccagctggtgtgccaattccccaggcccctgctggattggcaggccctgtccgaggagttgggggaccatcccagcaggtaatgactccacagggaagaggcactgtagcagctgctgctgttgctgcgactgccagtattgctggagccccaacacagtacccaccaggacggggcactccgcccccacccgtcggcagagcaaccccacctccaggcattatggctcctccacctggtatgagaccacccatgggcccaccaattgggcttccccctgctcgagggacgccaataggcatgccgcctccgggaatgagaccccctccaccaggcattagaggtccacctcccccaggaatgcgtccaccaagaccttagcatactgttgatccatctcagtcactttttcccctgcaatgcgtcttgtgaaattgtgtagagtgtttgtgagctttttgttccctcattctgcattaataata

SEQ ID NO: 182424 - DNA, 871 bp, Homo sapiens
  Payload ID: 15932
  Gene Symbol: SNRPN
  Gene Name: small nuclear ribonucleoprotein polypeptide N
  ENST ID: ENST00000579070
  CDS Start-End: 364-871
gccggagatgcctgacgcatctgtctgaggagcggtcagtgacgcgatggagcgggcaagggatcgcttacacctgagacgaactacagaacagcacgtaccagaggtggaagtccaagtcaaacgcagaaggactgcctcactgagcaaccaagagtgtcagttgtacccgaggcgttctcagcagcagcaagtacctgtggtggatttccaggctgaactgaggcaggcattcttagctgagacaccaagaggtggttaaagccatattggagtagcgaggaatctgattccaagcaaaaaccaggtcttcagaagcatcaagttttaactgtggacattggatttggtggaacagcaatcatgactgttggcaagagtagcaagatgctgcagcacattgactatagaatgagatgtatcctgcaagatggccgaatcttcattggcacctttaaggcttttgacaagcatatgaatttgatcctctgtgattgtgatgagttcagaaagatcaagccaaagaatgcgaagcaaccagagcgtgaagaaaagcgggttttgggtctggtgttgctgcgtggggagaacttggtatccatgactgtggaggggccaccccccaaagatactggcattgctcgggtaccacttgctggagctgctggaggccctggggttggtagggcagctggtagaggagtaccagctggtgtgccaattccccaggcccctgctggattggcaggccctgtccgaggagttgggggaccatcccagcaggtaatgactccacagggaagaggcactgtagcagctgctgctgttgctgcgactgccagtattgctggagccccaacacagtacccac

SEQ ID NO: 182425 - DNA, 1109 bp, Homo sapiens
  Payload ID: 15933
  Gene Symbol: SNRPB
  Gene Name: small nuclear ribonucleoprotein polypeptides B and B1
  ENST ID: ENST00000339610
  CDS Start-End: 130-996
tttctacccgaccgcattttacgtggtgctgcatttccggtagcggcggcgggaaatcggctgtgggagagaggctaggcctctgaggaggcgaatccggcgggtatcagagccatcagaaccgccaccatgacggtgggcaagagcagcaagatgctgcagcatattgattacaggatgaggtgcatcctgcaggacggccggatcttcattggcaccttcaaggcttttgacaagcacatgaatttgatcctctgtgactgtgatgagttcagaaagatcaagccaaagaactccaaacaagcagaaagggaagagaagcgagtcctcggtctggtgctgctgcgaggggagaatctggtctcaatgacagtagagggacctcctcccaaagatactggtattgctcgagttccacttgctggagctgccgggggcccagggatcggcagggctgctggcagaggaatcccagctggggttcccatgccccaggctcctgcaggacttgctgggccagtccgtggggttggcgggccatcccaacaggtgatgaccccacaaggaagaggtactgttgcagccgctgcagctgctgccacagccagtattgccggggctccaacccagtacccacctggccgtgggggtcctcccccacctatgggccgaggagcaccccctccaggcatgatgggcccacctcctggtatgagacctcctatgggtcccccaatggggatcccccctggaagagggactccaatgggcatgccccctccgggaatgcggcctcctccccctggatgcgaggccttctttgacccttggccacagagtatggaagtagctccgcagaggcgtgggctcgattcctcagggccacgttaccacagacctgtttgtttcttatgctgttgttcgtggagtctcatgggattgtctggtttccttacagggccccctcccccgggaatgcgcccaccaaggccctagactcatcttggccctcctcagctccctgcctgtttcccgtaaggctgtacatagtccttttatctccttgtggcctatgaaactggtttataataaactcttaagagaacatt

SEQ ID NO: 182426 - DNA, 1154 bp, Homo sapiens
  Payload ID: 15933
  Gene Symbol: SNRPB
  Gene Name: small nuclear ribonucleoprotein polypeptides B and B1
  Uniprot ID: P14678
  ENST ID: ENST00000381342
  CDS Start-End: 164-859
aactccagggctagtgagctggaccggaagtaggtttctacccgaccgcattttacgtggtgctgcatttccggtagcggcggcgggaaatcggctgtgggagagaggctaggcctctgaggaggcgaatccggcgggtatcagagccatcagaaccgccaccatgacggtgggcaagagcagcaagatgctgcagcatattgattacaggatgaggtgcatcctgcaggacggccggatcttcattggcaccttcaaggcttttgacaagcacatgaatttgatcctctgtgactgtgatgagttcagaaagatcaagccaaagaactccaaacaagcagaaagggaagagaagcgagtcctcggtctggtgctgctgcgaggggagaatctggtctcaatgacagtagagggacctcctcccaaagatactggtattgctcgagttccacttgctggagctgccgggggcccagggatcggcagggctgctggcagaggaatcccagctggggttcccatgccccaggctcctgcaggacttgctgggccagtccgtggggttggcgggccatcccaacaggtgatgaccccacaaggaagaggtactgttgcagccgctgcagctgctgccacagccagtattgccggggctccaacccagtacccacctggccgtgggggtcctcccccacctatgggccgaggagcaccccctccaggcatgatgggcccacctcctggtatgagacctcctatgggtcccccaatggggatcccccctggaagagggactccaatgggcatgccccctccgggaatgcggcctcctccccctgggatgcgaggccttctttgacccttggccacagagtatggaagtagctccgcagaggcgtgggctcgattcctcagggccacgttaccacagacctgtttgtttcttatgctgttgttcgtggagtctcatgggattgtctggtttcccttacagggccccctcccccgggaatgcgcccaccaaggccctagactcatcttggccctcctcagctccctgcctgtttcccgtaaggctgtacatagtccttttatctccttgtggcctatgaaactggtttataataaactcttaagagaacattataattgca

SEQ ID NO: 182427 - DNA, 1008 bp, Homo sapiens
  Payload ID: 15933
  Gene Symbol: SNRPB
  Gene Name: small nuclear ribonucleoprotein polypeptides B and B1
  Uniprot ID: P14678
  ENST ID: ENST00000438552
  CDS Start-End: 164-886
aactccagggctagtgagctggaccggaagtaggtttctacccgaccgcattttacgtggtgctgcatttccggtagcggcggcgggaaatcggctgtgggagagaggctaggcctctgaggaggcgaatccggcgggtatcagagccatcagaaccgccaccatgacggtgggcaagagcagcaagatgctgcagcatattgattacaggatgaggtgcatcctgcaggacggccggatcttcattggcaccttcaaggcttttgacaagcacatgaatttgatcctctgtgactgtgatgagttcagaaagatcaagccaaagaactccaaacaagcagaaagggaagagaagcgagtcctcggtctggtgctgctgcgaggggagaatctggtctcaatgacagtagagggacctcctcccaaagatactggtattgctcgagttccacttgctggagctgccgggggcccagggatcggcagggctgctggcagaggaatcccagctggggttcccatgccccaggctcctgcaggacttgctgggccagtccgtggggttggcgggccatcccaacaggtgatgaccccacaaggaagaggtactgttgcagccgctgcagctgctgccacagccagtattgccggggctccaacccagtacccacctggccgtgggggtcctcccccacctatgggccgaggagcaccccctccaggcatgatgggcccacctcctggtatgagacctcctatgggtcccccaatggggatcccccctggaagagggactccaatgggcatgccccctccgggaatgcggcctcctccccctgggatgcgagggccccctcccccgggaatgcgcccaccaaggccctagactcatcttggccctcctcagctccctgcctgtttcccgtaaggctgtacatagtccttttatctccttgtggcctatgaaactggtttataataaactcttaagagaacattataattgca

SEQ ID NO: 182428 - DNA, 985 bp, Homo sapiens
  Payload ID: 15933
  Gene Symbol: SNRPB
  Gene Name: small nuclear ribonucleoprotein polypeptides B and B1
  ENST ID: ENST00000474384
  CDS Start-End: 43-255
gaggcgaatccggcgggtatcagagccatcagaaccgccaccatgacggtgggcaagagcagcaagatgctgcagcatattgattacaggatgaggtgcatcctgcaggacggccggatcttcattggcaccttcaaggcttttgacaagcacatgaatttgatcctctgtgactgtgatgagttcagaaagatcaagtgtgtgaggggggagagcttgagtttctggcctcattgcctatttgtaaagctgtagcctaaagggctctcccaatgcagcctggtctgaaactgctttaagaagcctctgaccctcttcagggccaaagaactccaaacaagcagaaagggaagagaagcgagtcctcggtctggtgctgctgcgaggggagaatctggtctcaatgacagtagagggacctcctcccaaagatactggtattgctcgagttccacttgctggagctgccgggggcccagggatcggcagggctgctggcagaggaatcccagctggggttcccatgccccaggctcctgcaggacttgctgggccagtccgtggggttggcgggccatcccaacaggtgatgaccccacaaggaagaggtactgttgcagccgctgcagctgctgccacagccagtattgccggggctccaacccagtacccacctggccgtgggggtcctcccccacctatgggccgaggagcaccccctccaggcatgatgggcccacctcctggtatgagacctcctatgggtcccccaatggggatcccccctggaagagggactccaatgggcatgccccctccgggaatgcggcctcctccccctgggatgcgagggccccctcccccgggaatgcgcccaccaaggccctagactcatcttggccctcctcagctccctgcctgtttcccgtaaggctgtacatagtccttttatctccttgtggcctatgaaactggtttataataa

SEQ ID NO: 182429 - DNA, 2656 bp, Homo sapiens
  Payload ID: 15934
  Gene Symbol: SNAPC1
  Gene Name: small nuclear RNA activating complex, polypeptide 1, 43kDa
  Uniprot ID: Q16533
  ENST ID: ENST00000216294
  CDS Start-End: 105-1211
acgccgtagggggcgggccgttcgggcttggtttcctgggcgaccaccgctggctagtccgttagaggcgtgcgggcttcggaggcgtgcgggcttcgggtgccatggggactcctcccggcctgcagaccgactgcgaggcgctgctcagccgcttccaggagacggacagtgtacgcttcgaggacttcacggagctctggagaaacatgaagttcgggactatcttctgtggcagaatgagaaatttagaaaagaacatgtttacaaaagaagctttagctttggcttggcgatattttttacctccatacaccttccagatcagagttggtgctttgtatctgctatatggattatataatacccaactgtgtcaaccaaaacaaaagatcagagttgccctgaaggattgggatgaagttttaaaatttcagcaagatttagtaaatgcacagcattttgatgcagcttatatttttaggaagctacgactagacagagcatttcactttacagcaatgcccaaattgctgtcatataggatgaagaaaaaaattcaccgagctgaagttacagaagaatttaaggacccaagtgatcgtgtgatgaaacttatcacttctgatgtattagaggaaatgctgaatgttcatgatcattatcagaacatgaaacatgtaatttcagttgataagtccaagccagataaagccctcagcttgataaaggatgatttttttgacaatattaagaacatagttttggagcatcagcagtggcacaaagacagaaagaatccatccttaaagtcaaaaactaatgatggagaagaaaaaatggaaggaaattcacaagaaacggagagatgtgaaagggcagaatcattagcgaaaataaaatcaaaggccttttcagttgtcatacaggcatccaaatcaagaaggcatcgtcaagtcaaactcgactcttctgactctgattctgcatctggtcaagggcaagtcaaagcaactaggaaaaaagagaagaaagaaagattgaaaccagcaggaaggaagatgtctctcagaaacaaaggcaatgtgcagaatatacacaaggaagataaacctttaagtctgagtatgcctgtaattacagaagaagaagagaatgaaagtttgagtggaacagagttcactgcatccaagaagaggagaaaacactgaacaaagagcctggtgtagtttttaattttgagttttctgacagaagaaaagattgatattttgtgtattgaacaggaagactgccagtattaaaaaaatccttctgggaatctgtaggttatttcttggaaattgcaatacgtagttctagaataaaagtacaaaaaattagaataagaattctttaacattttctttaatgatttgcataaatggagataaaacttgtatttagtatgtaatagaaaaaattctgttattcgcagattgttactatttcctataaggttttgtgatactatactgtcctaatacagtctggtaatactattctattttatttaaaatattttttattgaaatattaatgtttattacatgcaaataactattttgtatctacagtcggataatggattttttattttgtatatttattctattttgtatattgttaagtgcaataaagtttttgccttgctttattttttaatacataaaacttacattctcataacgtgattgataacttaggaagttcacaatgtattttctacttctgcaattaaatattctttagtgcttgtttattattactaaatactaattaagtactaacaagtacttaaatactaatgtattaagtatttaagtactttctaataaaatctttaacaataataatgtaaatttcagaatgtgtctctggtacagaatagttgatattaacagaaaaaaaaaaatctgtagcttcatgaatatgccactctgttaatttcttgttccagacattttaatagagattgcttgagccatgttgtttgaattgctgccaatagcagaccatatccctatcatgttgttggctcaactgttttttttttttccctaatagagatggagtatcgctatgttgctcaggctggtcttgaactcctgggctcaagctatcctcctgcctcagcctcccaaagtactgggattataggtgtgagctactgtacccagccttaacctgtttcacagttgattatacttcatgctgttttccagcatggtattattaagggatttaaagtttgggttgcatgcctgtaatcccagcattttgggaggccgaggtgggcggatcacgaggtcaggagatcgagaccatcgtgactaacacagtgaaaccccgtctctaataaaaatacgaaaaattagccaggcgtggtggcgggcgcctgtaatcccagctactcgggaagctgaggcaggagaatggtgtgaacccagtgagccgagatcgtgccactgcactccagcctgggcaacagagtgagacttcgtctcaaaaaaaaaaaaaagtttgggttgaagatcaaattcgtgatatctctatatctaatctttaaaaatcagaatgctaatgctgacgcaaataaaattttcatttattagca

SEQ ID NO: 182430 - DNA, 1542 bp, Homo sapiens
  Payload ID: 15935
  Gene Symbol: SNAPC2
  Gene Name: small nuclear RNA activating complex, polypeptide 2, 45kDa
  Uniprot ID: Q13487
  ENST ID: ENST00000221573
  CDS Start-End: 52-1056
ctccgcccatcggagaagcgaccttacagcgcctgcctctttctgagcggcatgaagccacctcccaggcggcgagcggccccggcgcgctatctgggcgaggtgaccggtcccgcgacctggagcgctcgcgagaagcggcagctagtgcgactcctgcaggcgcggcagggccagccggagccggacgccaccgagctggcccgggagctgcggggccggagcgaggctgagatccgggtcttcctccagcagctcaagggccgcgtagcccgggaggccattcagaaagtgcatccgggtggccttcagggaccaaggcgccgggaggcacagcccccagcccccatagaggtctggacggatctggctgagaagataacagggccactggaagaagccctggcagtggctttctcgcaggtgctcaccatcgcggccacggaaccggtcaccctcctgcactccaagccccccaagcccacgcaggcccgtggaaagcctttgctcctgagcgcccctggaggacaggaagaccccgcccctgaaatacctagctctgcccctgctgcacctagctccgcacccaggactcctgaccctgcccctgagaaaccttctgagtcgtcggctggtccctccactgaagaagactttgctgtggactttgagaagatctacaagtacttgtcctctgtctcccgaagtggccgcagccccgagctctcagcagctgagtccgctgtggtcctcgacctgctcatgtcacttccagaggagctgccactcctgccctgcacagccctggttgagcatatgacggagacgtacctacgcctgacagccccccagcccattcccgctggagggagcctggggcctgcagcagaaggggatggggctggctccaaggcaccagaggagacccccccagccaccgagaaggccgagcacagcgaactgaaatcgccttggcaagcagctgggatctgtcccctgaacccgttcctggtgcccctggagcttctgggtcgggcagccacccctgccaggtgaggggcatggcgggcaggaggccacaccaggccccccgccctgcccctcggttctgctcggctggccctggctctttctgaggatcccgtcatgggggaaggtccttgagatgatgctcagctgtggggcgggcctctaagatgccccatactttgggggtctcagaaatggaacccccgttgtacaggggttgggtgggggttgcaggactccactcacaagcctcctgatgtcaaggacaggcggacagggctggcctcccccagtccccaagccccactgtgccttgttgtctgctggggggccatagctggcactgcccaccgtaaaggccctcgcacattttcccccttcctgtacacctcggggccagcatcctcaccttcttcaactgaccagtcgtggttactccctgctgccaggtccttccccttcccgggggtattctgtgaccatgaataaagttatcattctctttctctttca

SEQ ID NO: 182431 - DNA, 975 bp, Homo sapiens
  Payload ID: 15935
  Gene Symbol: SNAPC2
  Gene Name: small nuclear RNA activating complex, polypeptide 2, 45kDa
  ENST ID: ENST00000595637
  CDS Start-End: 1-838
gcgagcggccccggcgcgctatctgggcgaggtgaccggtcccgcgacctggagcgctcgcgagaagcggcagctagtgcgactcctgcaggcgcggcagggccagccggagccggacgccaccgagctggcccgggagctgcggggccggagcgaggctgagatccgggtcttcctccagcagctcaagggccgcgtagcccgggaggccattcagaaagtgcatccgggtggccttcagggaccaaggcgccgggaggcacagcccccagcccccatagaggtctggacggatctggctgagaagataacagggccactggaagaagccctggcagtggctttctcgcaggtgctcaccatcgcggccacggaaccggtcaccctcctgcactccaagccccccaagcccacgcaggcccgtggaaagcctttgctcctgagcgcccctggaggacaggaagaccccgcccctgaaatacctagctctgcccctgctgcacctagctccgcacccaggactcctgaccctgcccctgagaaaccttctgagtcgtcggctggtccctccactgaagaagactttgctgtggactttgagaagatctacaagtacttgtcctctgtctcccgaagtggccgcagccccgagctctcagcagctggtgagaagggtgagggagggggcaggagcagagggatcaagggtccctggcagcaggcaggggtgtccccttacccctctcctccatccatcactagagtccgctgtggtcctcgacctgctcatgtcacttccagaggagctgccactcctgccctgcacagccctggttgagcatatgacggagacgtacctacgcctgacagccccccagcccattcccgctggagggagcctggggcctgcagcagaaggggatggggctggctccaaggcaccagaggagacccccccagccaccgagaaggccg

SEQ ID NO: 182432 - DNA, 1413 bp, Homo sapiens
  Payload ID: 15935
  Gene Symbol: SNAPC2
  Gene Name: small nuclear RNA activating complex, polypeptide 2, 45kDa
  ENST ID: ENST00000597584
  CDS Start-End: 634-927
gcgtgggtgaggcgagggctaaacgggcggaatgaactgggagtaagatgctgccgagtccgggcgaaaagcaacgcatgctgttggacaggatacgagcttgaaatccgggtcttcctccagcagctcaagggccgcgtagcccgggaggccattcagaaagtgcatccgggtggccttcagggaccaaggcgccgggaggcacagcccccagcccccatagaggtctggacggatctggctgagaagataacagggccactggaagaagccctggcagtggctttctcgcaggtgctcaccatcgcggccacggaaccggtcaccctcctgcactccaagccccccaagcccacgcaggcccgtggaaagcctttgctcctgagcgcccctggaggacaggaagaccccgcccctgaaatacctagctctgcccctgctgcacctagctccgcacccaggactcctgaccctgcccctgagaaaccttctgagtcgtcggctggtccctccactgaagaagactttgctgtggactttgagaagatctacaagtacttgtcctctgtctcccgaagtggccgcagccccgagctctcagcagctgagtccgctgtggtcctcgacctgctcatgtcacttccagaggagctgccactcctgccctgcacagccctggttgagcatatgacggagacgtacctacgcctgacagccccccagcccattcccgctggagggagcctggggcctgcagcagaaggggatggggctggctccaaggcaccagaggagacccccccagccaccgagaaggccgagcacagcgaactgaaatcgccttggcaagcagctgggatctgtcccctgaacccgttcctggtgcccctggagcttctgggtcgggcagccacccctgccaggtgaggggcatggcgggcaggaggccacaccaggccccccgccctgcccctcggttctgctcggctggccctggctctttctgaggatcccgtcatgggggaaggtccttgagatgatgctcagctgtggggcgggcctctaagatgccccatactttgggggtctcagaaatggaacccccgttgtacaggggttgggtgggggttgcaggactccactcacaagcctcctgatgtcaaggacaggcggacagggctggcctcccccagtccccaagccccactgtgccttgttgtctgctggggggccatagctggcactgcccaccgtaaaggccctcgcacattttcccccttcctgtacacctcggggccagcatcctcaccttcttcaactgaccagtcgtggttactccctgctgccaggtccttccccttcccgggggtattctgtgaccatgaataaagttatcattctctttctctttca

SEQ ID NO: 182433 - DNA, 753 bp, Homo sapiens
  Payload ID: 15936
  Gene Symbol: SNAPC3
  Gene Name: small nuclear RNA activating complex, polypeptide 3, 50kDa
  ENST ID: ENST00000380799
  CDS Start-End: 11-385
ataccaaacaatgctggtgttgggcagtcaaaaactcacacaactgagggattcaattcgatgtgtcagtgacctccagattggtggtgaattcagcaacactcctgaccaagcccctgagcacatcagcaaagacctatacaaatcagccttcttttattttgaaggaacattttataatgataaaagatacccagaatgcagagatttgagcagaactatcattgagtggtcagagtcccatgatagaggctatggaaagtttcagactgctagaatggaagatttcaccttcaatgacttgtgtattaaactgggttttccttacttatactgtcatcagggagactgtgaacatgtcattgtcattactgacataaggtaggtgacagcacttaagacattttgttacctttttttttctttatttcagagtacaaaaccagagatagtttttttaaaaataagaggagtaaaagtaataaccattgcaacttggcttgggagcagcaaaaatactgtcttctttccatgcaaataccaactctttccatccatttgcatcctctattgttcattattttggaaaatctttaagaaatactttactattagacggttaaaaatctgttaatactttaaaaagtatctctattttgtattaaatagctgttattcagatatagtacttatccatttatatataacattgcaactttatttttaggtttgtctttttgccaaaatttgaag

SEQ ID NO: 182434 - DNA, 5680 bp, Homo sapiens
  Payload ID: 15936
  Gene Symbol: SNAPC3
  Gene Name: small nuclear RNA activating complex, polypeptide 3, 50kDa
  Uniprot ID: Q92966
  ENST ID: ENST00000380821
  CDS Start-End: 177-1412
gcggtgccgcgccctggggcgggcctgcccatggcctgccgggaaatgtagtttctgatgccctgcccgcgccgcctcgccgctcgccggccgggcgccccaagcaactacaacttccatcacgctctgcgaggccttgatctgcaggcttttgcaggggaaggagtggggcgaacatggctgaaggaagccgaggtggccctacgtgtagcggggtgggtggcaggcaggacccagtctccggcagtggcggctgcaactttccagagtatgagcttcccgagctaaatacgcgcgctttccatgtgggcgcctttggggagctgtggcggggccgtctgcgcggggccggggacttgtcgctgagggagccgccggcatccgctctgcctgggagccaggcagctgactccgaccgggaggatgccgcggtggccagggatctggactgcagcctggaggcggcggctgagctgagggcggtgtgcggccttgataaactgaaatgccttgaggacggtgaggatccagaagtcattccggagaatactgacctggtgactttgggggttagaaaaaggttcttggaacatcgggaagaaaccattacaatagatcgagcctgcagacaagaaacattcgtttatgagatggagtcacatgccataggaaaaaagcctgaaaattcagcagacatgattgaagaaggggagcttatcctatctgtgaatatcttgtaccctgttatatttcataagcacaaagaacacaaaccataccaaacaatgctggtgttgggcagtcaaaaactcacacaactgagggattcaattcgatgtgtcagtgacctccagattggtggtgaattcagcaacactcctgaccaagcccctgagcacatcagcaaagacctatacaaatcagccttcttttattttgaaggaacattttataatgataaaagatacccagaatgcagagatttgagcagaactatcattgagtggtcagagtcccatgatagaggctatggaaagtttcagactgctagaatggaagatttcaccttcaatgacttgtgtattaaactgggttttccttacttatactgtcatcagggagactgtgaacatgtcattgtcattactgacataaggcttgtgcatcatgatgactgcttggataggacattgtatcccctccttatcaagaagcattggctatggaccagaaaatgttttgtttgtaaaatgtatacagccagatgggtgacgaacaatgacagttttgcaccagaggacccatgcttcttttgtgatgtttgcttccgaatgctgcactatgattcagaaggcaacaaactgggggaattccttgcttatccttatgttgatcctggaacctttaattaagaatagctacactcacaaaaataccccctcatgaaataactgttctcttggatggttaccttatttctaagaaacgccactgaggaacaggatccactttgaacagtccgctaaagctatcaaaaaaaagtccaaatgacagattttcttataatgatagtatttaaatgtttataacatagtttaattttatatttattccagatagtatttaatttagtgctttttacccattttgagttgagttgtagtactttatatattctgactttaaatcctttgtcagacacacatattctttctcccaatccatgccttccctattcattctctgtccagagttttttgctaaagatagaattattaatgatacatcaagtagtggaagtgttttgaaaattctttgaagaatgtgagagctacaccttctaccatgaggcttccaaggtaaagatccttcaaataactgtaatggaaactagggagaatgaattatttacaaataagacaaaattaatagctttgggattatttattttttgagacaaaatctcgctcttgttgcccaggctggaatacagtggcgcaatctcagctcactgcagcctccgcctcccggattcaagtgattctcctgccacagcctcctgagtagctgggattgcaggcacctggcaccatgcctggctaatttttgtatttttagtagagacggggtttcaccatgttggccaggctggtctcaaactcctaacctcaggcgatccacccgcctaagcctcccaaaattttgggatcacaggcgtgagccaccgcgcccggctgctttgggggaatttaatcttagtgtgctgtttagtaatgttaggttttgttttggaggaaactaggcatacaagacatgttaataagactatgtgaataatgaatttaaaaagatcttgagtatatactcataactccagaaataacattaacttgaagctttatttcttgacaaaagctttatgaatgttatgagtttaaaatatgtcaatttaatactatgatttaaaaaacaatagcagatttcgtatgactgtggggacatggaaaaatcaagatcctattgattgctagctctggctcacttattctccggtaatgatactattggatatataccaaaattatataagcaaaaagaaaaaaaataagttttcctggcccaggtcttccattcttctggtccccttactatagtaattctagttactctcatcttattctgaggaaaaaaaaaaaaaccaaaactttttaaacttattttttgacatagggtcttactgtgtcacccaggctggagtacagtggcgtgatcttggctcactggagccctgacctccctaggctcaggtgatcctcccacctcagcctaccgagtagctgagacatggtggcacaggccaccatggcgggctaatttttttatttcttgtagatacagggtttcactatgttgcgcagaatagtctcgaactcctgacctcaagtgatccatccgccttggcctcccagagtgctgcgattacaggcatgaaccacagcgcccagcaaaataaactttctttattttcaggtctagaccatcagatagatttattcaaatattttctgggaacctttatgggtagaacatttaatactgtttagaagacttttaggaatactatagatttcaaatgcatcatttaaaataaataaattccactttctctctcctaggttgtatttaaatttgactgaatatctggatggctaagaacagacatttatcttacacatggaaaactgacgaaacctataagcctatgtgtttgacagtgaagtatgttttatggacttaaatgccacaaacagttaagtccattggcttggagatgacaagcacgagtttctggtatgtctagtgttctcattcactgattcagtcagtacacagataatcagtatagagaacttaagaggctggcttatgttatacctaaatttttactttcttgtatacaacaatgctaaaattgagcagattgataactgccagcaaaccatagatttaagataaatgaatgatttacccaaccctaaaattccatgggtaaaaattttgattcctttattttcaatactgcgttccttataggtcttacatgcatatgcaaggatattttatcttattcattcatttcatactctcaaaacaccaaacttcaaaaagttaattattgtcataatgcattattccatgtgtggtgtcaatacattttagcggacaaagaagaaacatgccagttaaaacatttctgctactgggattctttattaattatttgagaatgttattttgctagttcttaaggttaagtttttcatcaaagactcaggtacctattattgttccctggtgaaactgaggagaaaagttaatcaaccaggttactcccacagtttgcccgtgtgttatgtatcagttatacaggtatcccaccaagttcaagtcaaaagaaattcctaactttgtatatttctggagctataaaacccctgatttaagacagcttttctcttttttcgaggcagcttttctttatgcttatttcaatcaaatgtaacacgcctgtcaaattacatgtaacacattagctaatgaagataggcaactgaaaatgttgtcatgaacatgtcaacctgcttggtagttgaatttgacttttatataatagtggatacacatgcacagaagttactagagaagcaatagctatttctttaaacattcttcaggcatcagtaccatttaaggacaattagacattctagttttactaggagaaaggtcagtcatctctaacattgtgttgcagaattacacgacacaaacataaacacatttctgcctattaaaccagtttctttgtttctaaagagtttaatgatacaggtttgctatttccattagagcatcctttttctggccaatcggacaaaatagagttagcaaagccctcacagcaccctatgaaaaatctctgctcttatacaggattagatgcagacctcatcttgacctaacatctgtaaccaggtaagtgtatgagtaggaacacagacagcagtactgtatcagcaaaatctatcatattatttgaaatcactggatataatattaattataaagtgtatggttctctccagttgttcacataccaaatcccagtcagttctcagattcagatagatgtatctgcaatttctccaagcagctaagaaaaccttcaatggtcagttctgcttggtcatggtatgactctttttttttttttttttttttttttttgagatggagtcttgctctgtctcccaggctggagtgcagtggggcaatctcagctcactgcaacctctgcctcccgggttcaagcaattctcctgcctcagcctcccgaggagctgggattacaggcacgtgccactgcgcccggctgatgtatgactcttttatccagtaatcaaaacacatacgtacatacacacacataccagcccaaaagaggtgttaaaacatacatattacacgtactttttggaggggtggggtggggtggggtggggtggggtgggggttatctatctcaaaattaccttttggtgccttgtcaagctgtggagttttgaccacacacacaaattgagccaatgaacaatttcaatgatcctgaaagttcttaagtcttatgaataattatcaagagttctgagaagttatctgtaaatcagcctatgacaccatttcttgagagttatgattaaagaaacagcaattatgcttgaagcgaacatacatcaactagttagagcaaggtcagcctgtacaagctgacataaattatgagaatgatgctctatctctagaattggaatattctgtggcttctttgtaaaactatagatctggtgggtcatgggaagaaagggagggtgaacaaaagataaatattacctttattttttatcatcttgagcttactgtttagttaccccgtttcccaaaacagcacaacctctgtgaccagttaactaagaaattatttccttggcagcaaacccagaattccatcacttactcttgtaaatagcaagaaagtaatttactagcagagtttgatagaaaaattctttaatgaaaacaagtttacacgttgaacttatggcttaactagaataaatct

SEQ ID NO: 182435 - DNA, 730 bp, Homo sapiens
  Payload ID: 15936
  Gene Symbol: SNAPC3
  Gene Name: small nuclear RNA activating complex, polypeptide 3, 50kDa
  ENST ID: ENST00000421710
  CDS Start-End: 2-730
catggctgaaggaagccgaggtggccctacgtgtagcggggtgggtggcaggcaggacccagtctccggcagtggcggctgcaactttccagagtatgagcttcccgagctaaatacgcgcgctttccatgtgggcgcctttggggagctgtggcggggccgtctgcgcggggccggggacttgtcgctgagggagccgccggcatccgctctgcctgggagccaggcagctgactccgaccgggaggatgccgcggtggccagggatctggactgcagcctggaggcggcggctgagctgagggcggtgtgcggccttgataaactgaaatgccttgaggacggtgaggatccagaagtcattccggagaatactgacctggtgactttgggggttagaaaaaggttcttggaacatcgggaagaaaccattacaatagatcgagcctgcagacaagaaacattcgtttatgagatggagtcacatgccataggaaaaaagcctgaaaattcagcagacatgattgaagaaggggagcttatcctatctgtgaatatcttgtaccctgttatatttcataaggacctatacaaatcagccttcttttattttgaaggaacattttataatgataaaagatacccagaatgcagagatttgagcagaactatcattgagtggtcagagtcccatgatagaggctatggaaagtttcagactgctagaatg

SEQ ID NO: 182436 - DNA, 2524 bp, Homo sapiens
  Payload ID: 15936
  Gene Symbol: SNAPC3
  Gene Name: small nuclear RNA activating complex, polypeptide 3, 50kDa
  Uniprot ID: Q92966
  ENST ID: ENST00000490969
  CDS Start-End: 12-1247
gtggggcgaacatggctgaaggaagccgaggtggccctacgtgtagcggggtgggtggcaggcaggacccagtctccggcagtggcggctgcaactttccagagtatgagcttcccgagctaaatacgcgcgctttccatgtgggcgcctttggggagctgtggcggggccgtctgcgcggggccggggacttgtcgctgagggagccgccggcatccgctctgcctgggagccaggcagctgactccgaccgggaggatgccgcggtggccagggatctggactgcagcctggaggcggcggctgagctgagggcggtgtgcggccttgataaactgaaatgccttgaggacggtgaggatccagaagtcattccggagaatactgacctggtgactttgggggttagaaaaaggttcttggaacatcgggaagaaaccattacaatagatcgagcctgcagacaagaaacattcgtttatgagatggagtcacatgccataggaaaaaagcctgaaaattcagcagacatgattgaagaaggggagcttatcctatctgtgaatatcttgtaccctgttatatttcataagcacaaagaacacaaaccataccaaacaatgctggtgttgggcagtcaaaaactcacacaactgagggattcaattcgatgtgtcagtgacctccagattggtggtgaattcagcaacactcctgaccaagcccctgagcacatcagcaaagacctatacaaatcagccttcttttattttgaaggaacattttataatgataaaagatacccagaatgcagagatttgagcagaactatcattgagtggtcagagtcccatgatagaggctatggaaagtttcagactgctagaatggaagatttcaccttcaatgacttgtgtattaaactgggttttccttacttatactgtcatcagggagactgtgaacatgtcattgtcattactgacataaggcttgtgcatcatgatgactgcttggataggacattgtatcccctccttatcaagaagcattggctatggaccagaaaatgttttgtttgtaaaatgtatacagccagatgggtgacgaacaatgacagttttgcaccagaggacccatgcttcttttgtgatgtttgcttccgaatgctgcactatgattcagaaggcaacaaactgggggaattccttgcttatccttatgttgatcctggaacctttaattaagaatagctacactcacaaaaataccccctcatgaaataactgttctcttggatggttaccttatttctaagaaacgccactgaggaacaggatccactttgaacagtccgctaaagctatcaaaaaaaagtccaaatgacagattttcttataatgatagtatttaaatgtttataacatagtttaattttatatttattccagatagtatttaatttagtgctttttacccattttgagttgagttgtagtactttatatattctgactttaaatcctttgtcagacacacatattctttctcccaatccatgccttccctattcattctctgtccagagttttttgctaaagatagaattattaatgatacatcaagtagtggaagtgttttgaaaattctttgaagaatgtgagagctacaccttctaccatgaggcttccaaggttgtatttaaatttgactgaatatctggatggctaagaacagacatttatcttacacatggaaaactgacgaaacctataagcctatgtgtttgacagtgaagtatgttttatggacttaaatgccacaaacagttaagtccattggcttggagatgacaagcacgagtttctggtatgtctagtgttctcattcactgattcagtcagtacacagataatcagtatagagaacttaagaggctggcttatgttatacctaaatttttactttcttgtatacaacaatgctaaaattgagcagattgataactgccagcaaaccatagatttaagataaatgaatgatttacccaaccctaaaattccatgggtaaaaattttgattcctttattttcaatactgcgttccttataggtcttacatgcatatgcaaggatattttatcttattcattcatttcatactctcaaaacaccaaacttcaaaaagttaattattgtcataatgcattattccatgtgtggtgtcaatacattttagcggacaaagaagaaacatgccagttaaaacatttctgctactgggattctttattaattatttgagaatgttattttgctagttcttaaggttaagtttttcatcaaagactcaggtacctattattgttccctggtgaaactgaggagaaaagttaatcaaccaggttactcccacagtttgcccgtgtgttatgtatcagttatacaggtatcccaccaagttcaagtcaaaagaaattcctaactttgtatatttctggagctataaaacccctgatttaaga

SEQ ID NO: 182437 - DNA, 2574 bp, Homo sapiens
  Payload ID: 15936
  Gene Symbol: SNAPC3
  Gene Name: small nuclear RNA activating complex, polypeptide 3, 50kDa
  Uniprot ID: Q92966
  ENST ID: ENST00000467062
  CDS Start-End: 147-1382
atggcctgccgggaaatgtagtttctgatgccctgcccgcgccgcctcgccgctcgccggccgggcgccccaagcaactacaacttccatcacgctctgcgaggccttgatctgcaggcttttgcaggggaaggagtggggcgaacatggctgaaggaagccgaggtggccctacgtgtagcggggtgggtggcaggcaggacccagtctccggcagtggcggctgcaactttccagagtatgagcttcccgagctaaatacgcgcgctttccatgtgggcgcctttggggagctgtggcggggccgtctgcgcggggccggggacttgtcgctgagggagccgccggcatccgctctgcctgggagccaggcagctgactccgaccgggaggatgccgcggtggccagggatctggactgcagcctggaggcggcggctgagctgagggcggtgtgcggccttgataaactgaaatgccttgaggacggtgaggatccagaagtcattccggagaatactgacctggtgactttgggggttagaaaaaggttcttggaacatcgggaagaaaccattacaatagatcgagcctgcagacaagaaacattcgtttatgagatggagtcacatgccataggaaaaaagcctgaaaattcagcagacatgattgaagaaggggagcttatcctatctgtgaatatcttgtaccctgttatatttcataagcacaaagaacacaaaccataccaaacaatgctggtgttgggcagtcaaaaactcacacaactgagggattcaattcgatgtgtcagtgacctccagattggtggtgaattcagcaacactcctgaccaagcccctgagcacatcagcaaagacctatacaaatcagccttcttttattttgaaggaacattttataatgataaaagatacccagaatgcagagatttgagcagaactatcattgagtggtcagagtcccatgatagaggctatggaaagtttcagactgctagaatggaagatttcaccttcaatgacttgtgtattaaactgggttttccttacttatactgtcatcagggagactgtgaacatgtcattgtcattactgacataaggcttgtgcatcatgatgactgcttggataggacattgtatcccctccttatcaagaagcattggctatggaccagaaaatgttttgtttgtaaaatgtatacagccagatgggtgacgaacaatgacagttttgcaccagaggacccatgcttcttttgtgatgtttgcttccgaatgctgcactatgattcagaaggcaacaaactgggggaattccttgcttatccttatgttgatcctggaacctttaattaagaatagctacactcacaaaaataccccctcatgaaataactgttctcttggatggttaccttatttctaagaaacgccactgaggaacaggatccactttgaacagtccgctaaagctatcaaaaaaaagtccaaatgacagattttcttataatgatagtatttaaatgtttataacatagtttaattttatatttattccagatagtatttaatttagtgctttttacccattttgagttgagttgtagtactttatatattctgactttaaatcctttgtcagacacacatattctttctcccaatccatgccttccctattcattctctgtccagagttttttgctaaagatagaattattaatgatacatcaagtagtggaagtgttttgaaaattctttgaagaatgtgagagctacaccttctaccatgaggcttccaaggttgtatttaaatttgactgaatatctggatggctaagaacagacatttatcttacacatggaaaactgacgaaacctataagcctatgtgtttgacagtgaagtatgttttatggacttaaatgccacaaacagttaagtccattggcttggagatgacaagcacgagtttctgagcatcctttttctggccaatcggacaaaatagagttagcaaagccctcacagcaccctatgaaaaatctctgctcttatacaggattagatgcagacctcatcttgacctaacatctgtaaccaggtatgtcaacctagttatctagtgtagaatccttcagagatatttcagtctctctctcttcactggatggcctgaagaaaagggggaaaggtacaactggaattaggattttctcctgatgaaggaaaaaaagacattaagtctgcattatatttttaaacccatgaaaagactgaaaccaaccaaacaaaagaaaaacttgacttgttattagaacagtcattattatttttttcttcttcaaaactgttattttaccatgttgtatcttcttcccaaagtaatatgcagatgaagcaaaataactcagcaaagtgtcatggaccaagccctttccatcatttctagcataaaagtgaattctctttaaagaacatgagaatgttttatatctgtgataccaacatatttcaaaatcttaataaaaagagaggttgatacaca

SEQ ID NO: 182438 - DNA, 2453 bp, Homo sapiens
  Payload ID: 15936
  Gene Symbol: SNAPC3
  Gene Name: small nuclear RNA activating complex, polypeptide 3, 50kDa
  Uniprot ID: Q92966
  ENST ID: ENST00000610884
  CDS Start-End: 147-1382
atggcctgccgggaaatgtagtttctgatgccctgcccgcgccgcctcgccgctcgccggccgggcgccccaagcaactacaacttccatcacgctctgcgaggccttgatctgcaggcttttgcaggggaaggagtggggcgaacatggctgaaggaagccgaggtggccctacgtgtagcggggtgggtggcaggcaggacccagtctccggcagtggcggctgcaactttccagagtatgagcttcccgagctaaatacgcgcgctttccatgtgggcgcctttggggagctgtggcggggccgtctgcgcggggccggggacttgtcgctgagggagccgccggcatccgctctgcctgggagccaggcagctgactccgaccgggaggatgccgcggtggccagggatctggactgcagcctggaggcggcggctgagctgagggcggtgtgcggccttgataaactgaaatgccttgaggacggtgaggatccagaagtcattccggagaatactgacctggtgactttgggggttagaaaaaggttcttggaacatcgggaagaaaccattacaatagatcgagcctgcagacaagaaacattcgtttatgagatggagtcacatgccataggaaaaaagcctgaaaattcagcagacatgattgaagaaggggagcttatcctatctgtgaatatcttgtaccctgttatatttcataagcacaaagaacacaaaccataccaaacaatgctggtgttgggcagtcaaaaactcacacaactgagggattcaattcgatgtgtcagtgacctccagattggtggtgaattcagcaacactcctgaccaagcccctgagcacatcagcaaagacctatacaaatcagccttcttttattttgaaggaacattttataatgataaaagatacccagaatgcagagatttgagcagaactatcattgagtggtcagagtcccatgatagaggctatggaaagtttcagactgctagaatggaagatttcaccttcaatgacttgtgtattaaactgggttttccttacttatactgtcatcagggagactgtgaacatgtcattgtcattactgacataaggcttgtgcatcatgatgactgcttggataggacattgtatcccctccttatcaagaagcattggctatggaccagaaaatgttttgtttgtaaaatgtatacagccagatgggtgacgaacaatgacagttttgcaccagaggacccatgcttcttttgtgatgtttgcttccgaatgctgcactatgattcagaaggcaacaaactgggggaattccttgcttatccttatgttgatcctggaacctttaattaagaatagctacactcacaaaaataccccctcatgaaataactgttctcttggatggttaccttatttctaagaaacgccactgaggaacaggatccactttgaacagtccgctaaagctatcaaaaaaaagtccaaatgacagattttcttataatgatagtatttaaatgtttataacatagtttaattttatatttattccagatagtatttaatttagtgctttttacccattttgagttgagttgtagtactttatatattctgactttaaatcctttgtcagacacacatattctttctcccaatccatgccttccctattcattctctgtccagagttttttgctaaagatagaattattaatgatacatcaagtagtggaagtgttttgaaaattctttgaagaatgtgagagctacaccttctaccatgaggcttccaaggttgtatttaaatttgactgaatatctggatggctaagaacagacatttatcttacacatggaaaactgacgaaacctataagcctatgtgtttgacagtgaagtatgttttatggacttaaatgccacaaacagttaagtccattggcttggagatgacaagcacgagtttctgagcatcctttttctggccaatcggacaaaatagagttagcaaagccctcacagcaccctatgaaaaatctctgctcttatacaggattagatgcagacctcatcttgacctaacatctgtaaccaggtatgtcaacctagttatctagtgtagaatccttcagagatatttcagtctctctctcttcactggatggcctgaagaaaagggggaaaggtacaactggaattaggattttctcctgatgaaggaaaaaaagacattaagtctgcattatatttttaaacccatgaaaagactgaaaccaaccaaacaaaagaaaaacttgacttgttattagaacagtcattattatttttttcttcttcaaaactgttattttaccatgttgtatcttcttcccaaagtaatatgcagatgaagcaaaataactcagcaaagtgtcatgg

SEQ ID NO: 182439 - DNA, 5010 bp, Homo sapiens
  Payload ID: 15937
  Gene Symbol: SNAPC4
  Gene Name: small nuclear RNA activating complex, polypeptide 4, 190kDa
  Uniprot ID: Q5SXM2
  ENST ID: ENST00000298532
  CDS Start-End: 370-4779
acaccttctacgctgggtggccagtttccatgtggcttggtgtgggagcagagacgggacagtggggcctgtccttgttcatccactccctgcctgtgctggttgcagcctcagagcaggcgggagatgttcttggggcttaggctcctggcagagcacatagcaggagtttgtggggtctgaggttcctgtcccagggttccccgattctgtgcctggcctattaatctttctctggggagcccagtgcccactgccgagcaggctcctgccatcccccatgggcgggtgtgtctgaaggagaatgggatcccggcacggtcttggtttctaacatctcggggtgtgttttggaggcaggcgggagtcatggatgtagatgctgaaagagagaagataacacaggagatcaaggagctggaaaggattttggatcccggctcctcgggctcccacgtggagatctcagaatcaagtctcgagtcagattctgaagcagattcactgccttctgaggacttggatcctgccgatcccccgatctcggaagaagaaaggtggggcgaagccagcaatgacgaggacgatcccaaggataaaaccctccctgaagacccagaaacctgcctgcagctgaacatggtctaccaggaggtcatccaggagaagctggctgaggccaacctgctgctggcccagaaccgggagcagcaggaggaactcatgagggatctggctgggtccaaaggcaccaaggtgaaagatggcaaaagcctgcccccaagcacatacatggggcacttcatgaagccgtatttcaaggacaaggtcacgggcgtggggccacctgccaacgaggacacacgagagaaggctgcccaggggatcaaggctttcgaggagctccttgtgaccaaatggaaaaactgggaaaaggccttgctccgaaagtcagtggtgagtgaccgcctgcagcgattgcttcagcccaagttactgaagctcgagtacttgcaccagaagcagagcaaagtctccagtgagctggagaggcaagccctggagaagcagggcagggaagccgagaaggagatccaggacatcaaccagcttccagaagaggccttgctgggaaacaggctggacagccacgactgggagaagatttccaatattaactttgaaggcagccgcagtgcagaggagatccggaagttctggcagaactcggagcaccccagcatcaacaagcaggagtggagcagggaggaggaggagcggctgcaggcgatcgcggctgcacacggccacctggagtggcagaagattgcagaggagctggggaccagccgcagcgccttccagtgcctgcagaaattccagcagcacaacaaagctctgaaacgcaaggagtggacagaggaggaggaccgcatgctcacgcagctggtgcaggagatgcgcgtcggcagccacatcccctaccgcagaattgtctactatatggaagggagagactccatgcagctgatctaccgatggaccaagagcttggatcctggtctgaagaagggttactgggccccggaggaagatgctaagttgcttcaagctgttgccaaatacggggagcaggattggtttaaaatccgggaagaggtgccaggtaggagcgatgcccagtgccgagatcggtatctcaggagattacatttcagcttgaaaaagggtcggtggaatttaaaagaagaggaacagttaattgaattaatagaaaaatatggtgtcggtcactgggcaaaaatagcttctgagctgccccatcggtctggctcccagtgtctgagcaagtggaagatcatgatggggaagaagcagggtctccggaggcggcggcggagggcccgtcacagcgtccggtggagctctaccagcagcagcggcagcagcagtggcagcagtggagggagcagcagcagcagcagcagcagcagcgaggaggacgagccagagcaggcgcaggccggggagggtgacagagcgctgctgtccccacagtacatggtcccggacatggacctgtgggttcctgccaggcagagcaccagccagccatggagaggaggggcaggggcctggctgggaggccccgctgcctccctcagccctcccaaggggtccagtgccagccagggcggcagcaaggaagcttccaccacagccgcggctcctggagaggagacgagtccggtgcaggtccctgccagggcccacggccctgtcccgaggtctgcccaggcctcccactcagcagacactcgcccggcgggcgcagagaagcaggccctggagggtgggaggcgtctgctgacagtgcctgtggagaccgtgctgagggtgctcagggccaacacggctgctcggagctgcacacagaaagagcagctgaggcagccacccctgcccacctcatccccaggggtcagctctggtgacagcgtggcccgatcccatgtgcagtggctacggcacagagccacccagagtgggcagcggcgctggagacacgctctgcaccggaggctcctgaaccgcaggctgctgctggctgtgaccccttgggtaggggacgttgtcgtgccctgcacacaggcttcccagagacccgccgtagtgcagactcaagcggatggcctcagggagcagctgcagcaggcccgcctggccagcacccctgtgtttaccctgtttacccagctgttccacatcgatactgccggctgcttggaggtcgtccgagagaggaaggccctgccacccaggctgccccaggctggtgctcgggacccaccagttcatcttctgcaggcatcctcaagtgcccagagcaccccaggccacctcttcccaaacgtgccggctcaagaagcctcaaagagtgccagccacaaagggagccgaagactggcgtccagccgggtggagcgcaccctaccccaggcgtccctgctggcttcaaccggcccccggcccaagcccaagactgtgtcggagctgcttcaggagaagcggcttcaggaggcccgtgccagggaggccacccggggcccggtggtgctcccgtcccagctgctggtctcctcgtctgtgatcctccagccccctctaccacacaccccacacggccgcccagccccgggtcccaccgtcttaaatgtaccgctctctgggcctggggcccccgcggcagccaaacctggcacttctggctcctggcaggaggctgggacttcagccaaggacaagagactctccaccatgcaagccctgcccctcgctcctgtcttctcagaggccgagggcacagcccctgctgcttcccaagcccctgccctgggccccggccagatctctgtgagctgccccgagagtggtctcggacagtctcaggcccccgctgcatcccggaagcagggcctgcctgaggcgccaccctttctccccgcagcccccagccccaccccactgcccgtccagcccctcagcctgacgcacataggagggccacatgtggcgaccagtgtccccctgcctgtcacctgggtgctcacagcccaggggcttctccctgttcctgtaccagctgtggtgagccttcccaggccagcagggacccctggccccgcagggctgctggccactctgctgcctcccctgactgagactcgggcggcccagggccccagggccccagcgttgagcagctcttggcagcccccagccaatatgaacagggaaccggagccttcctgcaggacagacaccccagctcctcccacacacgccctctcccaaagtcctgcagaagcggatggcagtgtggcctttgtccctggagaggcccaggtggccagggagatacctgagcccaggacgtcctcccacgctgaccctcctgaagcagaacccccttggtccgggaggctgccagccttcggtggtgtcatcccagcaactgagccaagggggacgccggggtccccctcagggacacaggagcccagggggcctctgggcctggagaagctgcccctgcgccagcctgggcctgagaagggggccctggacctggagaagccgcccctaccccagcctgggcctgagaagggggccctggacctgggcctgctgtcccaggagggcgaggcggccacacagcagtggctggggggccagcggggggtgcgtgtgcctcttctgggcagcagactgccctatcagcccccagccctgtgcagcctgcgagctctgtccggtctcctactccacaagaaggccctggagcacaaggccacctccctggtggtggggggcgaggctgagcggccggccggagcactgcaagcctcactggggctggtgcgggggcagctccaggacaacccggcctacctcctgttgcgggcgcggttcctggcagccttcaccctccctgcgctcctggccaccctggccccccaaggcgtccgcaccaccctctcagtaccttcgagggtgggctctgagagtgaggatgaagacctcctgagtgagctggaacttgcagacagggacgggcagccgggctgcacgacagccacatgccccattcagggagccccagactctggtaaatgctctgcttcctcctgcctggatacttctaatgaccctgacgacctggacgtgctcagaacccggcatgccaggcacacccggaagcggaggcggctggtgtgagcagcaggacaagcactttctcagaagcccgtggccctgctgacgagagacagcccacccccagcctgcaagagaggcagccagaggccaggtatctgctggccgctgactgaccaggtccgcagtgaacagaggcgggcctgccgactgactgtgtggcatggagcatggctgttccccaagtgcacacctgaacacttggaggaataaagttctgtttttaattgtgga

SEQ ID NO: 182440 - DNA, 794 bp, Homo sapiens
  Payload ID: 15938
  Gene Symbol: SNAPC5
  Gene Name: small nuclear RNA activating complex, polypeptide 5, 19kDa
  Uniprot ID: O75971
  ENST ID: ENST00000307979
  CDS Start-End: 32-238
agcccggaggttggctatgtgaccaggcaacatgctgagccggcttcaggaactgcgcaaggaggaggagacgctgctgcggttgaaggcagccctgcacgaccagctgaaccgcctcaagatgttggtgcatgtagacaatgaagcatcaatcaaccaaacaaccctggagctgagcacaaagagtcatgtgacggaagaggaggaggaggaagaggaagaagaatcagattcctaaaggagggggaaagccaggctggtcagttatacaaattgcatttctaaggctcaggctacttctcctcaaggaaatcatcttgccctgggccctgtgatctgcttgaaaggaaagcaagaactataaggaggatgtgtagttgcaaaaatggctccatcggtaactcaagcttcagaatgttatgacatacagaaaatcaaagatgctgtgtcttagcattgagtaatatgggtggtgctgtctgtaatctggtcagattcagttaactgttcagaacaaaatttcctctgaaatactgttgagaaagtctgtcatttgcaaaaagagcagagtttaaatacaagccagtctttccagtcaacaatgcctctttgaagaaaaccaattaaagactgtttgcatgccgctgaacccttgtgagcagttaggacacagtctaggacagaaagatgacaaggggaaggactgagggccgtctgagagcacaagctgtttctacctctcagaggcattgaaatattgcatgctataaactgctttgtgtatctgttaccac

SEQ ID NO: 182441 - DNA, 1002 bp, Homo sapiens
  Payload ID: 15938
  Gene Symbol: SNAPC5
  Gene Name: small nuclear RNA activating complex, polypeptide 5, 19kDa
  Uniprot ID: O75971
  ENST ID: ENST00000316634
  CDS Start-End: 83-379
tttccgggagtcggcggcgatggcgtcatcaccgagtgccgggccgacagcagcccggaggttggctatgtgaccaggcaacatgctgagccggcttcaggaactgcgcaaggaggaggagacgctgctgcggttgaaggcagccctgcacgaccagctgaaccgcctcaaggttgaagaattagccctccaatcaatgatcagttctagaagaggggatgagatgctgtcttctcacactgtacctgaacagtcacatgatatgttggtgcatgtagacaatgaagcatcaatcaaccaaacaaccctggagctgagcacaaagagtcatgtgacggaagaggaggaggaggaagaggaagaagaatcagattcctaaaggagggggaaagccaggctggtcagttatacaaattgcatttctaaggctcaggctacttctcctcaaggaaatcatcttgccctgggccctgtgatctgcttgaaaggaaagcaagaactataaggaggatgtgtagttgcaaaaatggctccatcggtaactcaagcttcagaatgttatgacatacagaaaatcaaagatgctgtgtcttagcattgagtaatatgggtggtgctgtctgtaatctggtcagattcagttaactgttcagaacaaaatttcctctgaaatactgttgagaaagtctgtcatttgcaaaaagagcagagtttaaatacaagccagtctttccagtcaacaatgcctctttgaagaaaaccaattaaagactgtttgcatgccgctgaacccttgtgagcagttaggacacagtctaggacagaaagatgacaaggggaaggactgagggccgtctgagagcacaagctgtttctacctctcagaggcattgaaatattgcatgctataaactgctttgtgtatctgttaccacctctcacttgagacatcactcactggtaaaatgttttataaataaatttataagtagccatcatgga

SEQ ID NO: 182442 - DNA, 749 bp, Homo sapiens
  Payload ID: 15938
  Gene Symbol: SNAPC5
  Gene Name: small nuclear RNA activating complex, polypeptide 5, 19kDa
  Uniprot ID: O75971
  ENST ID: ENST00000395589
  CDS Start-End: 20-316
ggctatgtgaccaggcaacatgctgagccggcttcaggaactgcgcaaggaggaggagacgctgctgcggttgaaggcagccctgcacgaccagctgaaccgcctcaaggttgaagaattagccctccaatcaatgatcagttctagaagaggggatgagatgctgtcttctcacactgtacctgaacagtcacatgatatgttggtgcatgtagacaatgaagcatcaatcaaccaaacaaccctggagctgagcacaaagagtcatgtgacggaagaggaggaggaggaagaggaagaagaatcagattcctaaaggagggggaaagccaggctggtgaaatgcacatctgaacagagacaggcatgggaaggaggcccaaaagcgacatggcaaaccaccgggcaggggactcgctctttgttgcttcccaaacacttagacgccagcagcatgggttggtgtgctgggctggttaaggccgatggtggagcagagccaacctgcaaaatccacttcctcagcatcagatctcttgataaaagcatgaacctgcatgtaaggaaacgagaggacgtggtgttaaaaagaaacaaaaaaacaaaacccaccaggaaggaaaatccaagagtttcaggtctagagcttgtgctgcacttggaaagagcacctggcacctgcccctgagcaacagtggggccagctgcaggcccaaagacctgctccaccagtcacagcagctgtgagg

SEQ ID NO: 182443 - DNA, 587 bp, Homo sapiens
  Payload ID: 15938
  Gene Symbol: SNAPC5
  Gene Name: small nuclear RNA activating complex, polypeptide 5, 19kDa
  Uniprot ID: O75971
  ENST ID: ENST00000562411
  CDS Start-End: 50-346
gagtgccgggccgacagcagcccggaggttggctatgtgaccaggcaacatgctgagccggcttcaggaactgcgcaaggaggaggagacgctgctgcggttgaaggcagccctgcacgaccagctgaaccgcctcaaggttgaagaattagccctccaatcaatgatcagttctagaagaggggatgagatgctgtcttctcacactgtacctgaacagtcacatgatatgttggtgcatgtagacaatgaagcatcaatcaaccaaacaaccctggagctgagcacaaagagtcatgtgacggaagaggaggaggaggaagaggaagaagaatcagattcctaaaggagggggaaagccaggctggtcagttatacaaattgcatttctaaggctcaggctacttctcctcaaggaaatcatcttgccctgggccctgtgatctgcttgaaaggaaagcaagaactataaggaggatgtgtagttgcaaaaatggctccatcggtgaaatgcacatctgaacagagacaggcatgggaaggaggcccaaaagcgacatggcaaaccaccgggcaggggactcgct

SEQ ID NO: 182444 - DNA, 1069 bp, Homo sapiens
  Payload ID: 15938
  Gene Symbol: SNAPC5
  Gene Name: small nuclear RNA activating complex, polypeptide 5, 19kDa
  ENST ID: ENST00000565465
  CDS Start-End: 29-232
ccggaggttggctatgtgaccaggcaacatgctgagccggcttcaggaactgcgcaaggaggaggagacgctgctgcggttgaaggcagccctgcacgaccagctgaaccgcctcaaggtgaccccgcggccctctcctgcccctcctccattcctcccgagcgaccatttccccccaacctgggcctctgtggtgaccacctgctgcggccagttctccgctactcactagctgtggtggcgccaatttagaggtttacaaacaaacaggttgaagaattagccctccaatcaatgatcagttctagaagaggggatgagatgctgtcttctcacactgtacctgaacagtcacatgatatgttggtgcatgtagacaatgaagcatcaatcaaccaaacaaccctggagctgagcacaaagagtcatgtgacggaagaggaggaggaggaagaggaagaagaatcagattcctaaaggagggggaaagccaggctggtcagttatacaaattgcatttctaaggctcaggctacttctcctcaaggaaatcatcttgccctgggccctgtgatctgcttgaaaggaaagcaagaactataaggaggatgtgtagttgcaaaaatggctccatcggtaactcaagcttcagaatgttatgacatacagaaaatcaaagatgctgtgtcttagcattgagtaatatgggtggtgctgtctgtaatctggtcagattcagttaactgttcagaacaaaatttcctctgaaatactgttgagaaagtctgtcatttgcaaaaagagcagagtttaaatacaagccagtctttccagtcaacaatgcctctttgaagaaaaccaattaaagactgtttgcatgccgctgaacccttgtgagcagttaggacacagtctaggacagaaagatgacaaggggaaggactgagggccgtctgagagcacaagctgtttctacctctcagaggcattgaaatattgcatgctataaactgctttgtgtatctgttaccacctctcacttgagacatcactcactggtaaaatgttt

SEQ ID NO: 182445 - DNA, 1741 bp, Homo sapiens
  Payload ID: 15938
  Gene Symbol: SNAPC5
  Gene Name: small nuclear RNA activating complex, polypeptide 5, 19kDa
  ENST ID: ENST00000568875
  CDS Start-End: 50-301
gagtgccgggccgacagcagcccggaggttggctatgtgaccaggcaacatgctgagccggcttcaggaactgcgcaaggaggaggagacgctgctgcggttgaaggcagccctgcacgaccagctgaaccgcctcaaggttgaagaattagccctccaatcaatgatcagttctagaagaggggatgagatgctgtcttctcacactgtacctgaacagtcacatgatgtaagcttaatcaagtgcaggcctaggagagaatgcaaagtctgctctgctcccatgctgcttgggtggtgaagaactgttgtaaatcacattacctagcccaaagggctctgagaagtgctgataacagttttctggtttaataaggtggcaactctccattaaccaccttcctaccagctagttatacactaattaattaagtagttactaatgttttacctccatcctcctcgtcatccattctgtctagttactcagatgaacccgggggagagtggagatttttgtaggacgatgtcaaaactcttgattttttgtgaataagtaaccttgagattcaagagtgtggcttcaagtacaaggcacagtgctaaaagatgagctccagttctcatcatactcatctcttaccaaatgccctcaaatgttggtgcatgtagacaatgaagcatcaatcaaccaaacaaccctggagctgagcacaaagagtcatgtgacggaagaggaggaggaggaagaggaagaagaatcagattcctaaaggagggggaaagccaggctggtcagttatacaaattgcatttctaaggctcaggctacttctcctcaaggaaatcatcttgccctgggccctgtgatctgcttgaaaggaaagcaagaactataaggaggatgtgtagttgcaaaaatggctccatcggtaactcaagcttcagaatgttatgacatacagaaaatcaaagatgctgtgtcttagcattgagtaatatgggtggtgctgtctgtaatctggtcagattcagttaactgttcagaacaaaatttcctctgaaatactgttgagaaagtctgtcatttgcaaaaagagcagagtttaaatacaagccagtctttccagtcaacaatgcctctttgaagaaaaccaattaaagactgtttgcatgccgctgaacccttgtgagcagttaggacacagtctaggacagaaagatgacaaggggaaggactgagggccgtctgagagcacaagctgtttctacctctcagaggcattgaaatattgcatgctataaactgctttgtgtatctgttaccacctctcacttgagacatcactcactggtaaaatgttttataaataaatttataagtagccatcatggagcctgctggtttctagatagcgacagagagaagcagcagttccttctctgaggaaaagatacaacaggatggtttgaaatccatttctggtccttaagagagatgtgccatgcttggaagactggattttttgttttgttttttgttttgttttgtttgagacggagtttcactcttattgcccaggctggagtgcaatggcgcgattttggctcactgcaacctccccttctcgggttcaagtgattcttctgcctcagcctccagagtagctaggattacaggcatgcaccaccacacccggctaattttgtatttttagtaaagatgggatttttccatgtt

SEQ ID NO: 182446 - DNA, 574 bp, Homo sapiens
  Payload ID: 15938
  Gene Symbol: SNAPC5
  Gene Name: small nuclear RNA activating complex, polypeptide 5, 19kDa
  ENST ID: ENST00000566658
  CDS Start-End: 8-211
aggcaacatgctgagccggcttcaggaactgcgcaaggaggaggagacgctgctgcggttgaaggcagccctgcacgaccagctgaaccgcctcaaggtgaccccgcggccctctcctgcccctcctccattcctcccgagcgaccatttccccccaacctgggcctctgtggtgaccacctgctgcggccagttctccgctactcactagctgtggtggcgccaatttagaggtttacaaacaaacagatgttggtgcatgtagacaatgaagcatcaatcaaccaaacaaccctggagctgagcacaaagagtcatgtgacggaagaggaggaggaggaagaggaagaagaatcagattcctaaaggagggggaaagccaggctggtcagttatacaaattgcatttctaaggctcaggctacttctcctcaaggaaatcatcttgccctgggccctgtgatctgcttgaaaggaaagcaagaactataaggaggatgtgtagttgcaaaaatggctccatcggtaactcaagcttcagaatgttatgacatacagaaaatcaaagatgctg

SEQ ID NO: 182447 - DNA, 920 bp, Homo sapiens
  Payload ID: 15938
  Gene Symbol: SNAPC5
  Gene Name: small nuclear RNA activating complex, polypeptide 5, 19kDa
  Uniprot ID: O75971
  ENST ID: ENST00000563480
  CDS Start-End: 20-316
ggctatgtgaccaggcaacatgctgagccggcttcaggaactgcgcaaggaggaggagacgctgctgcggttgaaggcagccctgcacgaccagctgaaccgcctcaaggttgaagaattagccctccaatcaatgatcagttctagaagaggggatgagatgctgtcttctcacactgtacctgaacagtcacatgatatgttggtgcatgtagacaatgaagcatcaatcaaccaaacaaccctggagctgagcacaaagagtcatgtgacggaagaggaggaggaggaagaggaagaagaatcagattcctaaaggagggggaaagccaggctggtgaaatgcacatctgaacagagacaggcatgggaaggaggcccaaaagcgacatggcaaaccaccgggcaggggactcgctctttgttgcttcccaaacacttagacgccagcagcatgggttggtgtgctgggctggttaaggccgatggtggagcagagccaacctgcaaaatccacttcctcagcatcagatctcttgataaaagcatgaacctgcatgtaaggaaacgagaggacgtggtgttaaaaagaaacaaaaaaacaaaacccaccaggaaggaaaatccaagagtttcaggtctagagcttgtgctgcacttggaaagagcacctggcacctgcccctgagcaacagtggggccagctgcaggcccaaagacctgctccaccagtcacagcagctgtgaggccttgggcaagtcacctcttggagcctactcgtgcagtatggagacagtaactctgccttaaatgcctcacaggcttgttagaagggacaaagaaaatgatggacttagtgcatattatatactatatacaccgtctatggctgtccagatatttacagtattacttagct

SEQ ID NO: 182448 - DNA, 270 bp, Homo sapiens
  Payload ID: 15939
  Gene Symbol: SPRR1A
  Gene Name: small proline-rich protein 1A
  Uniprot ID: P35321
  ENST ID: ENST00000368762
  CDS Start-End: 1-270
atgaattctcagcagcagaagcagccttgcaccccaccccctcagcctcagcagcagcaggtgaaacaaccttgccagcctccaccccaggaaccatgcatccccaaaaccaaggagccctgccaccccaaggtgcctgagccctgccaccccaaagtgcctgagccctgccagcccaaggttccagagccctgccagcccaaggtgcctgagccctgcccttcaacggtcactccagcaccagcccagcagaagaccaagcagaagtaa

SEQ ID NO: 182449 - DNA, 620 bp, Homo sapiens
  Payload ID: 15940
  Gene Symbol: SPRR1B
  Gene Name: small proline-rich protein 1B
  Uniprot ID: P22528
  ENST ID: ENST00000307098
  CDS Start-End: 66-335
caccagttctaagggaccatacagagtattcctctcttcacaccaggaccagtcactgttgcagcatgagttcccagcagcagaagcagccttgcaccccaccccctcagcttcagcagcagcaggtgaaacagccttgccagcctccacctcaggaaccatgcatccccaaaaccaaggagccctgccaccccaaggtgcctgagccctgccaccccaaagtgcccgagccctgccagcccaaggttccagagccatgccaccccaaggtgcctgagccctgcccttcaatagtcactccagcaccagcccagcagaagaccaagcagaagtaatgtggtccacagccatgcccttgaggagccggccaccagatgctgaatcccctatcccattctgcgtatgagtcccatttgccttgcaattagcattctgtctcccccaaaaaagaatgtgctatgaagctttctttcctacacactctgagtctctgaatgaagctgaaggtcttagtaccagagctagttttcagctgctcagaattcatctgaagagagacttaagatgaaagcaaatgattcagctcccttatacccccattaaattcactttcaattcca

SEQ ID NO: 182450 - DNA, 709 bp, Homo sapiens
  Payload ID: 15941
  Gene Symbol: SPRR2A
  Gene Name: small proline-rich protein 2A
  Uniprot ID: P35326
  ENST ID: ENST00000392653
  CDS Start-End: 87-305
agagatcctctgctgcacgactcttaaacccctggtacctgagcactgatctgccttggagaacctgatcctgagactccagcaggatgtcttatcaacagcagcagtgcaagcagccctgccagccacctcctgtgtgccccacgccaaagtgcccagagccatgtccacccccgaagtgccctgagccctgcccaccaccaaagtgtccacagccctgcccacctcagcagtgccagcagaaatatcctcctgtgacaccttccccaccctgccagtcaaagtatccaccgaagagcaagtaacagcttcagaattcatcaggaccaagaaaggataaggatatttggctcacctcgttccacagctccaccttcatcttctcatcaaagcctaccatggatacacagggagcttctttctccttagccagtaatctgcccatgatgatccctgacagcaaaaagtttcttttctgaggctgccatactgccactgtccaggtggagactgagcaaaggaagtcctgggctgtgccagctcccagagcttcggaagaaagagcagcagctctctccctgggaaccatcagagaattctgttgatgtgttctgtgtctgtctgtcacctggtcacgagcttctaccacctttgcaattgtcacttatctttcactccctgaataaagtatctatgcatatatatttgt

SEQ ID NO: 182451 - DNA, 617 bp, Homo sapiens
  Payload ID: 15942
  Gene Symbol: SPRR2B
  Gene Name: small proline-rich protein 2B
  Uniprot ID: P35325
  ENST ID: ENST00000368755
  CDS Start-End: 2-220
gatgtcttatcaacagcagcagtgcaagcagccctgccagccacctcctgtgtgccccacgccaaagtgcccagagccatgtccacccccgaagtgccctgagccctgcccaccaccaaagtgtccacagccctgcccacctcagcagtgccagcagaaatatcctcctgtgacaccttccccaccctgccagccaaagtatccaccgaagagcaagtaacagcttcaggattcatcaggagcatgagaggataaggataattggctcacctcgttccacagctccaccttcatcttctcatcaaagcttatcatggattcatagggagcttctttccccttagcctgtgatctgcccatgatgttccctgatagcaaaaggtttcctttctaaggctgccatactgccactgtccaggtggagactgagcaaaggaaccttggctttgtcagttcccagagcttcagcagaaagagctgcagctgtgtgcctgggaaccatcagagaattctgttgatgtgttctgtgtctgtctttcacctgggcatgagcttctaccacctgtgcaattgtcacttttctttcactccctgaataaagtatctatgcatatata

SEQ ID NO: 182452 - DNA, 682 bp, Homo sapiens
  Payload ID: 15943
  Gene Symbol: SPRR2D
  Gene Name: small proline-rich protein 2D
  Uniprot ID: P22532
  ENST ID: ENST00000360379
  CDS Start-End: 61-279
aactcctggtactctagcaccgatctgctttggagaacctgatcctgagactccagcaggatgtcttatcaacagcagcagtgcaagcagccctgccagccacctcctgtgtgccccacgccaaagtgcccagagccatgtccacccccgaagtgccctgagccctgcccatcaccaaagtgtccacagccctgcccacctcagcagtgccagcagaaatatcctcctgtgacaccttccccaccctgccagccaaagtgtccacccaagagcaagtaacagcttcaggattcatcaggagcatgagaggataaggataattggctcacctcgttccacagctccacttgcatcttctcaccaaagccttccatggatgcacagggagcttctttctccttaacctgtggcctgcctgtgatgatctgtgacagcaaaagattccctttctgaggctgccatactgccactgtccaggtggagctaagaaaaggaagtcctcagctgtgccagctcccagagcttcggaagaaagagcagcagctctctccctgggaaccatcagacaattctgttgatgtgttctgtgtctgtctgtcacctggtcatgagcttctaccacctttgcaattgtcatttatctttcactccctgaataaagtatctatgcatatatatttgt

SEQ ID NO: 182453 - DNA, 788 bp, Homo sapiens
  Payload ID: 15943
  Gene Symbol: SPRR2D
  Gene Name: small proline-rich protein 2D
  Uniprot ID: P22532
  ENST ID: ENST00000368756
  CDS Start-End: 290-508
ctgtagtacacatccttgatggcaccaagtagcaaacgtgctgtggagactagatctcactctcaaatctgtcctgggatgcaagtgcctctacgaatgtggtgcagaagctacaaatgtggtgcagaagacagcttcaaagaggaaaggaatataggtgccaagagcctgcaatccttcccaaacagccctttgttctgtgctcaagtcaacccactgggactttactacagataatgataagagaaatggcttgtgagattgctcatgatcctgagactccagcaggatgtcttatcaacagcagcagtgcaagcagccctgccagccacctcctgtgtgccccacgccaaagtgcccagagccatgtccacccccgaagtgccctgagccctgcccatcaccaaagtgtccacagccctgcccacctcagcagtgccagcagaaatatcctcctgtgacaccttccccaccctgccagccaaagtgtccacccaagagcaagtaacagcttcaggattcatcaggagcatgagaggataaggataattggctcacctcgttccacagctccacttgcatcttctcaccaaagccttccatggatgcacagggagcttctttctccttaacctgtggcctgcctgtgatgatctgtgacagcaaaagattccctttctgaggctgccatactgccactgtccaggtggagctaagaaaaggaagtcctcagctgtgccagctcccagagcttcggaagaaagagcagcagctctctccctgggaac

SEQ ID NO: 182454 - DNA, 800 bp, Homo sapiens
  Payload ID: 15943
  Gene Symbol: SPRR2D
  Gene Name: small proline-rich protein 2D
  Uniprot ID: P22532
  ENST ID: ENST00000368757
  CDS Start-End: 282-500
aggctgtagtacacatccttgatggcaccaagtagcaaacgtgctgtggagactagatctcactctcaaatctgtcctgggatgcaagtgcctctacgaatgtggtgcagaagctacaaatgtggtgcagaagacagcttcaaagaggaaaggaatataggtaaaaatctgaggttttatctgagaaaaaggtggcaaagaaaatttcagtcttgaacagggtcagcagatagcacaatgtggtcagcctgcaaacccagagatcctgagactccagcaggatgtcttatcaacagcagcagtgcaagcagccctgccagccacctcctgtgtgccccacgccaaagtgcccagagccatgtccacccccgaagtgccctgagccctgcccatcaccaaagtgtccacagccctgcccacctcagcagtgccagcagaaatatcctcctgtgacaccttccccaccctgccagccaaagtgtccacccaagagcaagtaacagcttcaggattcatcaggagcatgagaggataaggataattggctcacctcgttccacagctccacttgcatcttctcaccaaagccttccatggatgcacagggagcttctttctccttaacctgtggcctgcctgtgatgatctgtgacagcaaaagattccctttctgaggctgccatactgccactgtccaggtggagctaagaaaaggaagtcctcagctgtgccagctcccagagcttcggaagaaagagcagcagctctctccctgggaaccatcagacaattctgttgat

SEQ ID NO: 182455 - DNA, 782 bp, Homo sapiens
  Payload ID: 15943
  Gene Symbol: SPRR2D
  Gene Name: small proline-rich protein 2D
  Uniprot ID: P22532
  ENST ID: ENST00000368758
  CDS Start-End: 180-398
aggctgtagtacacatccttgatggcaccaagtagcaaacgtgctgtggagactagatctcactctcaaatctgtcctgggatgcaagtgcctctacgaatgtggtgcagaagctacaaatgtggtgcagaagacagcttcaaagaggaaaggaatatagatcctgagactccagcaggatgtcttatcaacagcagcagtgcaagcagccctgccagccacctcctgtgtgccccacgccaaagtgcccagagccatgtccacccccgaagtgccctgagccctgcccatcaccaaagtgtccacagccctgcccacctcagcagtgccagcagaaatatcctcctgtgacaccttccccaccctgccagccaaagtgtccacccaagagcaagtaacagcttcaggattcatcaggagcatgagaggataaggataattggctcacctcgttccacagctccacttgcatcttctcaccaaagccttccatggatgcacagggagcttctttctccttaacctgtggcctgcctgtgatgatctgtgacagcaaaagattccctttctgaggctgccatactgccactgtccaggtggagctaagaaaaggaagtcctcagctgtgccagctcccagagcttcggaagaaagagcagcagctctctccctgggaaccatcagacaattctgttgatgtgttctgtgtctgtctgtcacctggtcatgagcttctaccacctttgcaattgtcatttatctttcactccctgaataaagta

SEQ ID NO: 182456 - DNA, 678 bp, Homo sapiens
  Payload ID: 15944
  Gene Symbol: SPRR2E
  Gene Name: small proline-rich protein 2E
  Uniprot ID: P22531
  ENST ID: ENST00000368750
  CDS Start-End: 62-280
aaactcctggtacttgagcactgatctgctttggagaacctgattctgagactccagcaggatgtcttatcaacagcagcagtgcaagcagccctgccagccacctcctgtgtgccccacgccaaagtgcccagagccatgtccacccccgaagtgccctgagccctgcccaccaccaaagtgtccacagccctgcccacctcagcagtgccagcaaaaatgtcctcctgtgacaccttccccaccctgccagccaaagtgtccacccaagagcaagtaacagcttcagaattcatcaggagcatgaaaggataaggataattggctcaccttgttccacagcttcacctgcatcttctcatcaaagcctaccatggatacacagttagcttctttcctcttagccagtgatctgcccatgatgatccctgatagcaaaaggtttcctttctgaggctgccatattgccactgtccaggtggagactgagaaaggaagtcctcagcagtgtcagttcccagagctttggaagaaggaccagcagctctgtccctgggaaccatcaaaaaatgctgttgatgttttctgtgtctgtctgtcacctgggcatgggcttctaacacctgtgcaattgtcacttttctttcactccctgaataaaatatctttgcatacgta

SEQ ID NO: 182457 - DNA, 692 bp, Homo sapiens
  Payload ID: 15944
  Gene Symbol: SPRR2E
  Gene Name: small proline-rich protein 2E
  Uniprot ID: P22531
  ENST ID: ENST00000368751
  CDS Start-End: 76-294
gaaagtgtctgttcttgtcttttgttcacttttcaaaggggctgtttatttttcatattctgagactccagcaggatgtcttatcaacagcagcagtgcaagcagccctgccagccacctcctgtgtgccccacgccaaagtgcccagagccatgtccacccccgaagtgccctgagccctgcccaccaccaaagtgtccacagccctgcccacctcagcagtgccagcaaaaatgtcctcctgtgacaccttccccaccctgccagccaaagtgtccacccaagagcaagtaacagcttcagaattcatcaggagcatgaaaggataaggataattggctcaccttgttccacagcttcacctgcatcttctcatcaaagcctaccatggatacacagttagcttctttcctcttagccagtgatctgcccatgatgatccctgatagcaaaaggtttcctttctgaggctgccatattgccactgtccaggtggagactgagaaaggaagtcctcagcagtgtcagttcccagagctttggaagaaggaccagcagctctgtccctgggaaccatcaaaaaatgctgttgatgttttctgtgtctgtctgtcacctgggcatgggcttctaacacctgtgcaattgtcacttttctttcactccctgaataaaatatctttgcatacgta

SEQ ID NO: 182458 - DNA, 681 bp, Homo sapiens
  Payload ID: 15945
  Gene Symbol: SPRR2F
  Gene Name: small proline-rich protein 2F
  Uniprot ID: Q96RM1
  ENST ID: ENST00000468739
  CDS Start-End: 62-280
aaactcctggtacctaagcaccgatctgccttggagaacctgattctgagactccagcaggatgtcttatcaacagcagcagtgcaagcagccctgccagccacctcctgtgtgccccgcgccaaagtgcccagagccatgtccacccccgaagtgccctgagccctgcccaccatcaaagtgtccacagtcctgcccacctcagcagtgccagcagaaatgtcctcctgtgacaccttccccaccctgccagccaaagtgtccacccaagagcaagtaacagcttcaggattcatcaggagcatgaaaggataaggataattggctcacctcgttccacagctccacctgcatcttctcatcaaagccatccagggatacacagggagcttctttcctcttagcctgtgatcggcctgtgatgatctctgatagcaaaaggttttctttttgaggctgccatactgccactgtccaggtggagactgagcaaaggaagtcctgggctgtgccagctcccagagcttcagaagaaagagcagctctctccctgggaaccattagagaattctgttgatgttttctgtgtctgtctgtcccctgggcatgagcttccaccacctgtgcagttgtcactttcctttcactccctgaataaagaatctatgcatatatatttgt

SEQ ID NO: 182459 - DNA, 568 bp, Homo sapiens
  Payload ID: 15946
  Gene Symbol: SPRR2G
  Gene Name: small proline-rich protein 2G
  Uniprot ID: Q9BYE4
  ENST ID: ENST00000368748
  CDS Start-End: 40-261
agatctttgaagactctgattctctgagactgaggagagatgtcttaccagcagcagcagtgcaagcagccctgccagccacctcctgtgtgccccacgccaaagtgcccagagccatgtccacccccgaagtgccctgagccttacctgcctcctccttgtccacctgagcattgcccacctccaccatgccaggataaatgccctcctgtgcaaccatacccaccctgccagcagaagtatccacccaagagcaagtaacatcactagaattcatcaggaccatgaaacaacaagatccagtggctcttcttactcccaggactccatcatcttcccttcagctgtagtgggaggctgcatcttccctaacctctgtctggcttgagcgttgacagagaaaaggcttagttctgaaaaccgatatgttgttggaagatgagcagccagatcactgcctaatctcgctttgctgtctgtgatgtagatggtggttcctatcctgagagcaagtgtgtttattcttttgcttctccccaataaagcacatgtttcatggtcaagccca

SEQ ID NO: 182460 - DNA, 878 bp, Homo sapiens
  Payload ID: 15947
  Gene Symbol: SPRR3
  Gene Name: small proline-rich protein 3
  Uniprot ID: Q9UBC9
  ENST ID: ENST00000295367
  CDS Start-End: 43-552
cctcgaccttctctgcacagcaggtccagcatcctttgaagcatgagttcttaccagcagaagcagacctttaccccaccacctcagcttcaacagcagcaggtgaaacaacccagccagcctccacctcaggaaatatttgttcccacaaccaaggagccatgccactcaaaggttccacaacctggaaacacaaagattccagagccaggctgtaccaaggtccctgagccaggctgtaccaaggtccctgagccaggctgtaccaaggtccctgagccaggttgtaccaaggtccctgagccaggctgtaccaaggtccctgagccaggttgtaccaaggtccctgagccaggctacaccaaggtccctgaaccaggcagcatcaaggtccctgaccaaggcttcatcaagtttcctgagccaggtgccatcaaagttcctgagcaaggatacaccaaagttcctgtgccaggctacacaaagctaccagagccatgtccttcaacggtcactccaggcccagctcagcagaagaccaagcagaagtaatttggtgcacagacaagcccttgagaagccaaccaccagatgctggacaccctcttcccatctgtttctgtgtcttaattgtctgtagaccttgtaatcagcacattgtcaccccaagccatagtctctctcttatttgtatcctaaaaatacgtactataaagcttttgttcacacacactctgaagaatcctgtaagcccctgaattaagcagaaagtcttcatggcttttctggtcttcggctgctcagggttcatctgaagattcgaatgaaaagaaatgcatgtttcctgctcttccctcattaaattgcttttaattcca

SEQ ID NO: 182461 - DNA, 985 bp, Homo sapiens
  Payload ID: 15947
  Gene Symbol: SPRR3
  Gene Name: small proline-rich protein 3
  Uniprot ID: Q9UBC9
  ENST ID: ENST00000331860
  CDS Start-End: 151-660
tcaccagatcccagaggctgaacacctcgaccttctctgcacagcagatgatccctgagcagctgaagaccagaaaagccactaagactttctgcttaattcaggagcttagaggattcttcaaagagtgtgtccagcatcctttgaagcatgagttcttaccagcagaagcagacctttaccccaccacctcagcttcaacagcagcaggtgaaacaacccagccagcctccacctcaggaaatatttgttcccacaaccaaggagccatgccactcaaaggttccacaacctggaaacacaaagattccagagccaggctgtaccaaggtccctgagccaggctgtaccaaggtccctgagccaggctgtaccaaggtccctgagccaggttgtaccaaggtccctgagccaggctgtaccaaggtccctgagccaggttgtaccaaggtccctgagccaggctacaccaaggtccctgaaccaggcagcatcaaggtccctgaccaaggcttcatcaagtttcctgagccaggtgccatcaaagttcctgagcaaggatacaccaaagttcctgtgccaggctacacaaagctaccagagccatgtccttcaacggtcactccaggcccagctcagcagaagaccaagcagaagtaatttggtgcacagacaagcccttgagaagccaaccaccagatgctggacaccctcttcccatctgtttctgtgtcttaattgtctgtagaccttgtaatcagcacattgtcaccccaagccatagtctctctcttatttgtatcctaaaaatacgtactataaagcttttgttcacacacactctgaagaatcctgtaagcccctgaattaagcagaaagtcttcatggcttttctggtcttcggctgctcagggttcatctgaagattcgaatgaaaagaaatgcatgtttcctgctcttccctcattaaattgcttttaattcc

SEQ ID NO: 182462 - DNA, 622 bp, Homo sapiens
  Payload ID: 15947
  Gene Symbol: SPRR3
  Gene Name: small proline-rich protein 3
  ENST ID: ENST00000443178
  CDS Start-End: 147-622
cagatcccagaggctgaacacctcgaccttctctgcacagcagatgatccctgagcagctgaagaccagaaaagccactaagactttctgcttaattcaggagcttagaggattcttcaaagagtgtgtccagcatcctttgaagcatgagttcttaccagcagaagcagacctttaccccaccacctcagcttcaacagcagcaggtgaaacaacccagccagcctccacctcaggaaatatttgttcccacaaccaaggagccatgccactcaaaggttccacaacctggaaacacaaagattccagagccaggctgtaccaaggtccctgagccaggctgtaccaaggtccctgagccaggctgtaccaaggtccctgagccaggttgtaccaaggtccctgagccaggctgtaccaaggtccctgagccaggttgtaccaaggtccctgagccaggctacaccaaggtccctgaaccaggcagcatcaaggtccctgaccaaggcttcatcaagtttcctgagccaggtgccatcaaagttcctgagcaaggatacaccaaagttcctgtgccaggctacacaaagctaccagagccatgtccttcaacggtcactcc

SEQ ID NO: 182463 - DNA, 733 bp, Homo sapiens
  Payload ID: 15948
  Gene Symbol: SPRR4
  Gene Name: small proline-rich protein 4
  Uniprot ID: Q96PI1
  ENST ID: ENST00000328051
  CDS Start-End: 50-289
ctctcctggggtccagcttgtcgcctctggctcacctgttcctagagcaatgtcttcccagcagcagcagcggcagcagcagcagtgcccaccccagagggcccagcagcagcaagtgaagcagccttgtcagccaccccctgttaaatgtcaagagacatgtgcacccaaaaccaaggatccatgtgctccccaggtcaagaagcaatgcccaccgaaaggcaccatcattccagcccagcagaagtgtccctcagcccagcaagcctccaagagcaaacagaagtaaggatggactggatattaccatcatccaccatcctggctaccagatggaaccttctcttcttccttctcctcttccctccagctcttgagcctaccctcctctcacatctcctcctgcccaagatgtaaggaagcattgtaaggatttcttcccatcgtacccttccccacacataccaccttggcttcttctatatcccaccccgatgctctcccaggtgggtgtgagagagacctcattctctgcaggctccagcgtggccacagctaaggcccatccatttcccaaagtgaggaaagtgtctgggcttcttctggggttccaccctgacaagtagggtcacagaggctggtgcacagtttctgcctcattcctctccatgatgccccctgctctgggcttctctcctgttttccccaataaatatgtgcctcatgtaataaa

SEQ ID NO: 182464 - DNA, 831 bp, Homo sapiens
  Payload ID: 15949
  Gene Symbol: SUMO1
  Gene Name: small ubiquitin-like modifier 1
  Uniprot ID: P63165
  ENST ID: ENST00000392244
  CDS Start-End: 116-346
gcagccgcggtgttgtgctgtggggaagggagaaggatttgtaaaccccggagcgaggttctgcttacccgaggccgctgctgtgcggagacccccgggtgaagccaccgtcatcatgtctgaccaggatagcagtgagattcacttcaaagtgaaaatgacaacacatctcaagaaactcaaagaatcatactgtcaaagacagggtgttccaatgaattcactcaggtttctctttgagggtcagagaattgctgataatcatactccaaaagaactgggaatggaggaagaagatgtgattgaagtttatcaggaacaaacggggggtcattcaacagtttagatattctttttattttttttcttttccctcaatccttttttatttttaaaaatagttcttttgtaatgtggtgttcaaaacggaattgaaaactggcaccccatctctttgaaacatctggtaatttgaattctagtgctcattattcattattgtttgttttcattgtgctgatttttggtgatcaagcctcagtccccttcatattaccctctcctttttaaaaattacgtgtgcacagagaggtcacctttttcaggacattgcattttcaggcttgtggtgataaataagatcgaccaatgcaagtgttcataatgactttccaattggccctgatgttctagcatgtgattacttcactcctggactgtgactttcagtgggagatggaagtttttcagagaactgaactgtggaaaaatgacctttccttaacttgaagctacttttaaaatttgagggtctggaccaaaagaagagga

SEQ ID NO: 182465 - DNA, 1071 bp, Homo sapiens
  Payload ID: 15949
  Gene Symbol: SUMO1
  Gene Name: small ubiquitin-like modifier 1
  Uniprot ID: P63165
  ENST ID: ENST00000392245
  CDS Start-End: 149-454
gcggaagtgacgcgaggcgtagcggaagttactgcagccgcggtgttgtgctgtggggaagggagaaggatttgtaaaccccggagcgaggttctgcttacccgaggccgctgctgtgcggagacccccgggtgaagccaccgtcatcatgtctgaccaggaggcaaaaccttcaactgaggacttgggggataagaaggaaggtgaatatattaaactcaaagtcattggacaggatagcagtgagattcacttcaaagtgaaaatgacaacacatctcaagaaactcaaagaatcatactgtcaaagacagggtgttccaatgaattcactcaggtttctctttgagggtcagagaattgctgataatcatactccaaaagaactgggaatggaggaagaagatgtgattgaagtttatcaggaacaaacggggggtcattcaacagtttagttttaaaatttgagggtctggaccaaaagaagaggaatatcaggttgaagtcaagatgacagataaggtgagagtaatgactaactccaaagatggcttcactgaagaaaaggcattttaagattttttaaaaatcttgtcagaagatcccagaaaagttctaattttcattagcaattaataaagctatacatgcagaaatgaatacaacagaacactgctctttttgattttatttgtactttttggcctgggatatgggttttaaatggacattgtctgtaccagcttcattaaaataaacaatatttgtaaaaatcatactaatgcttattttattttaattgtatagaaagaaaaaaatgcctaaaataaggttttcttgcataaatactggaaattgcacatggtacaaattttttcttcattactgtacagtgatgatgttaatgactttgaagcactgaaagttactgaagtgccttctgaatcaaggatttaattaaggccacaatacctttttaatactcagtgttctgtttttttaaaaacttgatattcctgtatggtgcatatatgatacagttacctaatcatgttgaataaatgggcatgcc

SEQ ID NO: 182466 - DNA, 1536 bp, Homo sapiens
  Payload ID: 15949
  Gene Symbol: SUMO1
  Gene Name: small ubiquitin-like modifier 1
  Uniprot ID: P63165
  ENST ID: ENST00000392246
  CDS Start-End: 158-463
ctgcgcgaagcggaagtgacgcgaggcgtagcggaagttactgcagccgcggtgttgtgctgtggggaagggagaaggatttgtaaaccccggagcgaggttctgcttacccgaggccgctgctgtgcggagacccccgggtgaagccaccgtcatcatgtctgaccaggaggcaaaaccttcaactgaggacttgggggataagaaggaaggtgaatatattaaactcaaagtcattggacaggatagcagtgagattcacttcaaagtgaaaatgacaacacatctcaagaaactcaaagaatcatactgtcaaagacagggtgttccaatgaattcactcaggtttctctttgagggtcagagaattgctgataatcatactccaaaagaactgggaatggaggaagaagatgtgattgaagtttatcaggaacaaacggggggtcattcaacagtttagatattctttttattttttttcttttccctcaatccttttttatttttaaaaatagttcttttgtaatgtggtgttcaaaacggaattgaaaactggcaccccatctctttgaaacatctggtaatttgaattctagtgctcattattcattattgtttgttttcattgtgctgatttttggtgatcaagcctcagtccccttcatattaccctctcctttttaaaaattacgtgtgcacagagaggtcacctttttcaggacattgcattttcaggcttgtggtgataaataagatcgaccaatgcaagtgttcataatgactttccaattggccctgatgttctagcatgtgattacttcactcctggactgtgactttcagtgggagatggaagtttttcagagaactgaactgtggaaaaatgacctttccttaacttgaagctacttttaaaatttgagggtctggaccaaaagaagaggaatatcaggttgaagtcaagatgacagataaggtgagagtaatgactaactccaaagatggcttcactgaagaaaaggcattttaagattttttaaaaatcttgtcagaagatcccagaaaagttctaattttcattagcaattaataaagctatacatgcagaaatgaatacaacagaacactgctctttttgattttatttgtactttttggcctgggatatgggttttaaatggacattgtctgtaccagcttcattaaaataaacaatatttgtaaaaatcatactaatgcttattttattttaattgtatagaaagaaaaaaatgcctaaaataaggttttcttgcataaatactggaaattgcacatggtacaaattttttcttcattactgtacagtgatgatgttaatgactttgaagcactgaaagttactgaagtgccttctgaatcaaggatttaattaaggccacaatacctttttaatactcagtgttctgtttttttaaaaacttgatattcctgtatggtgcatatatgatacagttacctaatcatgttgaataaatgggcatgccaaaaatt

SEQ ID NO: 182467 - DNA, 534 bp, Homo sapiens
  Payload ID: 15949
  Gene Symbol: SUMO1
  Gene Name: small ubiquitin-like modifier 1
  ENST ID: ENST00000409205
  CDS Start-End: 124-312
ccaccgtcatcatgtctgaccaggaggcaaaaccttcaactgaggacttgggggataagaaggaaggtgaatatattaaactcaaagtcattggacagcagtgagattcacttcaaagtgaaaatgacaacacatctcaagaaactcaaagaatcatactgtcaaagacagggtgttccaatgaattcactcaggtttctctttgagggtcagagaattgctgataatcatactccaaaagaactgggaatggaggaagaagatgtgattgaagtttatcaggaacaaacggggggtcattcaacagtttagatattctttttattttttttcttttccctcaatccttttttatttttaaaaatagttcttttgtaatgtggtgttcaaaacggaattgaaaactggcaccccatctctttgaaacatctggtaatttgaattctagtgctcattattcattattgtttgttttcattgtgctgatttttggtgatcaagcctcagtccccttcatattaccctctccttttt

SEQ ID NO: 182468 - DNA, 761 bp, Homo sapiens
  Payload ID: 15949
  Gene Symbol: SUMO1
  Gene Name: small ubiquitin-like modifier 1
  ENST ID: ENST00000409712
  CDS Start-End: 126-359
ggaagttactgcagccgcggtgttgtgctgtggggaagggagaaggatttgtaaaccccggagcgaggttctgcttacccgaggccgctgctgtgcggagacccccgggtgaagccaccgtcatcatgtctgaccaggaggcaaaaccttcaactgaggacttgggggataagaaggaaggtgaatatattaaactcaaagtcattggacaggatagcagtgagattcacttcaaagtgaaaatgacaacacatctcaagaaactcaaagaatcatactgtcaaagacagctgggaatggaggaagaagatgtgattgaagtttatcaggaacaaacggggggtcattcaacagtttagatattctttttattttttttcttttccctcaatccttttttatttttaaaaatagttcttttgtaatgtggtgttcaaaacggaattgaaaactggcaccccatctctttgaaacatctggtaatttgaattctagtgctcattattcattattgtttgttttcattgtgctgatttttggtgatcaagcctcagtccccttcatattaccctctcctttttaaaaattacgtgtgcacagagaggtcacctttttcaggacattgcattttcaggcttgtggtgataaataagatcgaccaatgcaagtgttcataatgactttccaattggccctgatgttctagcatgtgattacttcactcctggactgtgactttcagtgggagatggaagtttttc

SEQ ID NO: 182469 - DNA, 779 bp, Homo sapiens
  Payload ID: 15949
  Gene Symbol: SUMO1
  Gene Name: small ubiquitin-like modifier 1
  ENST ID: ENST00000409498
  CDS Start-End: 346-534
gaggcgtagcggaagttactgcagccgcggtgttgtgctgtggggaagggagaaggatttgtaaaccccggagcgaggttctgcttacccgaggccgctgctgtgcggagacccccgggtgaagccaccgtcatcatgtctgaccaggctctgtggattagactcacctctgcttcttggtgtgtggggcctcagctgagatgactcaagtggctgggggctggaacagctagttgtcaggaggcaaaaccttcaactgaggacttgggggataagaaggaaggtgaatatattaaactcaaagtcattggacaggatagcagtgagattcacttcaaagtgaaaatgacaacacatctcaagaaactcaaagaatcatactgtcaaagacagggtgttccaatgaattcactcaggtttctctttgagggtcagagaattgctgataatcatactccaaaagaactgggaatggaggaagaagatgtgattgaagtttatcaggaacaaacggggggtcattcaacagtttagatattctttttattttttttcttttccctcaatccttttttatttttaaaaatagttcttttgtaatgtggtgttcaaaacggaattgaaaactggcaccccatctctttgaaacatctggtaatttgaattctagtgctcattattcattattgtttgttttcattgtgctgatttttggtgatcaagcctcagtccccttcatattaccctctcctttttaaaaattacgtgtgcacagagag

SEQ ID NO: 182470 - DNA, 722 bp, Homo sapiens
  Payload ID: 15949
  Gene Symbol: SUMO1
  Gene Name: small ubiquitin-like modifier 1
  ENST ID: ENST00000409627
  CDS Start-End: 116-337
gcagccgcggtgttgtgctgtggggaagggagaaggatttgtaaaccccggagcgaggttctgcttacccgaggccgctgctgtgcggagacccccgggtgaagccaccgtcatcatgtctgaccaggaatcacttaaccctgaaagtcttgtgagaagacatggcgagaagtggagtcaagcacacaccatgatggcagataaaggaagagaggccgataatcttttttttttgagacggagtctcgctctgtcacccagtctggagtgcagtggtgccatctcgactcgctgcaacctccgcctcccaggttcaagaggcaaaaccttcaactgaggacttgggggataagaaggaaggtgaatatattaaactcaaagtcattggacaggatagcagtgagattcacttcaaagtgaaaatgacaacacatctcaagaaactcaaagaatcatactgtcaaagacagggtgttccaatgaattcactcaggtttctctttgagggtcagagaattgctgataatcatactccaaaagaactgggaatggaggaagaagatgtgattgaagtttatcaggaacaaacggggggtcattcaacagtttagatattctttttattttttttcttttccctcaatccttttttatttttaaaaatagttcttttgtaatgtggtgttcaaaacggaattgaaaactggcaccccatctctttg

SEQ ID NO: 182471 - DNA, 784 bp, Homo sapiens
  Payload ID: 15949
  Gene Symbol: SUMO1
  Gene Name: small ubiquitin-like modifier 1
  ENST ID: ENST00000409181
  CDS Start-End: 119-295
actgcagccgcggtgttgtgctgtggggaagggagaaggatttgtaaaccccggagcgaggttctgcttacccgaggccgctgctgtgcggagacccccgggtgaagccaccgtcatcatgtctgaccaggaggcaaaaccttcaactgaggacttgggggataagaaggaaggtgaatatattaaactcaaagtcattggacaggatagcagtgagattcacttcaaagtgaaaatgacaacacatctcaagaaactcaaagaatcatactgtcaaagacaggtttctctttgagggtcagagaattgctgataatcatactccaaaagaactgggaatggaggaagaagatgtgattgaagtttatcaggaacaaacggggggtcattcaacagtttagatattctttttattttttttcttttccctcaatccttttttatttttaaaaatagttcttttgtaatgtggtgttcaaaacggaattgaaaactggcaccccatctctttgaaacatctggtaatttgaattctagtgctcattattcattattgtttgttttcattgtgctgatttttggtgatcaagcctcagtccccttcatattaccctctcctttttaaaaattacgtgtgcacagagaggtcacctttttcaggacattgcattttcaggcttgtggtgataaataagatcgaccaatgcaagtgttcataatgactttccaattggccctgatgttctagcatgtgattacttcactcctggactgtgactttcag

SEQ ID NO: 182472 - DNA, 1187 bp, Homo sapiens
  Payload ID: 15949
  Gene Symbol: SUMO1
  Gene Name: small ubiquitin-like modifier 1
  ENST ID: ENST00000409368
  CDS Start-End: 144-584
agtgacgcgaggcgtagcggaagttactgcagccgcggtgttgtgctgtggggaagggagaaggatttgtaaaccccggagcgaggttctgcttacccgaggccgctgctgtgcggagacccccgggtgaagccaccgtcatcatgtctgaccaggaggcaaaaccttcaactgaggacttgggggataagaaggaaggtgaatatattaaactcaaagtcattggacaggatagcagtgagattcacttcaaagtgaaaatgacaacacatctcaagaaactcaaagaatcatactgtcaaagacagggtgttccaatgaattcactcaggtttctctttgagggtcagagaattgctgataatcatactccaaaagaagcacagtggcccacgcctgcaatcctagcactttgggaggctgaggcgggctggatcactgcaggtcaggagttgagaccagcctgggcaacatggcgaaacctcatctctactaaaaatagaaaaagtagccagctgggaatggaggaagaagatgtgattgaagtttatcaggaacaaacggggggtcattcaacagtttagatattctttttattttttttcttttccctcaatccttttttatttttaaaaatagttcttttgtaatgtggtgttcaaaacggaattgaaaactggcaccccatctctttgaaacatctggtaatttgaattctagtgctcattattcattattgtttgttttcattgtgctgatttttggtgatcaagcctcagtccccttcatattaccctctcctttttaaaaattacgtgtgcacagagaggtcacctttttcaggacattgcattttcaggcttgtggtgataaataagatcgaccaatgcaagtgttcataatgactttccaattggccctgatgttctagcatgtgattacttcactcctggactgtgactttcagtgggagatggaagtttttcagagaactgaactgtggaaaaatgacctttccttaacttgaagctacttttaaaatttgagggtctggaccaaaagaagaggaatatcaggttgaagtcaagatgacagataaggtgagagtaatgactaactccaaagatggcttcactgaagaaaaggcattttaagattttttaaaaatcttgtcagaagatcccaga

SEQ ID NO: 182473 - DNA, 809 bp, Homo sapiens
  Payload ID: 15950
  Gene Symbol: SUMO2
  Gene Name: small ubiquitin-like modifier 2
  Uniprot ID: P61956
  ENST ID: ENST00000314523
  CDS Start-End: 123-338
tcccctcgtccaccgctgccgcctccttcttctgccgctcctggtgctgcttgtgtgctcgtttggtgcggacctggtacctcttttgtgaagcggcagctgaggagactccggcgctcgccatggccgacgaaaagcccaaggaaggagtcaagactgagaacaacgatcatattaatttgaaggtggcggggcaggatggttctgtggtgcagtttaagattaagaggcatacaccacttagtaaactaatgaaagcctattgtgaacgacagttggaaatggaggatgaagatacaattgatgtgttccaacagcagacgggaggtgtctactgaaaagggaacctgcttctttactccagaactctgttctttaaagaccaagattacattctcaattagaaaactgcaatttggttccaccacatcctgactactaccgtatagttttctctattctttcatttcccccttccccattcctttattgtacataaagtaactggtatatgtgcacaagcatattgcattttttttttttttaactaaacagccaatggtatgttttgattgacatcaagtggagacgggatggggaaaaatactgattctgtgaaaataccccctttctccattagtggcatgctcattcagctcttatctttatattccagtaagttattttgctctcactgttttaacaaaaaaaaaaaacaacaacataaaaatccttgcataccttgttcaattggagaattttaatgtttttcatttatcattgtaaaaccaaggacaattttataactt

SEQ ID NO: 182474 - DNA, 3190 bp, Homo sapiens
  Payload ID: 15950
  Gene Symbol: SUMO2
  Gene Name: small ubiquitin-like modifier 2
  Uniprot ID: P61956
  ENST ID: ENST00000420826
  CDS Start-End: 150-437
gggagcgcacgacgtgcgcgcaccctctcccctcgtccaccgctgccgcctccttcttctgccgctcctggtgctgcttgtgtgctcgtttggtgcggacctggtacctcttttgtgaagcggcagctgaggagactccggcgctcgccatggccgacgaaaagcccaaggaaggagtcaagactgagaacaacgatcatattaatttgaaggtggcggggcaggatggttctgtggtgcagtttaagattaagaggcatacaccacttagtaaactaatgaaagcctattgtgaacgacagggattgtcaatgaggcagatcagattccgatttgacgggcaaccaatcaatgaaacagacacacctgcacagttggaaatggaggatgaagatacaattgatgtgttccaacagcagacgggaggtgtctactgaaaagggaacctgcttctttactccagaactctgttctttaaagaccaagattacattctcaattagaaaactgcaatttggttccaccacatcctgactactaccgtatagttttctctattctttcatttcccccttccccattcctttattgtacataaagtaactggtatatgtgcacaagcatattgcattttttttttttttaactaaacagccaatggtatgttttgattgacatcaagtggagacgggatggggaaaaatactgattctgtgaaaataccccctttctccattagtggcatgctcattcagctcttatctttatattccagtaagttattttgctctcactgttttaacaaaaaaaaaaaacaacaacataaaaatccttgcataccttgttcaattggagaattttaatgtttttcatttatcattgtaaaaccaaggacaattttataacttttttgtacgtagctgttacatgtagggcaatctgtctttaagtagggataaattactctaaaacaaaaaagaatcctagatagttttcccttcaagtcaagcgtcttgttgtttaaataaacttcttgtttaaaatgagctgttttctttattctgagaaatattaaatagaaaattgaggcttagaaaaaacataaataggcctgcttagaagtaacatttcaagaaggaaataaagctacttggtgtttctgacagactgatactgatgccaaacaaagaataacagttttataaatatcaccttgttccaaaagtttctctaggtcccatgttaatatgcaagtatactagcagaaaaattgggccatagtatcgtggatttccaggtattttctgtatattaagtgaggcacggagcatagggtatagggtagcacatgtggcaaggaaaaagttctgattttgcctttgttgctgataaaacactgaaccattctagcctgcacttatcataagtaaatactccctaacctaaaataaagttttcgttccttattcaaggattttttttttgagacggagttttcctcttgttgcccaggctggagtgtagtggtgcaatttcagctcactgcaacctcagcctcctgagtagctggggggtcataggtgcatgccaccacgcccagctaattttttttctatttttagtcgagacagggttttatcacgtatgccaggctggtctcgaactcctgaccttaggtgatccacccgcctcagcctcccaaagtgcagggattacggcatgagccaccacgcctggcctattcaagaatattgagggacagaaaatatctatatatatccatcctcagaaccttaaatatacaggtcactacagtctttattattttaatttttgtttcttagggtttcttttggtggtggttttttgagatggagcatcattccgtctcccaggctgtagtgcagtggcacaatcttggctcactgcaagctccgcctcccgggttcacgccattctcctgcctcagcctcccgtcttaggtctttttgaaagaggttatgcctctgttgcctagtctggagtggtgcaatggtgtgatcttggctcactgcaacctccacctccaggtcttaagagatcctccctgctcagcctcgtgagtagctagaaccgcaggtgcatgccaccacagctaattcttgtattttttatagagagtgtttcgccatattgtccaggccgggctcaaacccctgatcttaagtgatctatctgccttagcctcccaatgtgctgggtttacaggcgtgagccactatgcccagcccctttttaattttttaaaaatgtttatttttgagatggagtttcgctcttgttgccccaactggagaccaatgacatgatctcagctcactgcaacctccgcctcccgggttcaactgattctcctccctcagcctccggaaaagctgggattacaagcatctaccatcatacctggctaattctgtatttttagtagagaaggggtttctctatgttggtcaggctggtctccacctcccgacctcaggtgatctgcctgccttggcctcccaaagtgctgagattacaggcttgagccactgtgcccggccaaatttttattatttttaaattagaggtggggtctcaccatgttgaccagtttggtctcgaacttctggcctcagtcccttgtcttggcctcccaaagtgttggggtttcaggtgttagaccccatgcccaaccactacagtttttgtttttgtttttgtttttttttcagacggagtcttgctctgtcgcccaggctggagtgcagtggcgcaatcttggctcacggcaagctccacctcccgggttcacgccattctcctgcctcagcctccccagtagctgggactaaaggtgcccgccaccatgcccggctaatttttttgtatttttagtagagacagggcttcaccatgttagccaggctggtctcaaactcctgacctcagttcatccacccgccttggccttccaaagtgctgggattacaggcatgatccactgcgcccggcctcactgccattttatagatgagaaagccaagttccagaaaagttgtgaaatagacggtgactataaaactgggactagagatagtatcctaatgcttgttgattgtttttgtccatactgattgtcaacctaccaatataatctaccatcaagtca

SEQ ID NO: 182475 - DNA, 490 bp, Homo sapiens
  Payload ID: 15950
  Gene Symbol: SUMO2
  Gene Name: small ubiquitin-like modifier 2
  ENST ID: ENST00000578238
  CDS Start-End: 291-449
gggcagaaagcggacgcccgcggacccaccagccccgaacggggattcttggcccagccggccggcgcgcgtgaggaggggcgttagggcgcgcggggtctccaccttctgtcgaccccgcgtcgggtgttgcagtctccgaggcggcgaggagtcctctgggctcgggcttcacctctcgggaaggagtcaagactgagaacaacgatcatattaatttgaaggtggcggggcaggatggttctgtggtgcagtttaagattaagaggcatacaccacttagtaaactaatgaaagcctattgtgaacgacagggattgtcaatgaggcagatcagattccgatttgacgggcaaccaatcaatgaaacagacacacctgcacagttggaaatggaggatgaagatacaattgatgtgttccaacagcagacgggaggtgtctactgaaaagggaacctgcttctttactccagaactctgttctttaa

SEQ ID NO: 182476 - DNA, 1807 bp, Homo sapiens
  Payload ID: 15951
  Gene Symbol: SUMO3
  Gene Name: small ubiquitin-like modifier 3
  Uniprot ID: P55854
  ENST ID: ENST00000332859
  CDS Start-End: 162-473
agccacgtgacccccgtgccggccaacgggtgcgccgggatttgggggataaagcgcggccccgcgcacagttgcggcgggagagcggcggggccgagagcgtgactcgcccgctccgcgctgcttcccccgcgccgcctccccgcgccgctcgcgcagccatgtccgaggagaagcccaaggagggtgtgaagacagagaatgaccacatcaacctgaaggtggccgggcaggacggctccgtggtgcagttcaagatcaagaggcacacgccgctgagcaagctgatgaaggcctactgcgagaggcagggcttgtcaatgaggcagatcagattcaggttcgacgggcagccaatcaatgaaactgacactccagcacagctggagatggaggacgaggacaccatcgacgtgttccagcagcagacgggaggtgtgccggagagcagcctggcagggcacagtttctagagggcccgtccccagcccgggccgtccatcctcgcattgctgttgaatggtgagcacgtgaccatgccgaccacaaaggtgtctgcggaaactcgaggacattcaccacgatgattttcctctctttgatgtacttcaagtgcaactcaaaactatatctgcagggatgaatctgtaacttaaattgggccaatcagaattgttatctttgttcaggtaaaatgagttgcaagatattgtgggtacttttgtgtgctcatttgtgttttccccccctcctacaacatttttttaaccccaaaattatagcctgaatgttcgcttttagtctggccagggatctgactcctgagttggttgcctctcccctgctcactccagtcacatagagaattggtgtttcccgcagtggggatgcagctgttggacaggtattgggggcaaggttggtagggaggacagactgtcacttgctgttacaggcacaggtgattaaaatgctaaatattgcaaatttaagctttgtcagtatatggaaaagttgaagggaaaatactggaatgcttcttcaaaggttaaaaaataaccgagtcttttggtaatttgaccccacgtgctctctggccctcaagcatgtaacctcggggtctgaggcccaggacccacccccctgccacccctcccaccccactccctgctcagtacctggcgttggtacacaggcaaggattggcacaaccaaaattggcctttttctccctcttaatattgaagaaattcccacatttctcatttggtaatggtgttgtggcctcagatttcttctagtatttgcttctgatgaatgattatggtctatacataaaaaagtaagactaagtattgctgaatttgcagttatgttgtcgtgtataagagctacttccaagtgtggttacaaatgaacccatggaatgatgacttcatgttcttctcgtgggtttgtgccgtgctgctttccaaataggtattgaatttatgcattagtctggtgatttcagttctgtgaaatattttgggatctataccaattaaacattttcatagttctgcctattgtccttccctgaggctccattgctgcttggtggccattctctgcctttttacagtcacctgaacaatgacccatcatctcttgcttgcttgaaatcttgctgaaatgttctcatttcctgtttgctgtatgggctcgggtgggatgtttgttggctctgttgtgtttattcaccaatttgtacattatttgttgtcctttactactgtaaacagtaaatatagtttggtattctgtc

SEQ ID NO: 182477 - DNA, 520 bp, Homo sapiens
  Payload ID: 15951
  Gene Symbol: SUMO3
  Gene Name: small ubiquitin-like modifier 3
  ENST ID: ENST00000397893
  CDS Start-End: 1-444
atgtccgaggagaagcccaaggagggtgtgaagacagagaatgaccacatcaacctgaaggtggccgggcaggacggctccgtggtgcagttcaagatcaagaggcacacgccgctgagcaagctgatgaaggcctactgcgagaggcagggcttgtcaatgaggcagatcagattcaggttcgacgggcagccaatcaatgaaactgacactccagcacagggcatcatactgtcatggaaagagctttggacctggaaacagacttttttttttgagacggagtctcgctttgttgcccaggctagaatgcagtggcgcagtctcagctcactgtgcaagctctgcctcctgagttcacgccattctcctgcctcagcctcccaagtagctgggactataggtgcccaccaccactcccggctaatttttttgtatttttagtagagacggggtttcaccatgttagccaggatggtctcgatctcctgaccttgtgatctgcccacctcagcccccc

SEQ ID NO: 182478 - DNA, 1779 bp, Homo sapiens
  Payload ID: 15951
  Gene Symbol: SUMO3
  Gene Name: small ubiquitin-like modifier 3
  ENST ID: ENST00000397898
  CDS Start-End: 84-491
gggagagcggcggggccgagagcgtgactcgcccgctccgcgctgcttcccccgcgccgcctccccgcgccgctcgcgcagccatgtccgaggagaagcccaaggagggtgtgaagacagagaatgaccacatcaacctgaaggtggccgggcaggacggctccgtggtgcagttcaagatcaagaggcacacgccgctgagcaagctgatgaaggcctactgcgagaggcagggcttgtcaatgaggcagatcagattcaggttcgacgggcagccaatcaatgaaactgacactccagcacaggtacggagctggcttcgcgtggttccagggcgacttccgatttgtgcgggctggagatggaggacgaggacaccatcgacgtgttccagcagcagacgggaggtgtgccggagagcagcctggcagggcacagtttctagagggcccgtccccagcccgggccgtccatcctcgcattgctgttgaatggtgagcacgtgaccatgccgaccacaaaggtgtctgcggaaactcgaggacattcaccacgatgattttcctctctttgatgtacttcaagtgcaactcaaaactatatctgcagggatgaatctgtaacttaaattgggccaatcagaattgttatctttgttcaggtaaaatgagttgcaagatattgtgggtacttttgtgtgctcatttgtgttttccccccctcctacaacatttttttaaccccaaaattatagcctgaatgttcgcttttagtctggccagggatctgactcctgagttggttgcctctcccctgctcactccagtcacatagagaattggtgtttcccgcagtggggatgcagctgttggacaggtattgggggcaaggttggtagggaggacagactgtcacttgctgttacaggcacaggtgattaaaatgctaaatattgcaaatttaagctttgtcagtatatggaaaagttgaagggaaaatactggaatgcttcttcaaaggttaaaaaataaccgagtcttttggtaatttgaccccacgtgctctctggccctcaagcatgtaacctcggggtctgaggcccaggacccacccccctgccacccctcccaccccactccctgctcagtacctggcgttggtacacaggcaaggattggcacaaccaaaattggcctttttctccctcttaatattgaagaaattcccacatttctcatttggtaatggtgttgtggcctcagatttcttctagtatttgcttctgatgaatgattatggtctatacataaaaaagtaagactaagtattgctgaatttgcagttatgttgtcgtgtataagagctacttccaagtgtggttacaaatgaacccatggaatgatgacttcatgttcttctcgtgggtttgtgccgtgctgctttccaaataggtattgaatttatgcattagtctggtgatttcagttctgtgaaatattttgggatctataccaattaaacattttcatagttctgcctattgtccttccctgaggctccattgctgcttggtggccattctctgcctttttacagtcacctgaacaatgacccatcatctcttgcttgcttgaaatcttgctgaaatgttctcatttcctgtttgctgtatgggctcgggtgggatgtttgttggctctgttgtgtttattcaccaatttgtacattatttgttgtcctttactactgtaaacagtaaatatagtttggtattctgtc

SEQ ID NO: 182479 - DNA, 1921 bp, Homo sapiens
  Payload ID: 15951
  Gene Symbol: SUMO3
  Gene Name: small ubiquitin-like modifier 3
  Uniprot ID: P55854
  ENST ID: ENST00000411651
  CDS Start-End: 162-587
agccacgtgacccccgtgccggccaacgggtgcgccgggatttgggggataaagcgcggccccgcgcacagttgcggcgggagagcggcggggccgagagcgtgactcgcccgctccgcgctgcttcccccgcgccgcctccccgcgccgctcgcgcagccatgtccgaggagaagcccaaggagggtgtgaagacagagaatgaccacatcaacctgaaggtggccgggcaggacggctccgtggtgcagttcaagatcaagaggcacacgccgctgagcaagctgatgaaggcctactgcgagaggcaggtgcggcaccttgctcccccgcagagcctccccgtgtgcgcactggtcctgtgcgttccaggcatccccagagcacgagcgtctcggggctggacccagatgcagctgcccgagggcttgtcaatgaggcagatcagattcaggttcgacgggcagccaatcaatgaaactgacactccagcacagctggagatggaggacgaggacaccatcgacgtgttccagcagcagacgggaggtgtgccggagagcagcctggcagggcacagtttctagagggcccgtccccagcccgggccgtccatcctcgcattgctgttgaatggtgagcacgtgaccatgccgaccacaaaggtgtctgcggaaactcgaggacattcaccacgatgattttcctctctttgatgtacttcaagtgcaactcaaaactatatctgcagggatgaatctgtaacttaaattgggccaatcagaattgttatctttgttcaggtaaaatgagttgcaagatattgtgggtacttttgtgtgctcatttgtgttttccccccctcctacaacatttttttaaccccaaaattatagcctgaatgttcgcttttagtctggccagggatctgactcctgagttggttgcctctcccctgctcactccagtcacatagagaattggtgtttcccgcagtggggatgcagctgttggacaggtattgggggcaaggttggtagggaggacagactgtcacttgctgttacaggcacaggtgattaaaatgctaaatattgcaaatttaagctttgtcagtatatggaaaagttgaagggaaaatactggaatgcttcttcaaaggttaaaaaataaccgagtcttttggtaatttgaccccacgtgctctctggccctcaagcatgtaacctcggggtctgaggcccaggacccacccccctgccacccctcccaccccactccctgctcagtacctggcgttggtacacaggcaaggattggcacaaccaaaattggcctttttctccctcttaatattgaagaaattcccacatttctcatttggtaatggtgttgtggcctcagatttcttctagtatttgcttctgatgaatgattatggtctatacataaaaaagtaagactaagtattgctgaatttgcagttatgttgtcgtgtataagagctacttccaagtgtggttacaaatgaacccatggaatgatgacttcatgttcttctcgtgggtttgtgccgtgctgctttccaaataggtattgaatttatgcattagtctggtgatttcagttctgtgaaatattttgggatctataccaattaaacattttcatagttctgcctattgtccttccctgaggctccattgctgcttggtggccattctctgcctttttacagtcacctgaacaatgacccatcatctcttgcttgcttgaaatcttgctgaaatgttctcatttcctgtttgctgtatgggctcgggtgggatgtttgttggctctgttgtgtttattcaccaatttgtacattatttgttgtcctttactactgtaaacagtaaatatagtttggtattctgtc

SEQ ID NO: 182480 - DNA, 1066 bp, Homo sapiens
  Payload ID: 15952
  Gene Symbol: SUMO4
  Gene Name: small ubiquitin-like modifier 4
  Uniprot ID: Q6EEV6
  ENST ID: ENST00000326669
  CDS Start-End: 166-453
ctggcgcacacagcgggaggggagggagcccaggatgtgcacgcaccctctccctcatccaccgctgtcacctcctgctgctcttcctgctgctcgtgtactcgttaggtgcggacccgccacctcttttgtgaagcagcagctgaggagactccggtgttcaccatggccaacgaaaagcccacagaagaagtcaagactgagaacaacaatcatattaatttgaaggtggcgggacaggatggttctgtggtgcagtttaagattaagaggcagacaccacttagtaaactaatgaaagcctattgtgaaccacggggattgtcagtgaagcagatcagattccgatttggtgggcaaccaatcagtggaacagacaaacctgcacagttggaaatggaagatgaagatacaattgatgtgtttcaacagcctacgggaggtgtctactgaaaagggaacctgcttctttactccagaacgctgttctttaaagaccaagattactgcattctcaattagaaaactgcaatttggttccaccacattctgactactacagtatagttttctctattcttttgtttcccccttccacattcttttattatacatgaagtaactggtatgtgtacacaagcatattgcttttttcttcaaaccaaacagccaatggtatgttttgattgacatcaagtggagacaggatgggaaaaaatactgattctgtgaaaataccccctttatccattagtggcatgttcattcaggtcttatctttatattctagtaagttattttgctctcactgttttaacaacaacaaaaaaaaattctcacataccttgttcaattggaggattttcatgtttttcatttatcattgtaaaaccaaggacaattttataacttttgtgtacatagctgttacatgtagggcaatctgtctttaagtagggataaattactctaaaaaaaaaagaaagaatcctagaaagtttttccttcaagtcaggcttcttatttaaataaactttttgtttaaaatgaaataaaaataaaaaca

SEQ ID NO: 182481 - DNA, 658 bp, Homo sapiens
  Payload ID: 15953
  Gene Symbol: SVBP
  Gene Name: small vasohibin binding protein
  Uniprot ID: Q8N300
  ENST ID: ENST00000372521
  CDS Start-End: 100-300
ctcccggaggcgttgtctgcgactcggcggaggctccaacttccagtggcccggtcgggaaagatcagagcctcctaagaaatatccagaagtcaagccatggatccacctgcacgtaaagaaaaaaccaaagttaaagaatctgtcagcagagttgagaaggccaaacagaaatcagcccagcaggagctgaagcagagacaaagagcagagatctatgccctcaacagagtcatgacagaactggagcagcagcagtttgatgagttctgtaaacagatgcagcctcctggagaatgaggccccaggttcaaaccagatgggatcctgagagctttgagagggtgttgccagttttaagctgagatggcccatttggagccttacagaactagaccagaagacatttgtggataaatctgaactcacttcctgtgtgtaacttctaacttcactggttcctcccatctgaattggccacatgcttgctgaagagacttgttttcttcttctaagacagtggttttgttttttgggtttttttaaaaaaaaaaaaaaaacacacacaaaaaacactttttctattgtttgagaaaaatcagtgtttctcatgaaactctatatcttctccaaaaatacaaataaaatactaataaaa

SEQ ID NO: 182482 - DNA, 650 bp, Homo sapiens
  Payload ID: 15953
  Gene Symbol: SVBP
  Gene Name: small vasohibin binding protein
  Uniprot ID: Q8N300
  ENST ID: ENST00000372522
  CDS Start-End: 88-288
aaaactaaggctcaaagtggggaggagacttgcccagggacacccagcgagatcagagcctcctaagaaatatccagaagtcaagccatggatccacctgcacgtaaagaaaaaaccaaagttaaagaatctgtcagcagagttgagaaggccaaacagaaatcagcccagcaggagctgaagcagagacaaagagcagagatctatgccctcaacagagtcatgacagaactggagcagcagcagtttgatgagttctgtaaacagatgcagcctcctggagaatgaggccccaggttcaaaccagatgggatcctgagagctttgagagggtgttgccagttttaagctgagatggcccatttggagccttacagaactagaccagaagacatttgtggataaatctgaactcacttcctgtgtgtaacttctaacttcactggttcctcccatctgaattggccacatgcttgctgaagagacttgttttcttcttctaagacagtggttttgttttttgggtttttttaaaaaaaaaaaaaaaacacacacaaaaaacactttttctattgtttgagaaaaatcagtgtttctcatgaaactctatatcttctccaaaaatacaaataaaatactaataaaatgtt

SEQ ID NO: 182483 - DNA, 4541 bp, Homo sapiens
  Payload ID: 15954
  Gene Symbol: SVIP
  Gene Name: small VCP/p97-interacting protein
  Uniprot ID: Q8NHG7
  ENST ID: ENST00000354193
  CDS Start-End: 118-351
agtggagggcggtgggggcggggcaagcgcggaggaccagggaccggctccggaccgcgcagttagcgccgcctggcctgggccggacccggtcagggttctcaagctgtcgtccctatggggctgtgttttccttgtcccggggagtccgcgcctcccacgccggacctggaagagaaaagagcaaagcttgcagaggctgcagagagaagacaaaaagaggctgcatctcggggaattttagatgttcaatctgtgcaagaaaagagaaagaaaaaggaaaaaatagaaaaacaaattgctacatccgggcccccaccagaaggtggacttaggtggacagtttcataaagcataacatgagtagaagaatctactgccaataactgtttattatctgcaatcaagtgggcttcatcaatttaatttcttctctttgagtaaatgaagattcagactttgtaatattattgcccttaagtgcaatgctaaaaaaacgttgattttcaagcttagagaatggctagacttttcattaaatactgattttcctacatttgctcttctgcagttagtgggtgatttgctatttttcttagtagttaaaaaatggaactaaatagtgaatatacatacactgcatgtaaacattctgcatatacctctaagattaaaattcgcagttgtcttttcatcctttataaaatgatctaactacttatatttgtgctgcatcgcgttacatctgtttttatttcactatgaagatgtttgattaaacttatggacttagtgcctttaaactgatcatcagggagaatcttgaaaaaatcatttgaagggctgatgtgaaggagcactgtaaatttttataacttagtaatgagtattcttaggcagatgtaaaattttttccaatttatttttatttatgtagcttataaaattaacataccctgttttactttatgataaaggattttttgtttgctgaatttaaaattatatattagtgataccatcagagggcagtgatgttctattgtatattaaattcagctctgtaaggatctttgtagtaattgaatgagttaaactaataatctggatgggttataatgagtagtaatatatttgtccatatttcataagtagtgttaatcttgtgtacttattagagaacgatcataagatttatacagatgtgaaactgcgaaggcaagtatgaatgtatgaaaaaaacatgtaggtactgtacttacaaaaggtctacttcagatataaaaatattaggtaattctatacaatgcatagtcataaaccttaacatttttgttcattagaaacatgaattttatagcattttttgtttctcctatataatacactgaaataaaagaatttgtgttagctattaaggctgatagctcttttaaatggcaaggccacatgttgagccctaaattaaaatttgcagatattaagtgctaatagaaattttaagttaaatcgaccaagttcacttgctttacacaaaggaaactgagccactatcttcatctacccctccaacaaaaattatgttatactgcagtgtattgtacatgttaatttttaaaagtttgaactattatataatacaggtctcttgacttctcatggaaaaattattttttctattatggtgtgaaatattgtgtgaatatctaggcaaaacataacaatttggctcaattttcttctttagaggattcgtgctgtttttgttcataaagggtagtgaaatcattgaactatattttagaatgaaaatttttgattttattaaaatgattttttcaaggcagaaagtaaaaggaatgattgatagcggagtgcatatagagctagagcatatcatccttgaactctgcaaatcctttcttccattttaatatagcaagaacaattttgtctttactacatcttaaagaattagaacttgggttggtgtaagtgacttacttccagggaatcatgccctatttctaccagcaggtcatacccaaatgtcacactatctattgttaaccatgaatgatattcagatctattacttttcgtgaaaagtggaacatgttacttccaaccatggcctgtcaccgtgagtgtgatcagctttctccaaaaccacatgggtcgcaggagctaaggggtggtacccaaatgttaggaacagtgttaggaaagggcaagggaaaagaagtgactggatgtcttatgagaaaccggtaaatgactaaaaaaaaaagcaaatgactaaaaacatgactaaaaaattatatatatatataatatatatattatatatgtgtgtatatatatacacataatatctgcaaattctaatttatatatgtgtgtgtatatacacacacacacatgcacatacacacatacgtccagacatctccctcataaaataaccatcagtttctatgaaaaccttaagtggaagccaatttcccatagtaaataatttaggagaaaattataatgcttaaaatgttgctcaaacccctgacctattactaaactataattggaacagtaaaatgcatatatgtaactatcatatcatgatttaaaattgcttaaaccattgctgcttaatactaatcaaacttaacggctgctaacaaaagttgtgaattattacacggcctctttgtaacgtgctgcatgttttttaaaacatctctgtgtttctgtttgttccactgctggtatttggaatgtaatttaacagttctcacacatggtttggttataaattctgtattgccttttagggatataaatatacatttttttctatgtaaaaattagctttagctgtctctttaacaaaattttatctttactacatcctaaatacttagaacctgagttggtggttagggaaacctcaggaacattttaatcacattgggattcagaagagcaacagaaccaaaggttgtttggtgtgttcatacaatccctggatttataggtggattttctataaaggaaaaatgatgtaattagtatcctgttttttcctaaagaaataatactatcataaaaattctgtctatcctttgtaccccaggaaaatggacatgaactttgaattttccctttctccaaatgtttgactttttattttcactgataagcattatgctatgttcttagaagacaaaagcagctcttgccagttttgaataatttctgcatgaatagaccagtaagaggtaagtagccatgactgcctatatgtgttgagacataaggtatatttctttaacatctccaagcaagcatttcaaattctcttaactactaaacatgctctaagctaattcaaatatagtattgtggcttttttcttcaattttctcaaaagctacagacacaaggcatttgtatgtataacagactttgatgaagttttggttccagtaactcaaaacactaagtttcccatttgatatggctttttattgttctagtctccctcttctagttatgcttcatcttgcaaatattgactttgaatgtgataactattgcctacaaattaagtattcatacattactcctgtggatatcatacttttttgttattatatcctgaattgcattggctttttttggttttgttttgttttttgagatggagtttcactcttgttgcccaggttggagtgcaatggcacaatctcagctcaccgcaacctctgcctcccaggttcaagtgattctcctgcctcagcctccctagtagctgggattgcaggcatgtgccaccacgcctgactaattttgtgtttttagtagagacagggtttctccacgttggtcaggctggtctcgaactcctgacctcaggtgatccctgccgccttggcctcccaaagtgctgggattacaggcatgagccaccgcgcccggcctgcattggctatatttataataccaaatttgtgttgagttttgagttaatgtcttctagttatcaaaacaggtttgatccattctttgcaagtacctctaacttatctcaagtggaactaattagttttgcacacagattggtgctctctaggctatttccctgaaatttatcttgttacataagtcagatatcaaggagttatgctaaactccttttcctatcaaactcctaaaatgcccttttctctgtctatatttcttagacatagttacattataaatgtaacagatatatttaaagtaggttaataccaagtgtctcaggtagaaaattctcagaggttccacaaaaacttctggaactaataaatgactttagtaatcttgcagaatgaaaagtatatgaaagtcaattctatgtttatatgcaagcaatgaaaaatctgtaattgaaagtgggaaaatttaaattacaatatcaacaaataaaatatttaggaaaaataaaactgtagacattaaaaatgacaaaacattgccaataaattaagatctaaatg

SEQ ID NO: 182484 - DNA, 5905 bp, Homo sapiens
  Payload ID: 15955
  Gene Symbol: SLF1
  Gene Name: SMC5-SMC6 complex localization factor 1
  Uniprot ID: Q9BQI6
  ENST ID: ENST00000265140
  CDS Start-End: 420-3596
gctgcactgggtgtcaagcgccacggggtttgatggggactccttctggttccaccctcgcccactcacttctcgggctggccataatgctgcacagagccccggccagccattaatatcaggcgcaggagaaaacccagtaaaatcacttaccagtcttccacctccggtgctgatctagcaagagcctgacccgctggccagactcaagctctgcaccaggtattaccaccctggcgacggctccggagcgtcactgacaaccacccggaaatggtactatcgcttccggggctgcctagcgcgcggcgggaaattgtttcccagagcccggattcgtgaagcagttgagtgctgcagcggcagtcgtcgcccctgccgccgctgccaccgaaggaagcatcccagacaccgggaagatggaagatggtaccccaaagcatatcatccagatgacaggatttaagatggaagaaaaagaagcgctagtcaaattacttttaaaactagattgcacttttattaagagtgagaaatacaaaaattgtacacatcttatagctgaacgcctatgtaagagtgaaaaatttttagcagcttgtgcggcaggaaagtggatactaaccaaggactatataattcatagtgccaaaagtggcagatggcttgatgaaacaacttatgaatggggatataaaattgaaaaagattcccgttattcacctcaaatgcaatctgcacctaaaagatggcgtgaagaactgaaacgcactggtgctccaggagccttccacagatggaaagttgtcctccttgttagaactgataagcgaagtgattctcttataagagttttggaggctggaaaggcaaatgttattttaccaaaaagttcaccaagtggaataactcatgtgattgccagtaatgcaagaattaaagctgagaaagaaaaagataactttaaggctccattttatccaattcagtatctaggggattttcttttagagaaagaaattcagaatgatgaagattcccaaaccaattctgtttggactgaacatagcaatgaagaaacaaacaaagatttcaggaaagatgcaggatttcttgaaatgaaaggtgccttaagagagaccatgtatagaacccagaaagaaatgcaaaatcatgaagatgttaatgttggttctattttgattcaacatcacaaaaaagaaaaattcagtggttccagtaaagatttgaaatttgttaaaatgagaaatacctttggaagccatacatatgaaaatcagaaggaaattaagaaaaaagatgaagatattcagaggagttatactttgaggagaaaacgcaagaaaggaaaagaaagcaattgcaagaaaggcgttgaacatgaaaaaataaaaagtaccttaagaaggcacatatataatagagatcagaaagaaatgaagaattctatttttgctgaatatgccaaagaatcaaaagccatggctattaagacagatgtggatgttgttgaaataaaaaataccttaaggaagcacatatatagagctcaggctgtcagatacaactgcattagaatagataaacaaccagtgtacaacgtagaggttaaaaatgctgaatttcccagaggtgtattaaatttaattgaaagcctcatagaaggacatttttttaaagaagcaattgaggaactttccactttgcaggcacattatatccctcctgtatgcgttcttcatgcccttctagagaacgttctacaggataacatagatacattttctggtcgatactttcatatattgtcagctcttcttcacctgcatcctccttggaagtctccagccatgtcgagatattatttagagttgtttcagtgtccaacttgtatgaaaggagcatggtctttagtagaagtccttatcaggtcttgccttttcaatgaaagcttttgtcatcaaatttcagaaaatattggctccaaggtgctccacctgacgctactcaaatttttctttaatttaattgaaagtgaagtacaacatctgagtcaaaagttgtatgactggtcagattctcagaatctgaaaataacaggaaaggcaatgcttcttgaaattttttggtcaggaagtgaaacctctgggcttttgaccaaaccagtaaatatgcttttggaatggactatatattctcacaaggaaaaattcaagtctaatgatgtcttcaaacatgaactagcttacttattggctggaattcttggagcagcaatagattattggattttccttggtcttaagatgggtagaaatgtgatgcgacacatgtctgatgacttaggaagttatgtttctctttcgtgtgatgacttttcttcacaggaattagagattttcatttgctccttttcctcctcctggcttcaaatgtttgttgcagaggcagtctttaaaaagttgtgtctacagagctctggcagtgtttcttctgagccactctctcttcagaaaatggtatattcctatttaccagccttggggaaaactggtgtgcttgggtctggaaagattcaggtgtcaaagaaaataggacagcggccttgttttgactctcagagaaccttactaatgctgaatggtactaaacaaaaacaagtcgaagggctgccagagttactagacctgaaccttgctaaatgttcctcatcattaaaaaaattgaaaaagaagtcagaaggagaattgtcatgttccaaggagaattgcccctctgtagttaaaaagatgaattttcacaagactaatctaaaaggagaaacagccctgcatagagcttgcataaataaccaagtggagaaattgattcttcttctctctttgccaggaatagacatcaatgttaaagacaatgctggctggacgcctttgcatgaagcctgtaactatggcaacacagtgtgtgtccaggaaattttgcaacgttgtccagaggtagatctgctcactcaagtggacggggtgactcctttgcatgatgcactgtcaaacggacatgtagaaattggcaagctgctactacagcatgggggcccagtgcttttacaacagaggaatgctaagggagaattgcccttggattatgtggtttcacctcaaatcaaagaagaactgtttgctattacaaaaatagaagatacagtggagaactttcatgcacaagcagagaaacattttcattaccagcaacttgaatttggctcctttttacttagtaggatgttgctaaatttttgttcaatttttgatttatcttcagagttcattttagcttccaaagggttaactcatctaaatgaactgcttatggcttgtaaaagtcataaagaaaccaccagtgttcatactgactggttactggatctttatgctggaaatataaagacattgcagaaactcccacacattcttaaggaactgcctgagaatttgaaagtgtgtcctggggtacacactgaggccttgatgataacattggaaatgatgtgtcggtcagtcatggagttttcatgatgatgctagaaagtatggattgactttctaaatctgttcagtttgcattggtacttactgtggacttcatagcttactgacagatagtaatttgatttatttattgacagactttgcagccttgctaaattttaaaagcatttttaaaaaaacttctacaaaactctagtatgggcttctgactttttccagggtgtagaatttgactcaaaagtaaaaataattttgttttagtatattctactttcattaatgtttttttgttctgaaagtgatattatattgtacatgtaaaattaatttaaatattttttcaaataaaaatgtaatgtcctgtattctagatgttctaggtcttagaatcatggcaagcatattcatacaaatgcgtacctataaacttgtagctcctgactcttagggatggattttgaggaaaaaacaagactaaacaaaaacatgtagctccctatttcttctctctaggttgttggactgaaatatgcattttagctttgtgtgtttctaaaataaacatttctaaaatttacagtaataattaatattcttttggtttttaaatgcagcaaatatgcagagtctgacagttcaattccttgatctgttttattttagcaattcatatacaaaatgtatctgtcgctgccctatgtaacccagtattctgtacctgaaaacattctgctgcataggtttatgagtttaatattaagatattgagtggcatctaagtaatagatttgagattatttaagatcttaatatatagtatgaatttactgagtagtaatgttttaatttgcagtttttccttatagcagtttgtagtaaaactaaaagaaagggtgtggataataaccacttttgagattggagtttcttcactactgggagtaagttacattatgatacaggtggaaaataaacacttccatttagcttttatgtaattcaagtgatgaccttagcagttaatctgctaaagcaatacacttcagttttattttggaaatagatattttaacaagatacaaatgctcagtatcatattactgggtttgtaatctaaattgaaaactgctatatcagtatgaaaaaatattttaaataagtactttttccacacatactcaggaaatactagtttctatttagccttcaaatttggcatcatacaaatctctttattattaatctgccaaagtatcagacaaaaaatgatatagtgaagactatctaagaagagtttaaatgcttatagagagtaaagtgcttctccagatgatgaataagaacgttttttattccaatgagtacctctttacttcacttgtaaaggtgtctgggatagtgtttgcttggtaaactaatataaacttgtaaacataggctttgacatcatacacattttcaaatccttgtctagtttcttaataactaaattgcaaggcaaattcttttctgagctttggctttcctacatgtcaaatagaaatcacaccaggtatctttgtcatgatagaattgttagcatatcacatcatatgacacttaataaatattatttcctttctaattcttacctcctcttttgattataatgaatcatttagacaaaaggcaatatagtaattgtttaagttggtagtaattctaaggtaattaaggaatcaacatcatgagttagggttttatactgttagtacaaagtagttttccaaattagatgttcataacgtatatttgtttaattgcaattagcattaatatttcataattgactgctctgtctgccaacttctacaagcagtgatgacatgaagtgtgaaacagatgtcactgaggtctctgcctttaagaagttttacacttcttcgaaagtccaacgtggcaaacataggttactgtgttctgtgccctggctaacaataccagtatatgagtatgaatctaaatgttcaggaaaaggcttcattcccaaaattacttcttatactttattttagaaaacataataataattgccttgaataattgcccaaatctatcttggaggtataggaagaagaaattctcaataagtaaagtataattcatagtcttagtcctagattttcaatggcagacttttcaaagttgcatctgaagacaaggttgagaaatgctattcttcactgtattttgccagatgtgatatcatagttctatggaatcatattttttaaatttctgtaagagaccttattacaatgtaaataaagctggagaggagatttctgagcagttaa

SEQ ID NO: 182485 - DNA, 1079 bp, Homo sapiens
  Payload ID: 15955
  Gene Symbol: SLF1
  Gene Name: SMC5-SMC6 complex localization factor 1
  Uniprot ID: Q9BQI6
  ENST ID: ENST00000508130
  CDS Start-End: 89-628
cggattcgtgaagcagttgagtgctgcagcggcagtcgtcgcccctgccgccgctgccaccgaaggaagcatcccagacaccgggaagatggaagatggtaccccaaagcatatcatccagatgacaggatttaagatggaagaaaaagaagcgctagtcaaattacttttaaaactagattgcacttttattaagagtgagaaatacaaaaattgtacacatcttatagctgaacgcctatgtaagagtgaaaaatttttagcagcttgtgcggcaggaaagtggatactaaccaaggactatataattcatagtgccaaaagtggcagatggcttgatgaaacaacttatgaatggggatataaaattgaaaaagattcccgttattcacctcaaatgcaatctgcacctaaaagatggcgtgaagaactgaaacgcactggtgctccaggagccttccacagatggaaagttgtcctccttgttagaactgataagcgaagtgattctcttataagaaagaaattcagaatgatgaagattcccaaaccaattctgtttggactgaacatagcaatgaagaaacaaacaaagatttcaggaaagatgcaggatttcttgaaatgaaaggtgccttaagagagaccatgtatagaacccagaaagaaatgcaaaatcatgaagatgttaatgttggttctattttgattcaacatcacaaaaaagaaaaattcagtggttccagtaaagatttgaaatttgttaaaatgagaaatacctttggaagccatacatatgaaaatcagaaggaaattaagaaaaaagatgaagatattcagaggagttatactttgaggagaaaacgcaagaaaggaaaagaaagcaattgcaagaaaggcgttgaacatgaaaaaataaaaagtaccttaagaaggcacatatataatagagatcagaaagaaatgaagaattctatttttgctgaatatgccaaagaatcaaaagccatggctattaagacagatgtggatgttgttgaaataaaaaataccttaaggaagcacatatatagagctca

SEQ ID NO: 182486 - DNA, 578 bp, Homo sapiens
  Payload ID: 15955
  Gene Symbol: SLF1
  Gene Name: SMC5-SMC6 complex localization factor 1
  ENST ID: ENST00000504099
  CDS Start-End: 187-578
gaagcagttgagtgctgcagcggcagtcgtcgcccctgccgccgctgccaccgaaggaagcatcccagacaccgggaagagacagggtttcaccatgctgtccaggctggtctcgaactcctgatctcaagtgttccgctcgcctcggcctcccaaagtgctgggattacaggcgtgagccaccggatggaagatggtaccccaaagcatatcatccagatgacaggatttaagatggaagaaaaagaagcgctagtcaaattacttttaaaactagattgcacttttattaagagtgagaaatacaaaaattgtacacatcttatagctgaacgcctatgtaagagtgaaaaatttttagcagcttgtgcggcaggaaagtggatactaaccaaggactatataattcatagtgccaaaagtggcagatggcttgatgaaacaacttatgaatggggatataaaattgaaaaagattcccgttattcacctcaaatgcaatctgcacctaaaagatggcgtgaagaactgaaacgcactggtgctccaggagccttccacagatggaaagttgtcct

SEQ ID NO: 182487 - DNA, 593 bp, Homo sapiens
  Payload ID: 15955
  Gene Symbol: SLF1
  Gene Name: SMC5-SMC6 complex localization factor 1
  ENST ID: ENST00000466957
  CDS Start-End: 1-388
caaattacttttaaaactagattgcacttttattaagagtgagaaatacaaaaattgtacacatcttatagctgaacgcctatgtaagagtgaaaaatttttagcagcttgtgcggcaggaaagtggatactaaccaaggactatataattcatagtgccaaaagtggcagatggcttgatgaaacaacttatgaatggggatataaaattgaaaaagattcccgttattcacctcaaatgcaatctgcacctaaaagatggcgtgaagaactgaaacgcactggtgctccaggagccttccacagatggaaagttgtcctccttgttagaactgataagcgaagtgattctcttataaggctgtcagatacaactgcattagaatagataaacaaccagtgtacaacgtagaggttaaaaatgctgaatttcccagaggtgtattaaatttaattgaaagcctcatagaaggacatttttttaaagaagcaattgaggaactttccactttgcaggcacattatatccctcctgtatgcgttcttcatgcccttctagagaacgttctacagctcttcttcacctgcatcct

SEQ ID NO: 182488 - DNA, 7288 bp, Homo sapiens
  Payload ID: 15956
  Gene Symbol: SLF2
  Gene Name: SMC5-SMC6 complex localization factor 2
  Uniprot ID: Q8IX21
  ENST ID: ENST00000238961
  CDS Start-End: 543-4064
caattgtgtgacacaggaagcccaagtgttggccatcctcaacgaaggcagctgccgggctccggtttgcttcagcaaaccctcacccctcgccttcaaccaggcgggtgtcgtcagctgtccgccagctgctgcccgcgcctttccgcccccgcgcgccggccaaggccgaggcggccgggaccagaggcgcgcgccctcagtgcatgtgacggggtgggagggggaggtttcttcctcccccgtccccaagccccgccttctccagagaggctgcggcttcctattgcgccaccaccgaaatgaccaccgtgccagccaatcaagacgtgattcatgaagtaagacccgccccttactggtccccaggttccttcccgctcacgccggagtcacttccgaagagagaaccgccatgaagagagaagggggtgccgcccacctctgctccgacagcctcccggagtcccagcagcaagacggcaaccacgcacccaacttctccagccacggctcatgccgccgtcgccagcggcgccgacatgacaaggcgctgcatgcccgctaggccaggtttcccctcatccccagccccggggtcgtcgcccccgcgctgccatctgagacccggtagtaccgcccatgctgcagcgggaaagagaacagagagtcctggggacaggaagcagtcaattatagatttcttcaaaccagcttcaaaacaagacagacacatgttggattcaccacaaaaatcaaacatcaaatatggaggaagtagattgtctatcactgggacagagcagtttgaaaggaaactatcctcaccaaaagaatctaaacccaaaagggtgccaccagaaaagagccctattatagaagctttcatgaaaggtgttaaagagcaccatgaagatcatggtatacatgagtcacgtcggccttgtctgtcactagcctccaaatatttagccaaaggaacaaatatctatgttccttcttcatatcacttgccaaaggagatgaagtcactaaagaaaaaacatcgatccccagagagaaggaagtcactattcattcatgaaaataatgagaagaatgatagagatcgaggcaaaaccaatgcagactccaaaaagcagaccacagtggcagaagctgacatcttcaataacagctccagaagccttagcagcaggagcagcctgtccaggcaccacccggaagaaagcccactgggagctaaattccagttgtcactagcttcttactgcagagaacgagaactaaagaggttgagaaaggagcaaatggagcagagaatcaactccgagaattctttctcagaagcaagcagtctttccttaaaatctagtatagaaagaaaatataaaccaaggcaggaacaaaggaaacagaatgacatcatacctggaaaaaataatctgtcaaatgtggaaaatggacatctctcaagaaaaagatcctcttctgattcatgggaacctacttcagcaggctctaagcagaataaattccctgaaaaaagaaaaaggaactctgtggactcagatctgaaaagcacaagagaatctatgataccaaaagcaagagagtccttccttgagaagcgtcctgatggaccacatcagaaagaaaaatttataaaacatattgcactgaagacacctggtgatgtgttgcgcttagaagatatatccaaggaaccgagtgatgaaactgatggctcttctgcaggcttggcaccttcaaattctggcaattctggccaccattctaccaggaatagtgaccaaatccaagtggcaggtaccaaggagactaagatgcagaaaccccacttacctttatctcaggaaaagtctgcaattaaaaaagctagcaaccttcagaaaaataaaaccgctagctccacgacaaaggagaaggagacaaaactacctttactttcccgtgttccaagtgctggttcctctctagtaccattaaatgctaaaaattgtgctcttccagtttctaaaaaagataaagagcgttcctcatctaaagaatgttctgggcattctacagaatccaccaaacacaaggaacacaaagcaaagactaataaggccgattctaatgtatcttcagggaaaatttctgggggacctttgcgctcagaatatggcactcctacaaagtctccccctgctgctttggaagttgtgccatgtatcccaagccctgcagcaccttcagataaagccccttcagaaggagagagttcaggaaattccaatgcaggtagcagtgcactgaaaagaaaactaaggggtgattttgatagtgatgaagaaagtttaggttacaacctagacagtgatgaggaagaggaaacattaaagtcactggaagaaataatggctttgaacttcaatcagactcctgcagctacaggaaagcctcctgctctttccaaggggcttagatctcagtcatcagactatacaggacatgttcatcctggaacttacacaaataccttagaacgtctagtgaaggaaatggaagacacacaaaggctagatgaactgcagaagcaactacaagaagacataaggcaaggccgaggcattaaatccccaatcagaattggagaagaagacagtacagatgatgaggatggcctcttagaagagcacaaggaatttctaaagaaattttcagttacaattgatgctattcctgatcatcatccaggtgaagaaatatttaatttcctcaattctggaaaaattttcaatcagtataccttggatttaagagactctggttttattggacaaagtgctgtagaaaaacttattcttaaatcgggaaaaacagatcagatttttttgacaacacaaggtttccttacgtctgcttatcactatgtccagtgtcctgtccctgtgttaaagtggctgtttcggatgatgtcagttcatacagactgtattgtgtcagtgcagattttaagtacattgatggaaataacaattagaaatgataccttcagtgactcaccagtttggccatggatcccatcattgtctgatgtagcagctgtgtttttcaatatggggattgattttagatctttgtttcccctggagaatcttcagccagactttaatgaagactatctagtttctgaaacacagacaacatcaagggggaaagaaagtgaagattcatcttataagccaattttttcaacacttcctgaaaccaacattttaaatgtggttaagtttctaggcttgtgtacatctatacatccagaaggttaccaggatcgtgaaataatgttgctgattttaatgttatttaaaatgagtttggaaaaacagctgaaacagattcctttagtagactttcaaagcctcctgataaacctgatgaaaaacatcagagattggaacacaaaggtgcctgaactctgtctgggcataaatgaactctccagtcatccccacaacctcctgtggttggtacagctggtccctaattggacatcacgtggaaggcaactgagacagtgcctcagtctagtgattatttcaaagcttttggatgagaaacacgaagatgttcctaatgccagtaatctgcaggtatcagtcctacatcgctatcttgtgcagatgaagccttctgatttgttaaagaaaatggtcttgaagaaaaaggctgaacaaccagatggcattattgatgacagtcttcatttagaacttgaaaagcaggcatattacctgacctacattcttcttcatttagtcggtgaagttagttgttctcattctttttcttctggacaacggaaacactttgtgctactctgtggggctttggaaaagcatgttaaatgtgatattagggaagatgcaagacttttttacagaactaaggtgaaagacttggtcgccaggatacatggaaaatggcaggaaataatccagaactgtcggcctactcaggggcagcttcatgacttctgggtaccagattcttaataggagttgcagcagcaaaaatatgaaccaagagaaattcaataagagcctttcatagaggagtagaaaggattattacagaatccaatgaatgccaagaaaatgtacagcaaatgtgccacttgaatatctagtatgaagctggtaatgaagaaattgccatttctgaagcagatatgaaatatgatctgcttaattgttaaggcaactgacctttcaaaagtgcagagtcttattaaaagaggggaggggtagaagcagaataatagtcatatgtctaacctgccccagttaactcctcttgttaaattataagccagttatcttttttagatagtatttttgtcacttggataatcacaggaaatatataagaaaagagcttggactaacttgagaagttggacatggaaagcaagaccaagttccagttgggtttaattttccctcttggttattttcggacacaaagggaatgcttaaaactgagtttagtaataaaaagcataaatctcttctgtaacttttataaaccacagggaggtttcaatccatgcattttccttcattactcaagattataaatctgtttttaaaatacatctaaacaaacagttgagaaacaaaagtttggcatgttgtcagatccccttaagaggaagaggttaagctgtaaagtagtggccctgttttgatgccagaacattcatatgctgtttgttctggatttcttttaaatgcatgtattttaaatactggttaaatcttagaatcttggctatatcttagaattctggctcttggtaaccatattacagaagtctatattgtaaaagcctaaagatctggacaagtttccaacaaccttgtttccatgagtatataattttggcagacacctgaattctttgggacactgtgtctgtgtatgtgtgtgtgtgtgtgtgtgtgtgtgtgcgcttgtatcttgaagttgttgcacttcaaaaccacagctgctgtaaattcttaaacactggagagccatcctttggtttaaatggtagagggttagtggaagtgcacacgttgtttttagcccaggggtagtaacaaactcttactagccaactagaaaattattttgttgacgagatgtcccttttaggagggtttgtttcctgaaagaatgccaactttttttgttgttctttcagtattggcttgagtgacctgttctcctgagtgctctagtgtctccagttgtgggggggaaagatgatggaggggaacagaaactggacttgatgtttgcggtttgagaggcaagaaaataaaataactttctacctctaaattgaggcttaggagtaaaaagcattttgtcctaaatttatcatttaaaatagcatcagtaacttttgagctcatgtcaatcaagcattggcagtcagagattttatagggaagactaagtaaatccagtttccaagaacctaaactgattgaggctccaagagtcagaccaacaaaagttttattctgtgttgtttactggtaagaatattattatcttgatactacctctcaagggtattgttacaaaatgccacttatggttaaagagatagatacaaagagttctatttgacagaagcttgaaactctggcatctatctgcccaacgatgggggctttcgttctgtaatttaatcctttgtagatacattatttgtgtgtaattttatacgtgttcatatttttctcattttgcattgtgtaaagtgtacaaaatctcaaagtataaaatactgcttatattgcttgtaatttacagtgtgtaaatattttctaattgtgtacattgatgggggggacaagtgggttattcaggtttttttttaatgacccttttgtattgcagtttcaacagataactgtccatcaaatttaaaaccactttgatacatttttatttaacagttccaataagaaaaaaatctctatttttaattatatttctcctttagaaaaaaaatacttcatggtccctctaaaataaatggccagacctcagtttaggcccttgtatttatgactctggtagaggtcttcagactccaggtcatagtccagtcagtatttgcatttgggttctcatgaaaactttgtgactctcttttagcacaagtagcccatggtttttcttccaaatcaagtattttacttctcccttgagtccccatgctttgtctccctcctgctgctattgcccggtgaatgggatggtagagagggagaaatgttcattgcacagagaatgtcaggccactttggggacttggcaaacgaagcttgcactgagtggtggtgtgtttggcaatattactgtgccaaaaatcaccttgtctaattttatggatatgtatggcaaacttattacccttcttgcaagctgcacattaaggtacttgtaagtgtttatgcttttgtgtgtaactgtttgccttttctaactgcttttcttgttactgaaaatataattctactagttttatcacattaagaggctctccatgcacaaaatgcattgatgtagccgtaaagtaacagcatttgtacattttctatctcctgatggcagtggtgcctttgtcaccttttggaaggtttgcattttgtttctgctttcaagcgcaaatagtagcttgctttcagcttcacaaaaatctcctcaaatgtaaaagatacaaaatggcgtgttatcatccaggcttagttggagtatttgcatttttatttttatcaaaacaaatataattggtggggactggccagtaataatgtgtggcgtctttaagccaagagtaatttttaaattaaaaatgaaaattttaagaggtagcccattaaacaagctactgagttggagaattaggggatgactgtggtggtttgtcgctaaggaggcaacagtagggtccaggcggcggggcacgtagagcagttagcatgatccatggttattccttactcatgaacagtgtcggcgcacctcattatctgtgcatttgtttttcctgggcagtcctgtcagccagttaatccaccagctcttaggaagtaaatacagatttttttctttccttttttttttttttaaagattttatactacatcttgttaaagtcctatgaatgtgtgtgtgtgtgtgctattaaaactgctttttctcagtttgaaca

SEQ ID NO: 182489 - DNA, 3712 bp, Homo sapiens
  Payload ID: 15956
  Gene Symbol: SLF2
  Gene Name: SMC5-SMC6 complex localization factor 2
  Uniprot ID: Q8IX21
  ENST ID: ENST00000370269
  CDS Start-End: 133-3693
ccgccatgaagagagaagggggtgccgcccacctctgctccgacagcctcccggagtcccagcagcaagacggcaaccacgcacccaacttctccagccacggctcatgccgccgtcgccagcggcgccgacatgacaaggcgctgcatgcccgctaggccaggtttcccctcatccccagccccggggtcgtcgcccccgcgctgccatctgagacccggtagtaccgcccatgctgcagcgggaaagagaacagagagtcctggggacaggaagcagtcaattatagatttcttcaaaccagcttcaaaacaagacagacacatgttggattcaccacaaaaatcaaacatcaaatatggaggaagtagattgtctatcactgggacagagcagtttgaaaggaaactatcctcaccaaaagaatctaaacccaaaagggtgccaccagaaaagagccctattatagaagctttcatgaaaggtgttaaagagcaccatgaagatcatggtatacatgagtcacgtcggccttgtctgtcactagcctccaaatatttagccaaaggaacaaatatctatgttccttcttcatatcacttgccaaaggagatgaagtcactaaagaaaaaacatcgatccccagagagaaggaagtcactattcattcatgaaaataatgagaagaatgatagagatcgaggcaaaaccaatgcagactccaaaaagcagaccacagtggcagaagctgacatcttcaataacagctccagaagccttagcagcaggagcagcctgtccaggcaccacccggaagaaagcccactgggagctaaattccagttgtcactagcttcttactgcagagaacgagaactaaagaggttgagaaaggagcaaatggagcagagaatcaactccgagaattctttctcagaagcaagcagtctttccttaaaatctagtatagaaagaaaatataaaccaaggcaggaacaaaggaaacagaatgacatcatacctggaaaaaataatctgtcaaatgtggaaaatggacatctctcaagaaaaagatcctcttctgattcatgggaacctacttcagcaggctctaagcagaataaattccctgaaaaaagaaaaaggaactctgtggactcagatctgaaaagcacaagagaatctatgataccaaaagcaagagagtccttccttgagaagcgtcctgatggaccacatcagaaagaaaaatttataaaacatattgcactgaagacacctggtgatgtgttgcgcttagaagatatatccaaggaaccgagtgatgaaactgatggctcttctgcaggcttggcaccttcaaattctggcaattctggccaccattctaccaggaatagtgaccaaatccaagtggcaggtaccaaggagactaagatgcagaaaccccacttacctttatctcaggaaaagtctgcaattaaaaaagctagcaaccttcagaaaaataaaaccgctagctccacgacaaaggagaaggagacaaaactacctttactttcccgtgttccaagtgctggttcctctctagtaccattaaatgctaaaaattgtgctcttccagtttctaaaaaagataaagagcgttcctcatctaaagaatgttctgggcattctacagaatccaccaaacacaaggaacacaaagcaaagactaataaggccgattctaatgtatcttcagggaaaatttctgggggacctttgcgctcagaatatggcactcctacaaagtctccccctgctgctttggaagttgtgccatgtatcccaagccctgcagcaccttcagataaagccccttcagaaggagagagttcaggaaattccaatgcaggtagcagtgcactgaaaagaaaactaaggggtgattttgatagtgatgaagaaagtttaggttacaacctagacagtgatgaggaagaggaaacattaaagtcactggaagaaataatggctttgaacttcaatcagactcctgcagctacaggaaagcctcctgctctttccaaggggcttagatctcagtcatcagactatacaggacatgttcatcctggaacttacacaaataccttagaacgtctagtgaaggaaatggaagacacacaaaggctagatgaactgcagaagcaactacaagaagacataaggcaaggccgaggcattaaatccccaatcagaattggagaagaagacagtacagatgatgaggatggcctcttagaagagcacaaggaatttctaaagaaattttcagttacaattgatgctattcctgatcatcatccaggtgaagaaatatttaatttcctcaattctggaaaaattttcaatcagtataccttggatttaagagactctggttttattggacaaagtgctgtagaaaaacttattcttaaatcgggaaaaacagatcagatttttttgacaacacaaggtttccttacgtctgcttatcactatgtccagtgtcctgtccctgtgttaaagtggctgtttcggatgatgtcagttcatacagactgtattgtgtcagtgcagattttaagtacattgatggaaataacaattagaaatgataccttcagtgactcaccagtttggccatggatcccatcattgtctgatgtagcagctgtgtttttcaatatggggattgattttagatctttgtttcccctggagaatcttcagccagactttaatgaagactatctagtttctgaaacacagacaacatcaagggggaaagaaagtgaagattcatcttataagccaattttttcaacacttcctgaaaccaacattttaaatgtggttaagtttctaggcttgtgtacatctatacatccagaaggttaccaggatcgtgaaataatgttgctgattttaatgttatttaaaatgagtttggaaaaacagctgaaacagattcctttagtagactttcaaagcctcctgataaacctgatgaaaaacatcagagattggaacacaaaggtgcctgaactctgtctgggcataaatgaactctccagtcatccccacaacctcctgtggttggtacagctggtccctaattggacatcacgtggaaggcaactgagacagtgcctcagtctagtgattatttcaaagcttttggatgagaaacacgaagatgttcctaatgccagtaatctgcaggtatcagtcctacatcgctatcttgtgcagatgaagccttctgatttgttaaagaaaatggtcttgaagaaaaaggctgaacaaccagatggcattattgatgacagtcttcatttagaacttgaaaagcaggcatattacctgacctacattcttcttcatttagtcggtgaagttagttgttctcattctttttcttctggacaacggaaacactttgtgctactctgtggggctttggaaaagcatgttaaatgtgatattagggaagatgcaagacttttttacagaactaaggtgaaagacttggtcgccaggatacatggaaaatggcaggaaataatccagaactgtcggcctactcaggtgtcattttgttatacaatttcatgtattcttaatagttttgctgaatggcactcttcatactgtttgaaataaaatagggtataacagtgca

SEQ ID NO: 182490 - DNA, 2931 bp, Homo sapiens
  Payload ID: 15956
  Gene Symbol: SLF2
  Gene Name: SMC5-SMC6 complex localization factor 2
  ENST ID: ENST00000370271
  CDS Start-End: 149-2425
acttccgaagagagaaccgccatgaagagagaagggggtgccgcccacctctgctccgacagcctcccggagtcccagcagcaagacggcaaccacgcacccaacttctccagccacggctcatgccgccgtcgccagcggcgccgacatgacaaggcgctgcatgcccgctaggccaggtttcccctcatccccagccccggggtcgtcgcccccgcgctgccatctgagacccggtagtaccgcccatgctgcagcgggaaagagaacagagagtcctggggacaggaagcagtcaattatagatttcttcaaaccagcttcaaaacaagacagacacatgttggattcaccacaaaaatcaaacatcaaatatggaggaagtagattgtctatcactgggacagagcagtttgaaaggaaactatcctcaccaaaagaatctaaacccaaaagggtgccaccagaaaagagccctattatagaagctttcatgaaaggtgttaaagagcaccatgaagatcatggtatacatgagtcacgtcggccttgtctgtcactagcctccaaatatttagccaaaggaacaaatatctatgttccttcttcatatcacttgccaaaggagatgaagtcactaaagaaaaaacatcgatccccagagagaaggaagtcactattcattcatgaaaataatgagaagaatgatagagatcgaggcaaaaccaatgcagactccaaaaagcagaccacagtggcagaagctgacatcttcaataacagctccagaagccttagcagcaggagcagcctgtccaggcaccacccggaagaaagcccactgggagctaaattccagttgtcactagcttcttactgcagagaacgagaactaaagaggttgagaaaggagcaaatggagcagagaatcaactccgagaattctttctcagaagcaagcagtctttccttaaaatctagtatagaaagaaaatataaaccaaggcaggaacaaaggaaacagaatgacatcatacctggaaaaaataatctgtcaaatgtggaaaatggacatctctcaagaaaaagatcctcttctgattcatgggaacctacttcagcaggctctaagcagaataaattccctgaaaaaagaaaaaggaactctgtggactcagatctgaaaagcacaagagaatctatgataccaaaagcaagagagtccttccttgagaagcgtcctgatggaccacatcagaaagaaaaatttataaaacatattgcactgaagacacctggtgatgtgttgcgcttagaagatatatccaaggaaccgagtgatgaaactgatggctcttctgcaggcttggcaccttcaaattctggcaattctggccaccattctaccaggaatagtgaccaaatccaagtggcaggtaccaaggagactaagatgcagaaaccccacttacctttatctcaggaaaagtctgcaattaaaaaagctagcaaccttcagaaaaataaaaccgctagctccacgacaaaggagaaggagacaaaactacctttactttcccgtgttccaagtgctggttcctctctagtaccattaaatgctaaaaattgtgctcttccagtttctaaaaaagataaagagcgttcctcatctaaagaatgttctgggcattctacagaatccaccaaacacaaggaacacaaagcaaagactaataaggccgattctaatgtatcttcagggaaaatttctgggggacctttgcgctcagaatatggcactcctacaaagtctccccctgctgctttggaagttgtgccatgtatcccaagccctgcagcaccttcagataaagccccttcagaaggagagagttcaggaaattccaatgcaggtagcagtgcactgaaaagaaaactaaggggtgattttgatagtgatgaagaaagtttaggttacaacctagacagtgatgaggaagaggaaacattaaagtcactggaagaaataatggctttgaacttcaatcagactcctgcagctacaggaaagcctcctgctctttccaaggggcttagatctcagtcatcagactatacaggacatgttcatcctggaacttacacaaataccttagaacgtctagtgaaggaaatggaagacacacaaaggtttgttagcataaagattaatttgctaaatttaacattttgcttgtttgtgtggcttacttttaatttaccttttttaaaaaatcatgagaaattagcgtgcattttggactctgttgtcaactgtgttagaataagatatgttggccggacgcagtggctcatgcctgtaatcacaacactttgggagacccaggcaagattacttgagcccaggagttcaaggctgcggtgagtcgtgatggcgccacttcactgcagcctgggtggcagagtgagacccagtctcaaatgaaaaaaagaggccaggtgtgatggctcatgcctgtaatccagtactttaggaggccaaagcaggcaaatctcttgagcccaggagtttgagactagcctgggcaacatggtgaaaccccatctctacaaaaaatacaaaaattagccagtcatggtgccacatacctatggtcccagctactcaacaggctgaggttgggaggatcacctgagcccaaggaggtcaaggctgtagtgagctgtgattgagccactgcactccaatctgggtgacagaataagaccccgtctcaaaaaaaaaaaaagtggggggccaggcgcagtggctcacgcctgtaatcccagcactttgggaggccgaggcaggtggatcatgaggtcaggagatcgagaccatgctggctaacatggtgaaaccccatctctactaaaaaataaaaaaaaaaa

SEQ ID NO: 182491 - DNA, 891 bp, Homo sapiens
  Payload ID: 15956
  Gene Symbol: SLF2
  Gene Name: SMC5-SMC6 complex localization factor 2
  Uniprot ID: Q8IX21
  ENST ID: ENST00000609386
  CDS Start-End: 116-307
gggggtgccgcccacctctgctccgacagcctcccggagtcccagcagcaagacggcaaccacgcacccaacttctccagccacggctcatgccgccgtcgccagcggcgccgacatgacaaggcgctgcatgcccgctaggccaggtttcccctcatccccagccccggggtcgtcgcccccgcgctgccatctgagacccggtagtaccgcccatgctgcagcgggaaagagaacagagagtcctggggacaggtaccgtgcagagggcttgagaaggggccgggtcgcgggggcaagggtatgaggggagggctgcagaccgccgctcttccagttcccgccatcctccgcgagctcaggcgttggcatttcggggcctggcaaatccccgccccgcctccgcgcaggggctactgggagttggagtttgcttctctgtagttgggcagctgctcttggtctagtgaccaccagcctggacagctacggagaacccgccttaggtagaaagaaagtgatttttttcctttgcaagagtttgacccgggaccctaactgcttaatgcatatttagatcgttttctgtacgttgtcagttctactgatcctagtggtttagtaatataaaccttttctatgttgtgggtgaaattatgtaacctgtgatgagggaatcccttccacgaattactttgtagtccagcgtgcacgctagttcatacttaaaagaacttgcagatttggaatgtgacgtgttttctctttcagtaacttcacgcctctccaagaggctaatttttttgtaaagattttgtgggagctatgtaatgagatggggagtttcatctaatgacatcctctgacaataaaacatgtttaaattcccta

SEQ ID NO: 182492 - DNA, 16115 bp, Homo sapiens
  Payload ID: 15957
  Gene Symbol: SMG1
  Gene Name: SMG1 phosphatidylinositol 3-kinase-related kinase
  Uniprot ID: Q96Q15
  ENST ID: ENST00000446231
  CDS Start-End: 414-11399
gtgcgacagcggcggcgcggcgggcggagccgggaggcggggaagcagtggccgtgtgagcgtgaggagctgccgccaccgcctgctcctcgtcgtcctcgtcctccggggccccggcgacgtgggccgcgcacggccctggaaaagacgtcgcctccccttcatccgcctctctctcaccgcgccgctcccgcctcctcgtcctgcgctgcgggctcaggcggaacccggaacggccgtcctcttcccccgccctccgccgcctcctccttctcctcctcctcctcctcctcctccttctcggcttcctcctcagccccgggccggagcggggtgtcggcggcggccggttcgggcggcgactcgcgcttctttgggcggcggcgcttggccatgtcgtgtcggggaaggtaatgagccgcagagccccggggtctcggctgagcagcggcggcggcggcggcggcaccaagtatccgcggagctggaatgactggcaacccagaactgatagtgcatcagccgacccagataatttaaaatattcttcatccagagatagaggtggttcttcctcttatggactgcaaccttcaaattcagctgtggtgtctcggcaaaggcacgatgataccagagtccacgctgacatacagaatgacgaaaagggtggctacagtgtcaatggaggatctggggaaaatacttatggtcggaagtcgttggggcaagagctgagggttaacaatgtgaccagccctgagttcaccagtgttcagcatggcagtcgtgctttagccaccaaagacatgaggaaatcacaggagagatcgatgtcttattctgatgagtctcgactgtcgaatcttcttcggaggatcacccgggaagacgacagagaccgaagattggctactgtaaagcagttgaaagaatttattcagcaaccagaaaataagctggtactagttaaacaattggataatatcttggctgctgtacatgacgtgcttaatgaaagtagcaaattgcttcaggagttgagacaggagggagcttgctgtcttggccttctttgtgcttctctgagctatgaggctgagaagatcttcaagtggatttttagcaaatttagctcatctgcaaaagatgaagttaaactcctctacttatgtgccacctacaaagcactagagactgtaggagaaaagaaagccttttcatctgtaatgcagcttgtaatgaccagcctgcagtctattcttgaaaatgtggatacaccagaattgctttgtaaatgtgttaagtgcattcttttggtggctcgatgttaccctcatattttcagcactaattttagggatacagttgatatattagttggatggcatatagatcatactcagaaaccttcgctcacgcagcaggtatctgggtggttgcagagtttggagccattttgggtagctgatcttgcattttctactactcttcttggtcagtttctggaagacatggaagcatatgctgaggacctcagccatgtggcctctggggaatcagtggatgaagatgtccctcctccatcagtgtcattaccaaagctggctgcacttctccgggtatttagtactgtggtgaggagcattggggaacgcttcagcccaattcggggtcctccaattactgaggcatatgtaacagatgttctgtacagagtaatgagatgtgtgacggctgcaaaccaggtgtttttttctgaggctgtgttgacagctgctaatgagtgtgttggtgttttgctcggcagcttggatcctagcatgactatacattgtgacatggtcattacatatggattagaccaactggagaattgccagacttgtggtaccgattatatcatctcagtcttgaatttactcacgctgattgttgaacagataaatacgaaactgccatcatcatttgtagaaaaactgtttataccatcatctaaactactattcttgcgttatcataaagaaaaagaggttgttgctgtagcccatgctgtttatcaagcagtgctcagcttgaagaatattcctgttttggagactgcctataagttaatattgggagaaatgacttgtgccctaaacaacctcctacacagtctacaacttcctgaggcctgttctgaaataaaacatgaggcttttaagaatcatgtgttcaatgtagacaatgcaaaatttgtagttatatttgacctcagtgccctgactacaattggaaatgccaaaaactcactaatagggatgtgggcgctatctccaactgtctttgcacttctgagtaagaatctgatgattgtgcacagtgacctggctgttcacttccctgccattcagtatgctgtgctctacacattgtattctcattgtaccaggcatgatcactttatctctagtagcctcagttcttcctctccttctttgtttgatggagctgtgattagcactgtaactacggctacaaagaaacatttctcaattatattaaatcttctgggaatattacttaagaaagataaccttaaccaggacacgaggaaactgttaatgacttgggctttggaagcagctgttttaatgaagaagtctgaaacatacgcacctttattctctcttccgtctttccataaattttgcaaaggccttttagccaacactctcgttgaagatgtgaatatctgtctgcaggcatgcagcagtctacatgctctgtcctcttccttgccagatgatcttttacagagatgtgtcgatgtttgccgtgttcaactagtgcacagtggaactcgtattcgacaagcatttggaaaactgttgaaatcaattcctttagatgttgtcctaagcaataacaatcacacagaaattcaagaaatttctttagcattaagaagtcacatgagtaaagcaccaagtaatacattccacccccaagatttctctgatgttattagttttattttgtatgggaactctcatagaacagggaaggacaattggttggaaagactgttctatagctgccagagactggataagcgtgaccagtcaacaattccacgcaatctcctgaagacagatgctgtcctttggcagtgggccatatgggaagctgcacaattcactgttctttctaagctgagaaccccactgggcagagctcaagacaccttccagacaattgaaggtatcattcgaagtctcgcagctcacacattaaaccctgatcaggatgttagtcagtggacaactgcagacaatgatgaaggccatggtaacaaccaacttagacttgttcttcttctgcagtatctggaaaatctggagaaattaatgtataatgcatacgagggatgtgctaatgcattaacttcacctcccaaggtcattagaacttttttctataccaatcgccaaacttgtcaggactggctaacgcggattcgactctccatcatgagggtaggattgttggcaggccagcctgcagtgacagtgagacatggctttgacttgcttacagagatgaaaacaaccagcctatctcaggggaatgaattggaagtaaccattatgatggtggtagaagcattatgtgaacttcattgtcctgaagctatacagggaattgctgtctggtcatcatctattgttggaaaaaatcttctgtggattaactcagtggctcaacaggctgaagggaggtttgaaaaggcctctgtggagtaccaggaacacctgtgtgccatgacaggtgttgattgctgcatctccagctttgacaaatcggtgctcaccttagccaatgctgggcgtaacagtgccagcccgaaacattctctgaatggtgaatccagaaaaactgtgctgtccaaaccgactgactcttcccctgaggttataaattatttaggaaataaagcatgtgagtgctacatctcaattgccgattgggctgctgtgcaggaatggcagaacgctatccatgacttgaaaaagagtaccagtagcacttccctcaacctgaaagctgacttcaactatataaaatcattaagcagctttgagtctggaaaatttgttgaatgtaccgagcagttagaattgttaccaggagaaaatatcaatctacttgctggaggatcaaaagaaaaaatagacatgaaaaaactgcttcctaacatgttaagtccggatccgagggaacttcagaaatccattgaagttcaattgttaagaagttctgtttgtttggcaactgctttaaacccgatagaacaagatcagaagtggcagtctataactgaaaatgtggtaaagtacttgaagcaaacatcccgcatcgctattggacctctgagactttctactttaacagtttcacagtctttgccagttctaagtaccttgcagctgtattgctcatctgctttggagaacacagtttctaacagactttcaacagaggactgtcttattccactcttcagtgaagctttacgttcatgtaaacagcatgacgtgaggccatggatgcaggcattaaggtatactatgtaccagaatcagttgttggagaaaattaaagaacaaacagtcccaattagaagccatctcatggaattaggtctaacagcagcaaaatttgctagaaaacgagggaatgtgtcccttgcaacaagactgctggcacagtgcagtgaagttcagctgggaaagaccaccactgcacaggatttagtccaacattttaaaaaactatcaacccaaggtcaagtggatgaaaaatgggggcccgaacttgatattgaaaaaaccaaattgctttatacagcaggccagtcaacacatgcaatggaaatgttgagttcttgtgccatatctttctgcaagtctgtgaaagctgaatatgcagttgctaaatcaattctgacactggctaaatggatccaggcagaatggaaagagatttcaggacagctgaaacaggtttacagagctcagcaccaacagaacttcacaggtctttctactttgtctaaaaacatactcactctaatagaactgccatctgttaatacgatggaagaagagtatcctcggatcgagagtgaatctacagtgcatattggagttggagaacctgacttcattttgggacagttgtatcacctgtcttcagtacaggcacctgaagtagccaaatcttgggcagcgttggccagctgggcttataggtggggcagaaaggtggttgacaatgccagtcagggagaaggtgttcgtctgctgcctagagaaaaatctgaagttcagaatctacttccagacactataactgaggaagagaaagagagaatatatggtattcttggacaggctgtgtgtcggccggcggggattcaggatgaagatataacacttcagataactgagagtgaagacaacgaagaagatgacatggttgatgttatctggcgtcagttgatatcaagctgcccatggctttcagaacttgatgaaagtgcaactgaaggagttattaaagtgtggaggaaagttgtagatagaatattcagcctgtacaaactctcttgcagtgcatactttactttccttaaactcaacgctggtcaaattcctttagatgaggatgaccctaggctgcatttaagtcacagagtggaacagagcactgatgacatgattgtgatggccacattgcgcctgctgcggttgctcgtgaagcatgctggtgagcttcggcagtatctggagcacggcttggagacaacacccactgcaccatggagaggaattattccgcaacttttctcacgcttaaaccaccctgaagtgtatgtgcgccaaagtatttgtaaccttctctgccgtgtggctcaagattccccacatctcatattgtatcctgcaatagtgggtaccatatcgcttagtagtgaatcccaggcttcaggaaataaattttccactgcaattccaactttacttggcaatattcaaggagaagaattgctggtttctgaatgtgagggaggaagtcctcctgcatctcaggatagcaataaggatgaacctaaaagtggattaaatgaagaccaagccatgatgcaggattgttacagcaaaattgtagataagctgtcctctgcaaaccccaccatggtattacaggttcagatgctcgtggctgaactgcgcagggtcactgtgctctgggatgagctctggctgggagttttgctgcaacaacacatgtatgtcctgagacgaattcagcagcttgaagatgaggtgaagagagtccagaacaacaacaccttacgcaaagaagagaaaattgcaatcatgagggagaagcacacagctttgatgaagcccatcgtatttgctttggagcatgtgaggagtatcacagcggctcctgcagaaacacctcatgaaaaatggtttcaggataactatggtgatgccattgaaaatgccctagaaaaactgaagactccattgaaccctgcaaagcctgggagcagctggattccatttaaagagataatgctaagtttgcaacagagagcacagaaacgtgcaagttacatcttgcgtcttgaagaaatcagtccatggttggctgccatgactaacactgaaattgctcttcctggggaagtctcagccagagacactgtcacaatccatagtgtgggcggaaccatcacaatcttaccgactaaaaccaagccaaagaaacttctctttcttggatcagatgggaagagctatccttatcttttcaaaggactggaggatttacatctggatgagagaataatgcagttcctatctattgtgaataccatgtttgctacaattaatcgccaagaaacaccccggttccatgctcgacactattctgtaacaccactaggaacaagatcaggactaatccagtgggtagatggagccacacccttatttggtctttacaaacgatggcaacaacgggaagctgccttacaagcacaaaaggcccaagattcctaccaaactcctcagaatcctggaattgtaccccgtcctagtgaactttattacagtaaaattggccctgctttgaaaacagttgggcttagcctggatgtgtcccgtcgggattggcctcttcatgtaatgaaggcagtattggaagagttaatggaggccacacccccgaatctccttgccaaagagctctggtcatcttgcacaacacctgatgaatggtggagagttacgcagtcttatgcaagatctactgcagtcatgtctatggttggatacataattggccttggagacagacatctggataatgttcttatagatatgacgactggagaagttgttcacatagattacaatgtttgctttgaaaaaggtaaaagccttagagttcctgagaaagtaccttttcgaatgacacaaaacattgaaacagcactgggtgtaactggagtagaaggtgtatttaggctttcatgtgagcaggttttacacattatgcggcgtggcagagagaccctgctgacgctgctggaggcctttgtgtacgaccctctggtggactggacagcaggaggcgaggctgggtttgctggtgctgtctatggtggaggtggccagcaggccgagagcaagcagagcaagagagagatggagcgagagatcacccgcagcctgttttcttctagagtagctgagattaaggtgaactggtttaagaatagagatgagatgctggttgtgcttcccaagttggacggtagcttagatgaatacctaagcttgcaagagcaactgacagatgtggaaaaactgcagggcaaactactggaggaaatagagtttctagaaggagctgaaggggtggatcatccttctcatactctgcaacacaggtattctgagcacacccaactacagactcagcaaagagctgttcaggaagcaatccaggtgaagctgaatgaatttgaacaatggataacacattatcaggctgcattcaataatttagaagcaacacagcttgcaagcttgcttcaagagataagcacacaaatggaccttggtcctccaagttacgtgccagcaacagcctttctgcagaatgctggtcaggcccacttgattagccagtgcgagcagctggagggggaggttggtgctctcctgcagcagaggcgctccgtgctccgtggctgtctggagcaactgcatcactatgcaaccgtggccctgcagtatccgaaggccatatttcagaaacatcgaattgaacagtggaagacctggatggaagagctcatctgtaacaccacagtagagcgttgtcaagagctctataggaaatatgaaatgcaatatgctccccagccacccccaacagtgtgtcagttcatcactgccactgaaatgaccctgcagcgatacgcagcagacatcaacagcagacttattagacaagtggaacgcttgaaacaggaagctgtcactgtgccagtttgtgaagatcagttgaaagaaattgaacgttgcattaaagttttccttcatgagaatggagaagaaggatctttgagtctagcaagtgttattatttctgccctttgtacccttacaaggcgtaacctgatgatggaaggtgcagcgtcaagtgctggagaacagctggttgatctgacttctcgggatggagcctggttcttggaggaactctgcagtatgagcggaaacgtcacctgcttggttcagttactgaagcagtgccacctggtgccacaggacttagatatcccgaaccccatggaagcgtctgagacagttcacttagccaatggagtgtatacctcacttcaggaattgaattcgaatttccggcaaatcatatttccagaagcacttcgatgtttaatgaaaggggaatacacgttagaaagtatgctgcatgaactggacggtcttattgagcagaccaccgatggcgttcccctgcagactctagtggaatctcttcaggcctacttaagaaacgcagctatgggactggaagaagaaacacatgctcattacatcgatgttgccagactactacatgctcagtacggtgaattaatccaaccgagaaatggttcagttgatgaaacacccaaaatgtcagctggccagatgcttttggtagcattcgatggcatgtttgctcaagttgaaactgctttcagcttattagttgaaaagttgaacaagatggaaattcccatagcttggcgaaagattgacatcataagggaagccaggagtactcaagttaatttttttgatgatgataatcaccggcaggtgctagaagagattttctttctaaaaagactacagactattaaggagttcttcaggctctgtggtaccttttctaaaacattgtcaggatcaagttcacttgaagatcagaatactgtgaatgggcctgtacagattgtcaatgtgaaaaccctttttagaaactcttgtttcagtgaagaccaaatggccaaacctatcaaggcattcacagctgactttgtgaggcagctcttgatagggctacccaaccaagccctcggactcacactgtgcagttttatcagtgctctgggtgtagacatcattgctcaagtagaggcaaaggactttggtgccgaaagcaaagtttctgttgatgatctctgtaagaaagcggtggaacataacatccagatagggaagttctctcagctggttatgaacagggcaactgtgttagcaagttcttacgacactgcctggaagaagcatgacttggtgcgaaggctagaaaccagtatttcttcttgtaagacaagcctgcagcgggttcagctgcatattgccatgtttcagtggcaacatgaagatctacttatcaatagaccacaagccatgtcagtcacacctcccccacggtctgctatcctaaccagcatgaaaaagaagctgcataccctgagccagattgaaacttctattgcaacagttcaggagaagctagctgcacttgaatcaagtattgaacagcgactcaagtgggcaggtggtgccaaccctgcattggcccctgtactacaagattttgaagcaacgatagctgaaagaagaaatcttgtccttaaagagagccaaagagcaagtcaggtcacatttctctgcagcaatatcattcattttgaaagtttacgaacaagaactgcagaagccttaaacctggatgcggcgttatttgaactaatcaagcgatgtcagcagatgtgttcgtttgcatcacagtttaacagttcagtgtctgagttagagcttcgtttattacagagagtggacactggtcttgaacatcctattggcagctctgaatggcttttgtcagcacacaaacagttgacccaggatatgtctactcagagggcaattcagacagagaaagagcagcagatagaaacggtctgtgaaacaattcagaatctggttgataatataaagactgtgctcactggtcataaccgacagcttggagatgtcaaacatctcttgaaagctatggctaaggatgaagaagctgctctggcagatggtgaagatgttccctatgagaacagtgttaggcagtttttgggtgaatataaatcatggcaagacaacattcaaacagttctatttacattagtccaggctatgggtcaggttcgaagtcaagaacacgttgaaatgctccaggaaatcactcccaccttgaaagaactgaaaacacaaagtcagagtatctataataatttagtgagttttgcatcacccttagtcaccgatgcaacaaatgaatgttcgagtccaacgtcatctgctacttatcagccatccttcgctgcagcagtccggagtaacactggccagaagactcagcctgatgtcatgtcacagaatgctagaaagctgatccaaaaaaatcttgctacatcagctgatactccaccaagcaccgttccaggaactggcaagagtgttgcttgtagtcctaaaaaggcagtcagagaccctaaaactgggaaagcggtgcaagagagaaactcctatgcagtgagtgtgtggaagagagtgaaagccaagttagagggccgagatgttgatccgaataggaggatgtcagttgctgaacaggttgactatgtcattaaggaagcaactaatctagataacttggctcagctgtatgaaggttggacagcctgggtgtgaatggcaagacagtagatgagtctggttaagcgaggtcagacatccaccagaatcaactcagcctcaggcatccaaagccacaccacagtcggtggtgatgcaactgggggcttactctgaggaaacctaggaaatctcggtgcactaggaagtgaatcccgcaggacagctgcactcagggatacgcccaacaccatggcctgcaaccccagggtcaagggtgaaggaaagcaagctcaccgcctgaacacggagattgtctttctgccacagaacagcagcagacgtgtcgggaggttagctgcggaaagaaatcgggatgccgcggagcacagagtgatttggaactccattccacctgaccctgtgtgtacaatccaggaaaaaaacaaaccccactcagaaacagagaaaactggggtcgcgaagaaatcacagccaaggaagatttgatgcattcagattctcgtgtaacacttgttgcttggcaacagtactggttgggttgaccagtaagtagaaaaaggctaaaggctatgcgatatgaatttcagaaatggactgaaaatggagagctatgtaacagatacactacagtagaagaacttacttctgaaatgaagggaaaaaaaccaccccatcgttccctactcctccccaccacttacccgttccccctttacctaatctagtagattagccatctttcaaattcacttttatttcagtccttatatttcatatacttccgtctcgatgctgttaacaacttctgataacatggaaaattcaaggattgtttaaaggtctgatgatcacacacaaaatgtaattccggttatttaagtcatttctgtgattctatcatgtacagtttccagaattgtcactgtgcattcaaaagtaatgaatctaacagacatttgatttaatgtacactcccttttgcttatagtgtgcattttttttggaggtcattcaaattttccctcttctgtgatagctgtagtttctttcatagaaagtagctaatccagtgtaatcttttacctttttaaaaaccaagatagagtatctattagagttttacattgttgatgatagattaacaataaagtgatgttctggtggaggtagactgaaatttttttaattcatgtttttcatttgatacttttaatttacacttagtaaattaaaagttgtttaatttacttggcattttaggacatgtacatgaaacagtgaaaatgagatccaccaacatcttttattaagttcagttattagtctgtgaagtgctttactttttgcacaattttaatagcttgctattcagtaatacattatagtgaattcatgatcaaggtttccttaaatttagcattgcatttcagtactgactgtgtaagctaaattgctgatccaaaataaaaacccagactagaatagggttcttaaaatcaagtatcaatacaaaatagaacacaattaaaatcttaattgttggctgggcacagtggctcacgcctgtaatcccagcactttgggaggccgaggcgggcggatcatgaggttaggagagcgagaccatcctggctaacacggtgaaaccccgtctttactaaaaatacaaaaaaaattagccgggcgtggtggcgggcgcctgtagtcccagctactcgggaggctgaggcaggagaatggcgtgaacccaggaggcggagcttgcagtgagccgagattgtgccactgcactccagcctgggcaacagagctagactctgtgtcaaaaataaatgactagataaaaaaaaaaattgtttgagtacattttccctgcattttagagattaggacagtggtcactttctagttgccgtcttcacagacaaacttgaaaggtattaaggaaaaaattccacatagctctgggccttttttgtattctgattgccacgttaatctgtaatcgttaagtacccatgaaagaatgtgtttcagtatcagtgcttttttggtactttaacaagtattgtaggcacggtggatttttttgaaatacccatgtgtccaatagcaagttaaggaacctagcgcatcaaattttgttttcttcattcatttggaaccttattttcgcaaaaaacctagctggaataataatgccatattgtattttgcacactgctttattttctagaggctctgggagcaaattacattcatcacattacctctgctctctcaagattaaagtctttcagcaacattctttattgtcatcataaggaaaaacttttatcgcaatgatagtcagttcacattagtttagcactatagatagtattcagaaattgctttctctttggtaaagaagataaataggtgaattttattgcctgtgttttcaggcttcagaggtacctggcaccttactcaagcaaaaacaaaaaacagctttacttcaaaagcatgtgcctctggtaaattatccatcacttttgttttaaagtggtccctccaagaataatgtggcatacacagtgggtttggttgtaaggcagatgtaatagatgacttcaaaagcctgctccttactgcactctggacaaggccctggtctgtatagtttggcttcctctgttaagtcattctacaaggtgacttgccatttgaactttcgtaagagacctcagcagttagactgagaaaagttagagtgctgtagttatgaagtcatacatttttgataaaatacctgtggaaaaccagggatcctctcctgtttctctctcttgcctccccctttccctccattcctctgtcgcctccccctctcctccactttctttaagaatcagggggtacagaataacctacaaacaacctcttcaaagtacccttggaaattgaagttcaatcttaagttttttgctgtctttaatttactagaattgcctaatttttagttgatttctctacagagcttagcttgtgtagttatttctcttttactgttgctttggtgtgtcttgaagtttgattgattatttttggtcattgagttcttagtgtagtttgctagatgattattaagattcttttgtgtctgacacttgtggtgagttgcttttgaaatctgttgagatttccatgtgagaactgataatcaggctcttgatctgcttccctaaattacttttttagagcccaaaccccaggtttagggtgagggtttgtaatacaaagaaacacttccatcacttctgcccttaacccttgcctctattacctaagcttagtaagtagttttcttaatattgtccaatgtttggtgttatctgcattgttttttgtttttttaattgtggttgttctgacgtgtgaaatttaaggaaagagccattttttaaaaatgccgagcagggcaatgcaagtacagccaaatattagacttgatgtgcaatcttcggtcctttttaatctggggtattataggcagtactttaaattgcaaagtcttccgggcctattttcctctacatttttgtaattaactctgggggcttacttgttttggcagtactgaaatcaaaggagctggttcttcttttctcccaattattttcatatgaaagcacctacaattagcctgttagtcctattcagatacatcaaatatcagtgaatgctttactattcgcacatttaagcatctttgttttacataaaattagagtatgaaaaccagtgttcaattttttatcttgttgagcttgtaaaatgccagcaatttaaaactaggacttttccccccataagccaaggaggtagaattactaatacaagggttaaagaaggtagattttgttttcaatatttgggtaatattagaaagattcttcccacagggaagaactagcaagtgtcccaattttttccaaacgttggggaggggaaaattcactgtatcatgaaaccctaagggtttgttgcacttcctgctttttaggcctggataacagtatcaccatccttatttacagaagggtaaaactgactcttaatgagaaaagctttataagttcaagggctgtaaaatatgaactacttagggtcgtttgccttccatgggaacttggctagacttagaaaaagctgtttgttgtgctaatgtaaaagtgtcatacaatttagaagatttttgaagatggtaaacttagaagaattctatgttctgaaatgcacacttttagaatgtttttctttgaaaacaggctaatagttttttctttttttgacaaagtttcagctcctctttaaagttattgtgtcatttttctggtttaaatttcccttatatttccacctgtaatgtcagtggcaacaacatcatacttcacttacttgttaatttactttttacccttattctaagagcaagttgagttgaactgaatcttccttgtcttagtaacaatgtataaatagtggcttttctgtacaaaaggttgtaatgcctcctgatggatataattttgtgattgtatttaaaagttgaataaatcacaccagcttcctgaaaatgttcataatgcatcttttggaaaacaaatacatgcctactttgtgcatatttgcattaacatggcaaagattgtatgaaatacctgtttttcagaaaataaaggttcagtctcaaaagatacagca

SEQ ID NO: 182493 - DNA, 1259 bp, Homo sapiens
  Payload ID: 15957
  Gene Symbol: SMG1
  Gene Name: SMG1 phosphatidylinositol 3-kinase-related kinase
  ENST ID: ENST00000532700
  CDS Start-End: 254-1259
cttctcggcttcctcctcagccccgggccggagcggggtgtcggcggcggccggttcgggcggcgactcgcgcttctttgggcggcggcgcttggccatgtcgtgtcggggaaggtaatgagccgcagagccccggggtctcggctgagcagcggcggcggcggcggcggcaccaagtatccgcggagctggaatgactggcaacccagattgacttgatgcaaaacatcacaaaggctccatattatacagtatgcgatttttgagaactgatagtgcatcagccgacccagataatttaaaatattcttcatccagagatagaggtggttcttcctcttatggactgcaaccttcaaattcagctgtggtgtctcggcaaaggcacgatgataccagagtccacgctgacatacagaatgacgaaaagggtggctacagtgtcaatggaggatctggggaaaatacttatggtcggaagtcgttggggcaagagctgagggttaacaatgtgaccagccctgagttcaccagtgttcagcatggcagtcgtgctttagccaccaaagacatgaggaaatcacaggagagatcgatgtcttattctgatgagtctcgactgtcgaatcttcttcggaggatcacccgggaagacgacagagaccgaagattggctactgtaaagcagttgaaagaatttattcagcaaccagaaaataagctggtactagttaaacaattggataatatcttggctgctgtacatgacgtgcttaatgaaagtagcaaattgcttcaggagttgagacaggagggagcttgctgtcttggccttctttgtgcttctctgagctatgaggctgagaagatcttcaagtggatttttagcaaatttagctcatctgcaaaagatgaagttaaactcctctacttatgtgccacctacaaagcactagagactgtaggagaaaagaaagccttttcatctgtaatgcagcttgtaatgaccagcctgcagtctattcttgaaaatgtggatacaccagaattgctttgtaaatgtgttaagtgcattcttttggtggctcgatgttaccctcatattttcagcactaattttagggatacagttgatatattagttggatggcatatagatcatactcagaaaccttcgctcacgcagcaggtatctgggtggttgcagagtttggagccattttgggtagctgatcttgcattttctactactcttcttg

SEQ ID NO: 182494 - DNA, 562 bp, Homo sapiens
  Payload ID: 15957
  Gene Symbol: SMG1
  Gene Name: SMG1 phosphatidylinositol 3-kinase-related kinase
  ENST ID: ENST00000569122
  CDS Start-End: 377-562
tgttcagcccggggctggagccgagacccggggctcccggcggtggcactggcctggggtcgggaccaggagaactgatagtgcatcagccgacccagataatttaaaatattcttcatccagagatagaggtggttcttcctcttatggactgcaaccttcaaattcagctgtggtgtctcggcaaaggcacgatgataccagagtccacgctgacatacagaatgacgaaaagggtggctacagtgtcaatggaggatctggggaaaatacttatggtcggaagtcgttggggcaagagctgagggttaacaatgtgaccagccctgagttcaccagtgttcagcatggcagtcgtgctttagccaccaaagacatgaggaaatcacaggagagatcgatgtcttattctgatgagtctcgactgtcgaatcttcttcggaggatcacccgggaagacgacagagaccgaagattggctactgtaaagcagttgaaagaatttattcagcaaccagaaaataagctggtactagttaaacaattggataatatcttggct

SEQ ID NO: 182495 - DNA, 2910 bp, Homo sapiens
  Payload ID: 15957
  Gene Symbol: SMG1
  Gene Name: SMG1 phosphatidylinositol 3-kinase-related kinase
  ENST ID: ENST00000563235
  CDS Start-End: 1-2561
gagaaatgacttgtgccctaaacaacctcctacacagtctacaacttcctgaggcctgttctgaaataaaacatgaggcttttaagaatcatgtgttcaatgtagacaatgcaaaatttgtagttatatttgacctcagtgccctgactacaattggaaatgccaaaaactcactaatagggatgtgggcgctatctccaactgtctttgcacttctgagtaagaatctgatgattgtgcacagtgacctggctgttcacttccctgccattcagtatgctgtgctctacacattgtattctcattgtaccaggcatgatcactttatctctagtagcctcagttcttcctctccttctttgtttgatggagctgtgattagcactgtaactacggctacaaagaaacatttctcaattatattaaatcttctgggaatattacttaagaaagataaccttaaccaggacacgaggaaactgttaatgacttgggctttggaagcagctgttttaatgaagaagtctgaaacatacgcacctttattctctcttccgtctttccataaattttgcaaaggccttttagccaacactctcgttgaagatgtgaatatctgtctgcaggcatgcagcagtctacatgctctgtcctcttccttgccagatgatcttttacagagatgtgtcgatgtttgccgtgttcaactagtgcacagtggaactcgtattcgacaagcatttggaaaactgttgaaatcaattcctttagatgttgtcctaagcaataacaatcacacagaaattcaagaaatttctttagcattaagaagtcacatgagtaaagcaccaagtaatacattccacccccaagatttctctgatgttattagttttattttgtatgggaactctcatagaacagggaaggacaattggttggaaagactgttctatagctgccagagactggataagcgtgaccagtcaacaattccacgcaatctcctgaagacagatgctgtcctttggcagtgggccatatgggaagctgcacaattcactgttctttctaagctgagaaccccactgggcagagctcaagacaccttccagacaattgaaggtatcattcgaagtctcgcagctcacacattaaaccctgatcaggatgttagtcagtggacaactgcagacaatgatgaaggccatggtaacaaccaacttagacttgttcttcttctgcagtatctggaaaatctggagaaattaatgtataatgcatacgagggatgtgctaatgcattaacttcacctcccaaggtcattagaacttttttctataccaatcgccaaacttgtcaggactggctaacgcggattcgactctccatcatgagggtaggattgttggcaggccagcctgcagtgacagtgagacatggctttgacttgcttacagagatgaaaacaaccagcctatctcaggggaatgaattggaagtaaccattatgatggtggtagaagcattatgtgaacttcattgtcctgaagctatacagggaattgctgtctggtcatcatctattgttggaaaaaatcttctgtggattaactcagtggctcaacaggctgaagggaggtttgaaaaggcctctgtggagtaccaggaacacctgtgtgccatgacaggtgttgattgctgcatctccagctttgacaaatcggtgctcaccttagccaatgctgggcgtaacagtgccagcccgaaacattctctgaatggtgaatccagaaaaactgtgctgtccaaaccgactgactcttcccctgaggttataaattatttaggaaataaagcatgtgagtgctacatctcaattgccgattgggctgctgtgcaggaatggcagaacgctatccatgacttgaaaaagagtaccagtagcacttccctcaacctgaaagctgacttcaactatataaaatcattaagcagctttgagtctggaaaatttgttgaatgtaccgagcagttagaattgttaccaggagaaaatatcaatctacttgctggaggatcaaaagaaaaaatagacatgaaaaaactgcttcctaacatgttaagtccggatccgagggaacttcagaaatccattgaagttcaattgttaagaagttctgtttgtttggcaactgctttaaacccgatagaacaagatcagaagtggcagtctataactgaaaatgtggtaaagtacttgaagcaaacatcccgcatcgctattggacctctgagactttctactttaacagtttcacagtctttgccagttctaagtaccttgcagctgtattgctcatctgctttggagaacacagtttctaacagactttcaacagaggactgtcttattccactcttcagtgaagctttacgttcatgtaaacagcatgacgtgaggccatggatgcaggcattaaggtatactatgtaccagaatcagttgttggagaaaattaaaggtaagtggtttttttttcttgtaagagaaaattaaaggtgttctttttttaaattttgctttattgaggtttatattacacattctaagtgtatggtttgatgagttctaacatgtcttcacttgtgtgaccaccaatacgatcgagatacagaacaccgtcttaccccagaaggttcccttgggatcatctcctcatttgcccctgtcagcagttactgatttgctttctgtcactatggattagacttgtctttactaaagtttcatgtacgtgaaatcataacaacatgttctcttgtgtttggcttctcttgctcaacatgatatttttaaggttcacccatattgcatgtatcaggaatacaatcctttttattattga

SEQ ID NO: 182496 - DNA, 565 bp, Homo sapiens
  Payload ID: 15957
  Gene Symbol: SMG1
  Gene Name: SMG1 phosphatidylinositol 3-kinase-related kinase
  ENST ID: ENST00000563836
  CDS Start-End: 396-565
aatgggaagacaaagatcttttgtattggcactaccagctgtgtccctctgagggggtaatttttgccttttgaagacgttgggagggttaaagttcaggaaattatttttaaaactgtttcagtgaatatttagaaaaatattagtggagatagaattaattgctccgcagtggagtggctctctttctacattttctttttttttgagacgagtctcgctctgtcccccaggctggagtgcaatggtgcgatctcagctcactgcaacctccgccacccgggttcaagcgattatcctgcctcagcctcctgagtagataggattacaggcatgtgccaccacacccagattgacttgatgcaaaacatcacaaaggctccatattatacagtatgcgatttttgagaactgatagtgcatcagccgacccagataatttaaaatattcttcatccagagatagaggtggttcttcctcttatggactgcaaccttcaaattcagctgtggtgtctcggcaaaggcacgatgataccagagtccacgctgacatacagaatga

SEQ ID NO: 182497 - DNA, 12465 bp, Homo sapiens
  Payload ID: 15957
  Gene Symbol: SMG1
  Gene Name: SMG1 phosphatidylinositol 3-kinase-related kinase
  ENST ID: ENST00000565324
  CDS Start-End: 1-10656
caaccttcaaattcagctgtggtgtctcggcaaaggcacgatgataccagagtccacgctgacatacagaatgacgaaaaggagagatcgatgtcttattctgatgagtctcgactgtcgaatcttcttcggaggatcacccgggaagacgacagagaccgaagattggctactgtaaagcagttgaaagaatttattcagcaaccagaaaataagctggtactagttaaacaattggataatatcttggctgctgtacatgacgtgcttaatgaaagtagcaaattgcttcaggagttgagacaggagggagcttgctgtcttggccttctttgtgcttctctgagctatgaggctgagaagatcttcaagtggatttttagcaaatttagctcatctgcaaaagatgaagttaaactcctctacttatgtgccacctacaaagcactagagactgtaggagaaaagaaagccttttcatctgtaatgcagcttgtaatgaccagcctgcagtctattcttgaaaatgtggatacaccagaattgctttgtaaatgtgttaagtgcattcttttggtggctcgatgttaccctcatattttcagcactaattttagggatacagttgatatattagttggatggcatatagatcatactcagaaaccttcgctcacgcagcaggtatctgggtggttgcagagtttggagccattttgggtagctgatcttgcattttctactactcttcttggtcagtttctggaagacatggaagcatatgctgaggacctcagccatgtggcctctggggaatcagtggatgaagatgtccctcctccatcagtgtcattaccaaagctggctgcacttctccgggtatttagtactgtggtgaggagcattggggaacgcttcagcccaattcggggtcctccaattactgaggcatatgtaacagatgttctgtacagagtaatgagatgtgtgacggctgcaaaccaggtgtttttttctgaggctgtgttgacagctgctaatgagtgtgttggtgttttgctcggcagcttggatcctagcatgactatacattgtgacatggtcattacatatggattagaccaactggagaattgccagacttgtggtaccgattatatcatctcagtcttgaatttactcacgctgattgttgaacagataaatacgaaactgccatcatcatttgtagaaaaactgtttataccatcatctaaactactattcttgcgttatcataaagaaaaagaggttgttgctgtagcccatgctgtttatcaagcagtgctcagcttgaagaatattcctgttttggagactgcctataagttaatattgggagaaatgacttgtgccctaaacaacctcctacacagtctacaacttcctgaggcctgttctgaaataaaacatgaggcttttaagaatcatgtgttcaatgtagacaatgcaaaatttgtagttatatttgacctcagtgccctgactacaattggaaatgccaaaaactcactaatagggatgtgggcgctatctccaactgtctttgcacttctgagtaagaatctgatgattgtgcacagtgacctggctgttcacttccctgccattcagtatgctgtgctctacacattgtattctcattgtaccaggcatgatcactttatctctagtagcctcagttcttcctctccttctttgtttgatggagctgtgattagcactgtaactacggctacaaagaaacatttctcaattatattaaatcttctgggaatattacttaagaaagataaccttaaccaggacacgaggaaactgttaatgacttgggctttggaagcagctgttttaatgaagaagtctgaaacatacgcacctttattctctcttccgtctttccataaattttgcaaaggccttttagccaacactctcgttgaagatgtgaatatctgtctgcaggcatgcagcagtctacatgctctgtcctcttccttgccagatgatcttttacagagatgtgtcgatgtttgccgtgttcaactagtgcacagtggaactcgtattcgacaagcatttggaaaactgttgaaatcaattcctttagatgttgtcctaagcaataacaatcacacagaaattcaagaaatttctttagcattaagaagtcacatgagtaaagcaccaagtaatacattccacccccaagatttctctgatgttattagttttattttgtatgggaactctcatagaacagggaaggacaattggttggaaagactgttctatagctgccagagactggataagcgtgaccagtcaacaattccacgcaatctcctgaagacagatgctgtcctttggcagtgggccatatgggaagctgcacaattcactgttctttctaagctgagaaccccactgggcagagctcaagacaccttccagacaattgaaggtatcattcgaagtctcgcagctcacacattaaaccctgatcaggatgttagtcagtggacaactgcagacaatgatgaaggccatggtaacaaccaacttagacttgttcttcttctgcagtatctggaaaatctggagaaattaatgtataatgcatacgagggatgtgctaatgcattaacttcacctcccaaggtcattagaacttttttctataccaatcgccaaacttgtcaggactggctaacgcggattcgactctccatcatgagggtaggattgttggcaggccagcctgcagtgacagtgagacatggctttgacttgcttacagagatgaaaacaaccagcctatctcaggggaatgaattggaagtaaccattatgatggtggtagaagcattatgtgaacttcattgtcctgaagctatacagggaattgctgtctggtcatcatctattgttggaaaaaatcttctgtggattaactcagtggctcaacaggctgaagggaggtttgaaaaggcctctgtggagtaccaggaacacctgtgtgccatgacaggtgttgattgctgcatctccagctttgacaaatcggtgctcaccttagccaatgctgggcgtaacagtgccagcccgaaacattctctgaatggtgaatccagaaaaactgtgctgtccaaaccgactgactcttcccctgaggttataaattatttaggaaataaagcatgtgagtgctacatctcaattgccgattgggctgctgtgcaggaatggcagaacgctatccatgacttgaaaaagagtaccagtagcacttccctcaacctgaaagctgacttcaactatataaaatcattaagcagctttgagtctggaaaatttgttgaatgtaccgagcagttagaattgttaccaggagaaaatatcaatctacttgctggaggatcaaaagaaaaaatagacatgaaaaaactgcttcctaacatgttaagtccggatccgagggaacttcagaaatccattgaagttcaattgttaagaagttctgtttgtttggcaactgctttaaacccgatagaacaagatcagaagtggcagtctataactgaaaatgtggtaaagtacttgaagcaaacatcccgcatcgctattggacctctgagactttctactttaacagtttcacagtctttgccagttctaagtaccttgcagctgtattgctcatctgctttggagaacacagtttctaacagactttcaacagaggactgtcttattccactcttcagtgaagctttacgttcatgtaaacagcatgacgtgaggccatggatgcaggcattaaggtatactatgtaccagaatcagttgttggagaaaattaaagaacaaacagtcccaattagaagccatctcatggaattaggtctaacagcagcaaaatttgctagaaaacgagggaatgtgtcccttgcaacaagactgctggcacagtgcagtgaagttcagctgggaaagaccaccactgcacaggatttagtccaacattttaaaaaactatcaacccaaggtcaagtggatgaaaaatgggggcccgaacttgatattgaaaaaaccaaattgctttatacagcaggccagtcaacacatgcaatggaaatgttgagttcttgtgccatatctttctgcaagtctgtgaaagctgaatatgcagttgctaaatcaattctgacactggctaaatggatccaggcagaatggaaagagatttcaggacagctgaaacaggtttacagagctcagcaccaacagaacttcacaggtctttctactttgtctaaaaacatactcactctaatagaactgccatctgttaatacgatggaagaagagtatcctcggatcgagagtgaatctacagtgcatattggagttggagaacctgacttcattttgggacagttgtatcacctgtcttcagtacaggcacctgaagtagccaaatcttgggcagcgttggccagctgggcttataggtggggcagaaaggtggttgacaatgccagtcagggagaaggtgttcgtctgctgcctagagaaaaatctgaagttcagaatctacttccagacactataactgaggaagagaaagagagaatatatggtattcttggacaggctgtgtgtcggccggcggggattcaggatgaagatataacacttcagataactgagagtgaagacaacgaagaagatgacatggttgatgttatctggcgtcagttgatatcaagctgcccatggctttcagaacttgatgaaagtgcaactgaaggagttattaaagtgtggaggaaagttgtagatagaatattcagcctgtacaaactctcttgcagtgcatactttactttccttaaactcaacgctggtcaaattcctttagatgaggatgaccctaggctgcatttaagtcacagagtggaacagagcactgatgacatgattgtgatggccacattgcgcctgctgcggttgctcgtgaagcatgctggtgagcttcggcagtatctggagcacggcttggagacaacacccactgcaccatggagaggaattattccgcaacttttctcacgcttaaaccaccctgaagtgtatgtgcgccaaagtatttgtaaccttctctgccgtgtggctcaagattccccacatctcatattgtatcctgcaatagtgggtaccatatcgcttagtagtgaatcccaggcttcaggaaataaattttccactgcaattccaactttacttggcaatattcaaggagaagaattgctggtttctgaatgtgagggaggaagtcctcctgcatctcaggatagcaataaggatgaacctaaaagtggattaaatgaagaccaagccatgatgcaggattgttacagcaaaattgtagataagctgtcctctgcaaaccccaccatggtattacaggttcagatgctcgtggctgaactgcgcagggtcactgtgctctgggatgagctctggctgggagttttgctgcaacaacacatgtatgtcctgagacgaattcagcagcttgaagatgaggtgaagagagtccagaacaacaacaccttacgcaaagaagagaaaattgcaatcatgagggagaagcacacagctttgatgaagcccatcgtatttgctttggagcatgtgaggagtatcacagcggctcctgcagaaacacctcatgaaaaatggtttcaggataactatggtgatgccattgaaaatgccctagaaaaactgaagactccattgaaccctgcaaagcctgggagcagctggattccatttaaagagataatgctaagtttgcaacagagagcacagaaacgtgcaagttacatcttgcgtcttgaagaaatcagtccatggttggctgccatgactaacactgaaattgctcttcctggggaagtctcagccagagacactgtcacaatccatagtgtgggcggaaccatcacaatcttaccgactaaaaccaagccaaagaaacttctctttcttggatcagatgggaagagctatccttatcttttcaaaggactggaggatttacatctggatgagagaataatgcagttcctatctattgtgaataccatgtttgctacaattaatcgccaagaaacaccccggttccatgctcgacactattctgtaacaccactaggaacaagatcaggactaatccagtgggtagatggagccacacccttatttggtctttacaaacgatggcaacaacgggaagctgccttacaagcacaaaaggcccaagattcctaccaaactcctcagaatcctggaattgtaccccgtcctagtgaactttattacagtaaaattggccctgctttgaaaacagttgggcttagcctggatgtgtcccgtcgggattggcctcttcatgtaatgaaggcagtattggaagagttaatggaggccacacccccgaatctccttgccaaagagctctggtcatcttgcacaacacctgatgaatggtggagagttacgcagtcttatgcaagatctactgcagtcatgtctatggttggatacataattggccttggagacagacatctggataatgttcttatagatatgacgactggagaagttgttcacatagattacaatgtttgctttgaaaaaggtaaaagccttagagttcctgagaaagtaccttttcgaatgacacaaaacattgaaacagcactgggtgtaactggagtagaaggtgtatttaggctttcatgtgagcaggttttacacattatgcggcgtggcagagagaccctgctgacgctgctggaggcctttgtgtacgaccctctggtggactggacagcaggaggcgaggctgggtttgctggtgctgtctatggtggaggtggccagcaggccgagagcaagcagagcaagagagagatggagcgagagatcacccgcagcctgttttcttctagagtagctgagattaaggtgaactggtttaagaatagagatgagatgctggttgtgcttcccaagttggacggtagcttagatgaatacctaagcttgcaagagcaactgacagatgtggaaaaactgcagggcaaactactggaggaaatagagtttctagaaggagctgaaggggtggatcatccttctcatactctgcaacacaggtattctgagcacacccaactacagactcagcaaagagctgttcaggaagcaatccaggtgaagctgaatgaatttgaacaatggataacacattatcaggctgcattcaataatttagaagcaacacagcttgcaagcttgcttcaagagataagcacacaaatggaccttggtcctccaagttacgtgccagcaacagcctttctgcagaatgctggtcaggcccacttgattagccagtgcgagcagctggagggggaggttggtgctctcctgcagcagaggcgctccgtgctccgtggctgtctggagcaactgcatcactatgcaaccgtggccctgcagtatccgaaggccatatttcagaaacatcgaattgaacagtggaagacctggatggaagagctcatctgtaacaccacagtagagcgttgtcaagagctctataggaaatatgaaatgcaatatgctccccagccacccccaacagtgtgtcagttcatcactgccactgaaatgaccctgcagcgatacgcagcagacatcaacagcagacttattagacaagtggaacgcttgaaacaggaagctgtcactgtgccagtttgtgaagatcagttgaaagaaattgaacgttgcattaaagttttccttcatgagaatggagaagaaggatctttgagtctagcaagtgttattatttctgccctttgtacccttacaaggcgtaacctgatgatggaaggtgcagcgtcaagtgctggagaacagctggttgatctgacttctcgggatggagcctggttcttggaggaactctgcagtatgagcggaaacgtcacctgcttggttcagttactgaagcagtgccacctggtgccacaggacttagatatcccgaaccccatggaagcgtctgagacagttcacttagccaatggagtgtatacctcacttcaggaattgaattcgaatttccggcaaatcatatttccagaagcacttcgatgtttaatgaaaggggaatacacgttagaaagtatgctgcatgaactggacggtcttattgagcagaccaccgatggcgttcccctgcagactctagtggaatctcttcaggcctacttaagaaacgcagctatgggactggaagaagaaacacatgctcattacatcgatgttgccagactactacatgctcagtacggtgaattaatccaaccgagaaatggttcagttgatgaaacacccaaaatgtcagctggccagatgcttttggtagcattcgatggcatgtttgctcaagttgaaactgctttcagcttattagttgaaaagttgaacaagatggaaattcccatagcttggcgaaagattgacatcataagggaagccaggagtactcaagttaatttttttgatgatgataatcaccggcaggtgctagaagagattttctttctaaaaagactacagactattaaggagttcttcaggctctgtggtaccttttctaaaacattgtcaggatcaagttcacttgaagatcagaatactgtgaatgggcctgtacagattgtcaatgtgaaaaccctttttagaaactcttgtttcagtgaagaccaaatggccaaacctatcaaggcattcacagctgactttgtgaggcagctcttgatagggctacccaaccaagccctcggactcacactgtgcagttttatcagtgctctgggtgtagacatcattgctcaagtagaggcaaaggactttggtgccgaaagcaaagtttctgttgatgatctctgtaagaaagcggtggaacataacatccagatagggaagttctctcagctggttatgaacagggcaactgtgttagcaagttcttacgacactgcctggaagaagcatgacttggtgcgaaggctagaaaccagtatttcttcttgtaagacaagcctgcagcgggttcagctgcatattgccatgtttcagtggcaacatgaagatctacttatcaatagaccacaagccatgtcagtcacacctcccccacggtctgctatcctaaccagcatgaaaaagaagctgcataccctgagccagattgaaacttctattgcaacagttcaggagaagctagctgcacttgaatcaagtattgaacagcgactcaagtgggcaggtggtgccaaccctgcattggcccctgtactacaagattttgaagcaacgatagctgaaagaagaaatcttgtccttaaagagagccaaagagcaagtcaggtcacatttctctgcagcaatatcattcattttgaaagtttacgaacaagaactgcagaagccttaaacctggatgcggcgttatttgaactaatcaagcgatgtcagcagatgtgttcgtttgcatcacagtttaacagttcagtgtctgagttagagcttcgtttattacagagagtggacactggtcttgaacatcctattggcagctctgaatggcttttgtcagcacacaaacagttgacccaggatatgtctactcagagggcaattcagacagagaaagagcagcagatagaaacggtctgtgaaacaattcagaatctggttgataatataaagactgtgctcactggtcataaccgacagcttggagatgtcaaacatctcttgaaagctatggctaaggatgaagaagctgctctggcagatggtgaagatgttccctatgagaacagtgttaggcagtttttgggtgaatataaatcatggcaagacaacattcaaacagttctatttacattagtccaggctatgggtcaggttcgaagtcaagaacacgttgaaatgctccaggaaatcactcccaccttgaaagaactgaaaacacaaagtcagagtatctataataatttagtgagttttgcatcacccttagtcaccgatgcaacaaatgaatgttcgagtccaacgtcatctgctacttatcagccatccttcgctgcagcagtccggagtaacactggccagaagactcagcctgatgtcatgtcacagaatgctagaaagctgatccaaaaaaatcttgctacatcagctgatactccaccaagcaccgttccaggaactggcaagagtgttgcttgtagtcctaaaaaggcagtcagagaccctaaaactgggaaagcggtgcaagagagaaactcctatgcagtgagtgtgtggaagagagtgaaagccaagttagagggccgagatgttgatccgaataggaggatgtcagttgctgaacaggttgactatgtcattaaggaagcaactaatctagataacttggctcagctgtatgaaggttggacagcctgggtgtgaatggcaagacagtagatgagtctggttaagcgaggtcagacatccaccagaatcaactcagcctcaggcatccaaagccacaccacagtcggtggtgatgcaactgggggcttactctgaggaaacctaggaaatctcggtgcactaggaagtgaatcccgcaggacagctgcactcagggatacgcccaacaccatggcctgcaaccccagggtcaagggtgaaggaaagcaagctcaccgcctgaacacggagattgtctttctgccacagaacagcagcagacgtgtcgggaggttagctgcggaaagaaatcgggatgccgcggagcacagagtgatttggaactccattccacctgaccctgtgtgtacaatccaggaaaaaaacaaaccccactcagaaacagagaaaactggggtcgcgaagaaatcacagccaaggaagatttgatgcattcagattctcgtgtaacacttgttgcttggcaacagtactggttgggttgaccagtaagtagaaaaaggctaaaggctatgcgatatgaatttcagaaatggactgaaaatggagagctatgtaacagatacactacagtagaagaacttacttctgaaatgaagggaaaaaaaccaccccatcgttccctactcctccccaccacttacccgttccccctttacctaatctagtagattagccatctttcaaattcacttttatttcagtccttatatttcatatacttccgtctcgatgctgttaacaacttctgataacatggaaaattcaaggattgtttaaaggtctgatgatcacacacaaaatgtaattccggttatttaagtcatttctgtgattctatcatgtacagtttccagaattgtcactgtgcattcaaaagtaatgaatctaacagacatttgatttaatgtacactcccttttgcttatagtgtgcattttttttggaggtcattcaaattttccctcttctgtgatagctgtagtttctttcatagaaagtagctaatccagtgtaatcttttacctttttaaaaaccaagatagagtatctattagagttttacattgttgatgatagattaacaataaagtgatgttctggtggaggtagactgaaatttttttaattcatgtttttcatttgatacttttaatttacacttagtaaattaaaagttgtttaatttacttggcattttaggacatgtacatgaaacagtgaaaatgagatccaccaacatcttttattaagttcagttattagtctgtgaagtgctttactttttgcacaattttaatagcttgctattcagtaatacattatagtgaattcatgatcaaggtttccttaaatttagcattgcatttcagtactgactgtgtaagctaaattgctgatccaaaataaaaacccagactagaatagggttcttaaaatcaagtatcaatacaaaatagaacacaattaaaatcttaattgttggctgggcacagtggctcacgcctgtaatcccagcactttgggaggccgaggcgggcggatcatgaggttaggagagcgagaccatcctggctaacacggtgaaaccccgtctttactaaaaatacaaaaaaaattagccgggcgtggtggcgggcgcctgtagtcccagctactcgggaggctgaggcaggagaatggcgtgaacccaggaggcggagcttgcagtgagccgagattgtgccactgcactccagcctgggcaacagagctagactctgtgtcaaaaataaatgactagat

SEQ ID NO: 182498 - DNA, 2372 bp, Homo sapiens
  Payload ID: 15957
  Gene Symbol: SMG1
  Gene Name: SMG1 phosphatidylinositol 3-kinase-related kinase
  ENST ID: ENST00000565224
  CDS Start-End: 45-1868
attgacttgatgcaaaacatcacaaaggctccatattatacagtatgcgatttttgagaactgatagtgcatcagccgacccagataatttaaaatattcttcatccagagatagaggtggttcttcctcttatggactgcaaccttcaaattcagctgtggtgtctcggcaaaggcacgatgataccagagtccacgctgacatacagaatgacgaaaagggtggctacagtgtcaatggaggatctggggaaaatacttatggtcggaagtcgttggggcaagagctgagggttaacaatgtgaccagccctgagttcaccagtgttcagcatggcagtcgtgctttagccaccaaagacatgaggaaatcacaggagagatcgatgtcttattctgatgagtctcgactgtcgaatcttcttcggaggatcacccgggaagacgacagagaccgaagattggctactgtaaagcagttgaaagaatttattcagcaaccagaaaataagctggtactagttaaacaattggataatatcttggctgctgtacatgacgtgcttaatgaaagtagcaaattgcttcaggagttgagacaggagggagcttgctgtcttggccttctttgtgcttctctgagctatgaggctgagaagatcttcaagtggatttttagcaaatttagctcatctgcaaaagatgaagttaaactcctctacttatgtgccacctacaaagcactagagactgtaggagaaaagaaagccttttcatctgtaatgcagcttgtaatgaccagcctgcagtctattcttgaaaatgtggatacaccagaattgctttgtaaatgtgttaagtgcattcttttggtggctcgatgttaccctcatattttcagcactaattttagggatacagttgatatattagttggatggcatatagatcatactcagaaaccttcgctcacgcagcaggtatctgggtggttgcagagtttggagccattttgggtagctgatcttgcattttctactactcttcttggtcagtttctggaagacatggaagcatatgctgaggacctcagccatgtggcctctggggaatcagtggatgaagatgtccctcctccatcagtgtcattaccaaagctggctgcacttctccgggtatttagtactgtggtgaggagcattggggaacgcttcagcccaattcggggtcctccaattactgaggcatatgtaacagatgttctgtacagagtaatgagatgtgtgacggctgcaaaccaggtgtttttttctgaggctgtgttgacagctgctaatgagtgtgttggtgttttgctcggcagcttggatcctagcatgactatacattgtgacatggtcattacatatggattagaccaactggagaattgccagacttgtggtaccgattatatcatctcagtcttgaatttactcacgctgattgttgaacagataaatacgaaactgccatcatcatttgtagaaaaactgtttataccatcatctaaactactattcttgcgttatcataaagaaaaagaggttgttgctgtagcccatgctgtttatcaagcagtgctcagcttgaagaatattcctgttttggagactgcctataagttaatattgggagaaatgacttgtgccctaaacaacctcctacacagtctacaacttcctgaggcctgttctgaaataaaacatgaggcttttaagaatcatgtgttcaatgtagacaatgcaaaatttgtagttatatttgacctcagtgccctgactacaattggaaatgccaaaaactcactaataggggtgagtctttaattgtaatgactttgttttatccacagttaagccttttctcattacatatttatgtatttcactgtcatgtcaagatgtctgcagaatcactgtgtgtaacaaacagccatatttaagacatgcctggataaataaaattggtaggaatgttttcttggcattatatttaacttttcttcttctttttccttgacaaatcttgataagtttttttatattagttttattttctagaaaatgtcttatgaatttctcctatttgctctagcatgcttatagaaaatgtcagtgtttcttacagctcaaatttgtgtagttgttttaaaatgcggtctctttcttcttcccctggtacttttttctttctgtctactgaagttagttcttatacatggtcttatattttggctgtctcttttccctaggaacattcatacaggttgaatattccttatctgaaatacttgggactggaagtgttttggattttggattttggaatac

SEQ ID NO: 182499 - DNA, 1210 bp, Homo sapiens
  Payload ID: 15957
  Gene Symbol: SMG1
  Gene Name: SMG1 phosphatidylinositol 3-kinase-related kinase
  ENST ID: ENST00000568038
  CDS Start-End: 1-964
tcacttccctgccattcagtatgctgtgctctacacattgtattctcattgtaccaggcatgatcactttatctctagtagcctcagttcttcctctccttctttgtttgatggagctgtgattagcactgtaactacggctacaaagaaacatttctcaattatattaaatcttctgggaatattacttaagaaagataaccttaaccaggacacgaggaaactgttaatgacttgggctttggaagcagctgttttaatgaagaagtctgaaacatacgcacctttattctctcttccgtctttccataaattttgcaaaggccttttagccaacactctcgttgaagatgtgaatatctgtctgcaggcatgcagcagtctacatgctctgtcctcttccttgccagatgatcttttacagagatgtgtcgatgtttgccgtgttcaactagtgcacagtggaactcgtattcgacaagcatttggaaaactgttgaaatcaattcctttagatgttgtcctaagcaataacaatcacacagaaattcaagaaatttctttagcattaagaagtcacatgagtaaagcaccaagtaatacattccacccccaagatttctctgatgttattagttttattttgtatgggaactctcatagaacagggaaggacaattggttggaaagactgttctatagctgccagagactggataagcgtgaccagtcaacaattccacgcaatctcctgaagacagatgctgtcctttggcagtgggccatatgggaagctgcacaattcactgttctttctaagctgagaaccccactgggcagagctcaagacaccttccagacaattgaaggtatcattcgaagtctcgcagctcacacattaaaccctgatcaggatgttagtcagtggacaactgcagacaatgatgaaggccatggtcattagaacttttttctataccaatcgccaaacttgtcaggactggctaacgcggattcgactctccatcatgagggtaggattgttggcaggccagcctgcagtgacagtgagacatggctttgacttgcttacagagatgaaaacaaccagcctatctcaggggaatgaattggaagtaaccattatgatggtggtagaagcattatgtgaacttcattgtcctgaagctatacagggaattgctgtctg

SEQ ID NO: 182500 - DNA, 2664 bp, Homo sapiens
  Payload ID: 15957
  Gene Symbol: SMG1
  Gene Name: SMG1 phosphatidylinositol 3-kinase-related kinase
  ENST ID: ENST00000561947
  CDS Start-End: 1-1654
aactgatagtgcatcagccgacccagataatttaaaatattcttcatccagagatagaggtggttcttcctcttatggactgcaaccttcaaattcagctgtggtgtctcggcaaaggcacgatgataccagagtccacgctgacatacagaatgacgaaaaggagagatcgatgtcttattctgatgagtctcgactgtcgaatcttcttcggaggatcacccgggaagacgacagagaccgaagattggctactgtaaagcagttgaaagaatttattcagcaaccagaaaataagctggtactagttaaacaattggataatatcttggctgctgtacatgacgtgcttaatgaaagtagcaaattgcttcaggagttgagacaggagggagcttgctgtcttggccttctttgtgcttctctgagctatgaggctgagaagatcttcaagtggatttttagcaaatttagctcatctgcaaaagatgaagttaaactcctctacttatgtgccacctacaaagcactagagactgtaggagaaaagaaagccttttcatctgtaatgcagcttgtaatgaccagcctgcagtctattcttgaaaatgtggatacaccagaattgctttgtaaatgtgttaagtgcattcttttggtggctcgatgttaccctcatattttcagcactaattttagggatacagttgatatattagttggatggcatatagatcatactcagaaaccttcgctcacgcagcaggtatctgggtggttgcagagtttggagccattttgggtagctgatcttgcattttctactactcttcttggtcagtttctggaagacatggaagcatatgctgaggacctcagccatgtggcctctggggaatcagtggatgaagatgtccctcctccatcagtgtcattaccaaagctggctgcacttctccgggtatttagtactgtggtgaggagcattggggaacgcttcagcccaattcggggtcctccaattactgaggcatatgtaacagatgttctgtacagagtaatgagatgtgtgacggctgcaaaccaggtgtttttttctgaggctgtgttgacagctgctaatgagtgtgttggtgttttgctcggcagcttggatcctagcatgactatacattgtgacatggtcattacatatggattagaccaactggagaattgccagacttgtggtaccgattatatcatctcagtcttgaatttactcacgctgattgttgaacagataaatacgaaactgccatcatcatttgtagaaaaactgtttataccatcatctaaactactattcttgcgttatcataaagaaaaagaggttgttgctgtagcccatgctgtttatcaagcagtgctcagcttgaagaatattcctgttttggagactgcctataagttaatattgggagaaatgacttgtgccctaaacaacctcctacacagtctacaacttcctgaggcctgttctgaaataaaacatgaggcttttaagaatcatgtgttcaatgtagacaatgcaaaatttgtagttatatttgacctcagtgccctgactacaattggaaatgccaaaaactcactaataggggtgagtctttaattgtaatgactttgttttatccacagttaagccttttctcattacatatttatgtatttcactgtcatgtcaagatgtctgcagaatcactgtgtgtaacaaacagccatatttaagacatgcctggataaataaaattggtaggaatgttttcttggcattatatttaacttttcttcttctttttccttgacaaatcttgataagtttttttatattagttttattttctagaaaatgtcttatgaatttctcctatttgctctagcatgcttatagaaaatgtcagtgtttcttacagctcaaatttgtgtagttgttttaaaatgcggtctctttcttcttcccctggtacttttttctttctgtctactgaagttagttcttatacatggtcttatattttggctgtctcttttccctaggaacattcatacaggttgaatattccttatctgaaatacttgggactggaagtgttttggattttggattttggaatactttttttttttttttggagatggggttttactcttgttgcccaggctggagtgccatggcgcgatcttggctcgctgcaacctccgcctcccgggtacaagcgattctcctgtttcagcctcccaggtagctcggattacaggcatgcaccaccatgcctggctaatttttttgtatttagtagagatgggttttcaccatgttagccgggctggttgtgaactcctgacctcaggtgatccacctgccttggcctcccaaaatgctgggattacaggtgggcaccaccatgcccagccggattttggagtattttcataacacttactggtgagcatccctaatctgaaaatcctaaatctaaaatgctccaaaatttgaaactttttgagcaccagtatgatgccccaagtggaaaatcccacacctgatctcatgtgatgagtccaaactgttgtatgcacaaaattatttaaaatattgcataaaatgaccttcaggctatg

SEQ ID NO: 182501 - DNA, 1588 bp, Homo sapiens
  Payload ID: 15957
  Gene Symbol: SMG1
  Gene Name: SMG1 phosphatidylinositol 3-kinase-related kinase
  ENST ID: ENST00000330588
  CDS Start-End: 267-860
aacaaatgttttaacccactgtcttcactaatattgtaactactgtcttacagattgacttgatgcaaaacatcacaaaggctccatattatacaactgatagtgcatcagccgacccagataatttaaaatattcttcatccagagatagaggtggttcttcctcttatggactgcaaccttcaaattcagctgtggtgtctcggcaaaggcacgatgataccagagtccacgctgacatacagaatgacgaaaaggagagatcgatgtcttattctgatgagtctcgactgtcgaatcttcttcggaggatcacccgggaagacgacagagaccgaagattggctactgtaaagcagttgaaagaatttattcagcaaccagaaaataagctggtactagttaaacaattggataatatcttggctgctgtacatgacgtgcttaatgaaagtagcaaattgcttcaggagttgagacaggagggagcttgctgtcttggccttctttgtgcttctctgagctatgaggctgagaagatcttcaagtggatttttagcaaatttagctcatctgcaaaagatgaagttaaactcctctacttatgtgccacctacaaagcactagagactgtaggagaaaagaaagccttttcatctgtaatgcagcttgtaatgaccagcctgcagtctattcttgaaaatgtggatacaccagaattgctttgtaaatgtgttaagtgcattcttttggtggctcgatgttaccctcatattttcagcactaattttagggtgagttcctcattccgcttttcagatcatggggtgagggggatggttgtgtgtgtgaggatctgaggaaacagatggaaaacaatgcctcagctcctttgaatataatcagtgatatttgaggttccagggttaaataccgcatttttctttctgacattcataccttaaaatatttgaagaaaataaactatttcattgttgtcagaaatgtagttcttttattttcctgcccctctcccctttctaagtttctagaatgtcaagtaggtagaacatagatgctccttttaggatcttttgctgtgaaatggtccacaggtgaatggcagtaatatcttaaaatgattggccccctctctctttgtttccatcaaggatacagttgatatattagttggatggcatatagatcatactcagaaaccttcgctcacgcagcaggtatctggtaagtcttgcagcctataccagttatttaaatactgtcggggaggagcagtggtcccccagtgaccatctatcaataccatttctttaataatgcaagaaaactaattcagagaaatgttttattgtaaatgaacattacttgttagctaaatatgtattttcagaggaaattactagtaggtgggtacagtaagtacagacaggacttacccaagttatttgtagtttgtactggtaggaaagtgtatggtaagaatatattgtagtggcaataccctgaagtggacaatggaagatccaagttatttgtcacattttattgtttttctggtaattttttt

SEQ ID NO: 182502 - DNA, 550 bp, Homo sapiens
  Payload ID: 15957
  Gene Symbol: SMG1
  Gene Name: SMG1 phosphatidylinositol 3-kinase-related kinase
  ENST ID: ENST00000566328
  CDS Start-End: 1-257
cagagatgaaaacaaccagcctatctcaggggaatgaattggaagtaaccattatgatggtggtagaagcattatgtgaacttcattgtcctgaagctatacagggaattgctgtctggtcatcatctattgttggaaaaaatcttctgtggattaactcagtggctcaacaggctgaagggagcattgaagcttgctataaatcacttcaccaggaggcgtcttcagtttgttctttagttagcagcaatacttgagtgcctttcttactgaagaattagtggcaaatcacactgtaaaacaagacctgtcagttattttataaatgcttttgaacttgatccctagttgagctccttccccctcagagtctgatacaaattaccctttattgtcagagtatttgctcattagtcctgtgaactctacattcagactcattgcttcctccaggtagaggagcttgtaccataatattctgtgtccatttatgttagtttaatgaaatcttgcgaatttaggaaaataaaagaactgctcatacttccat

SEQ ID NO: 182503 - DNA, 4559 bp, Homo sapiens
  Payload ID: 15958
  Gene Symbol: SMG5
  Gene Name: SMG5 nonsense mediated mRNA decay factor
  Uniprot ID: Q9UPR3
  ENST ID: ENST00000361813
  CDS Start-End: 146-3196
gtcgcgggcagccgcctcacagcgatggcggccgagcagggccggtggcggcggcggctgcggctacggccggagacggcagtgttggcggtagtggtgggtggcaggggcctgtgaccgggagctgcccccggacccgggcaccatgagccaaggcccccccacaggggagagcagcgagcccgaagcaaaagtcctccacactaagcggctttaccgggctgtggtggaggctgtgcatcgacttgacctcatcctttgcaacaaaactgcttatcaagaagtattcaaaccagaaaacattagcctgaggaacaagctgcgtgagctctgcgtcaagcttatgttcctgcacccagtggactatgggagaaaggctgaggagctgctgtggagaaaggtatactatgaagttatccagcttatcaagactaacaaaaagcacatccacagccggagcactttggaatgtgcctacaggacgcacctggttgctggtattggcttctaccagcatctccttctctatatccagtcccactaccagctggaactgcagtgctgcatcgactggacccatgtcactgaccccctcataggatgcaagaagccagtgtctgcctcagggaaggagatggattgggcacagatggcatgtcaccgatgtctggtgtatctgggggatttgtcccgatatcagaatgaattagctggcgtagataccgagctgctagccgagagattttactaccaagccctgtcagtagctcctcagattggaatgcccttcaatcagctgggcaccctggcaggcagcaagtactataatgtggaagccatgtattgctacctgcgctgcatccagtcagaagtgtcctttgagggagcctatgggaacctcaagcggctgtatgacaaggcagccaaaatgtaccaccaactgaagaagtgtgagactcggaaactgtctcctggcaaaaagcgatgtaaagacattaaaaggttgctagtgaactttatgtatctgcaaagcctcctacagcccaaaagcagctccgtggactcagagctgacctcactttgccagtcagtcctggaggacttcaacctctgcctcttctacctgccctcctcacccaacctcagcctggccagtgaggatgaggaggagtatgagagtggatatgctttcctcccggaccttctcatctttcaaatggtcatcatctgccttatgtgtgtgcacagcttggagagagcaggatccaagcagtacagtgcagccattgccttcaccctggccctcttttcccacctcgtcaatcatgtcaacatacggctgcaggctgagctggaagagggcgagaatcccgtcccggcattccagagtgatggcacagatgaaccagagtccaaggaacctgtggagaaagaggaggagccagatcctgagcctcctcctgtaacaccccaagtgggtgagggcagaaagagccgtaagttctctcgcctctcctgtctccgccgtcgccgccacccacccaaagttggtgatgacagtgacctgagtgaaggctttgaatcggactcaagccatgactcagcccgggccagtgagggctcagacagtggctctgacaagagtcttgaaggtgggggaacggcctttgatgctgaaacagactcggaaatgaatagccaggagtcccgatcagacttggaagatatggaggaagaggaggggacacggtcaccaaccctggagccccctcggggcagatcagaggctcccgattccctcaatggcccactgggccccagtgaggctagcattgccagcaatctacaagccatgtccacccagatgttccagactaagcgctgcttccgactggcccccacctttagcaacctgctcctccagcccaccaccaaccctcatacctcggccagccacaggccttgcgtcaatggggatgtagacaagccttcagagccagcctctgaggagggctctgagtcggaggggagtgagtccagtggacgctcctgtcggaatgagcgcagcatccaggagaagcttcaggtcctgatggccgaaggtctgcttcctgctgtgaaagtcttcctggactggcttcggaccaaccccgacctcatcatcgtgtgtgcgcagagctctcaaagtctgtggaaccgcctgtctgtgttgctgaatctgttgcctgctgctggtgaactccaggagtctggcctggccttgtgtcctgaggtccaagatcttcttgaaggttgtgaactgcctgacctcccctctagccttctgctcccagaggacatggctcttcgtaacctgcccccgctccgagctgcccacagacgctttaactttgacacggatcggcccctgctcagcaccttagaggagtcagtggtgcgcatctgctgcatccgcagctttggtcatttcatcgcccgcctgcaaggcagcatcctgcagttcaacccagaggttggcatcttcgtcagcattgcccagtctgagcaggagagcctgctgcagcaggcccaggcacagttccgaatggcacaggaggaagctcgtcggaacaggctcatgagagacatggctcagctacgacttcagctcgaagtgtctcagctggagggcagcctgcagcagcccaaggcccagtcagccatgtctccctacctcgtccctgacacccaggccctctgccaccatctccctgtcatccgccaactggccaccagtggccgcttcattgtcatcatcccaaggacagtgatcgatggcctggatttgctgaagaaggaacacccaggggcccgggatgggattcggtacctggaggcagagtttaaaaaaggaaacaggtacattcgctgccagaaagaggtgggaaagagctttgagcggcataagctgaagaggcaggatgcagatgcctggactctctataagatcctagacagctgcaaacagctgactctggcccagggggcaggtgaggaggatccgagtggcatggtgaccatcatcacaggccttccactggacaaccccagcgtgctttcaggccccatgcaggcagccctgcaggccgctgcccacgccagtgtggacatcaagaatgttctggacttctacaagcagtggaaggaaattggttgatactgacccccaggccctgcagtggggctgactccagatctctcctgccctccctggcagccaggaccagcacctgtagtcaccccaccacacgcagactcatgcacgcacacaggagggaggcctagctgctcagaggctgcagggagggcccaggagccggctgggagggtggggtccctttgttgccaagacgttaggaaagcgaggaaagtgcttggattaggagagtcttgtgggcccctggccagccttcctgcctcagctcccctgctgtctccaggggcaggtggtaggcatgggtacctgcatttcactggaatgggttcttggatctctgaggggaaggaacagcaaaagaggcccttcttcctcacccaagatgcagggtggttggggccaggagtttggaccctctaggtcttgggggaagagctgggtaatacctggtgtctgagtgattctctgcagacccttcccctcctcaaggatcacccatcctcctttcagccccctttatggggaccaggcagctctggagccagccacaggggctgttagagaagcaaggcctggagtggcctgcaccgagtagcagggtcagggttcgtgtgctcctcctcctgctgcaggggctgcacatcccattgccccacttctgctttgtgtctccctctgtctagcttccagggcagggagcaggccccacctagggctgcaggcagtctggcctgtgccagcacggtctcctgtgcccaccagccccacaggtgctgtgctttgtgctcttggctgctgtgctgggacagaatgggatgccaggaagagaagaaagggggtgcagtctgaggccaccaccccccttcctatctaagggagggctgaagacaaggggccggcattcagtgggcagcagaaaggagaggctccttgaagctgctcagtcagaggcccccgtccctccttttgccttccgcaggactgaagacctgaaggggctggcttttggagtgttgaggtgaatatctgggagcagagatcatgaatagctcagggcagtgaatggcgcaccaagagcagggctgtgtgtgggaggctgcagccaggattgcctcagctcctccccctcaggctgggaggatagcacaggctaggggctcggggtggagggtctcagctctgctgcccccaccccagtactagcctagcttcccaagctgtggcttagaggatagttggcttcctgcctctctcctctaaaatagcaagtctgggaaatcctggggtgagtggagtcaccccactcccagttgctggcagagactgagactaaagcatcacttaataaaccccccaagcccaa

SEQ ID NO: 182504 - DNA, 5960 bp, Homo sapiens
  Payload ID: 15959
  Gene Symbol: SMG6
  Gene Name: SMG6 nonsense mediated mRNA decay factor
  Uniprot ID: Q86US8
  ENST ID: ENST00000263073
  CDS Start-End: 52-4311
gctgcgcgcggcggtggcggagccgctacggctgtagcagcagccgcgaagatggcggaagggctggagcgtgtgcggatctccgcgtcggagctgcgcgggatcctggctactctggccccgcaggccgggagcagagaaaacatgaaggaattaaaggaggccaggccgcgcaaagataacaggcgtccagatctggaaatctataagcctggcctttctcggctaaggaacaagcccaaaatcaaggaaccccctgggagtgaggaattcaaagatgaaattgttaatgaccgagattgctctgctgttgaaaatggtacacagcccgttaaagatgtctgcaaggaactgaacaaccaagagcagaatggtcctatagacccagaaaataatcggggacaagaatcctttcctaggactgctggacaagaggatcgtagtctaaaaattatcaaaagaacaaagaaacccgacctgcagatctatcagcctggacgacgtttgcagactgttagcaaagaatccgccagtcgggtggaggaggaagaagtcctcaaccaggtagaacaactgagagtagaggaagatgagtgtaggggaaatgttgcgaaggaggaagttgcgaataaaccagacagggctgagatagaaaagagcccaggtggtgggagagtaggggctgcaaaaggagaaaaaggaaagaggatgggaaaaggggagggggtgagggaaacccacgacgacccagcccgcgggaggccgggctccgcaaagcgctactcccgctcagacaaacgaaggaatcgctaccgcacgcgcagcaccagctcagctggcagcaacaacagcgctgagggagctggcctgacggataatggatgtcgccgccgccgacaggataggaccaaggagaggccacgactgaagaagcaagtgtctgtgtcctcaaccgattccttagacgaggacagaattgatgagcctgatggattaggacccaggagaagttcagaaaggaagagacatttagaaagaaactggtctggccgtggggagggtgagcagaaaaacagtgctaaagaatatcgaggcactcttcgtgtcactttcgatgcagaagccatgaacaaagagtctcccatggtgaggtcagccagggatgatatggatagaggaaagcctgacaaaggcttgagcagtgggggcaaaggctctgagaagcaggagtccaaaaacccgaaacaagaacttcggggtcgtggtcgtggcattctgattttgcctgcccataccaccctatctgtcaattcagcaggttctccagagtccgcgcctttgggacctcggcttttgtttggatctggtagtaagggatctcggagttggggccgtggaggcaccacacgccgattgtgggacccaaacaatcctgatcagaaacctgctctaaagactcagacgccccagctacatttcttggacactgatgatgaagtcagccctacatcttggggtgactcacgccaggctcaggcatcttactataagtttcaaaactctgacaacccctattattacccccggacaccaggccctgcctcccagtatccctatacgggctataaccctctacagtacccagtgggccctacgaatggtgtgtacccagggccttactacccaggctacccgactccgtcaggacagtatgtgtgtagccctctacctaccagcaccatgagtcccgaggaggtagagcagcacatgaggaacctgcagcaacaggagctgcacaggcttctccgggtggctgacaaccaggaactgcagctcagcaacctgctctccagggaccgcatcagtccggagggcctggagaagatggcgcaactcagagctgaactgctgcagctatatgagcgctgtattctattagatattgagttctctgataatcagaatgtggatcagatcctgtggaagaatgctttctatcaggtgattgagaagttcaggcaacttgtcaaggatccgaatgttgagaacccagaacagattcggaacagacttttggagctcttggatgagggtagtgacttctttgatagtttgcttcagaagctgcaggttacttacaagttcaaactggaagactacatggatggtcttgccattcgcagcaagccattacgcaagacagtaaaatatgccttgatcagtgcccagcgatgcatgatatgccaaggagatattgctaggtaccgggagcaagccagtgatacagcgaattatgggaaagcacgcagttggtacctgaaggcccagcacattgctcccaagaatgggcgcccctataaccagttggctttgctggcagtgtatacgaggaggaagcttgacgctgtctattactatatgcgcagtttagctgccagcaaccctatcctgactgccaaggagagtctcatgagcttgtttgaagagaccaagcggaaggcagaacagatggaaaagaagcaacatgaggaatttgacctgagccctgaccagtggcggaaaggaaagaagtctactttccggcatgttggagatgacaccactcgcctggagatctggattcatccatcccatccacggtcttcccagggcactgagtctgggaaggattctgagcaagagaatgggctgggcagcctgagtcccagtgatctgaacaaaaggttcatcctcagttttctccatgcccatgggaagctgtttacccggattgggatggagacattccctgcagtggctgagaaggtcctcaaggagttccaggtgttactgcagcacagcccctctcccattggaagtacccgcatgctgcagcttatgaccatcaatatgtttgcagtacacaactcccagctgaaagactgcttctcggaggagtgccgctctgtgatccaggaacaagccgcagctctgggcttggccatgttttctctactggtccgccgctgcacctgcttacttaaggagtccgccaaagctcagctgtcctctcctgaggaccaggatgaccaagacgacatcaaggtgtcttcctttgtcccggacctgaaggagctgctccccagtgtcaaagtctggtcagattggatgctcggctacccggacacctggaatcctcctcccacatccctggatctgccctcgcatgttgctgtggatgtatggtcgacgctggctgatttctgtaacatactgactgcagtgaatcagtctgaggtgccactgtacaaggacccggatgatgacctcacccttcttatcctggaagaggatcggcttctctcgggctttgtccccttgctggctgcccctcaggacccctgctacgtggagaaaacctcggataaggttattgcagctgactgcaaaagggtcacagtgctgaagtattttctggaagccctttgtggacaagaagagcctctgctggcattcaagggtggaaagtatgtgtcagtggcacccgtcccagacaccatgggaaaggaaatgggaagccaagagggaacacgactggaagatgaggaggaggatgtggtgattgaagactttgaggaagattcagaggctgaaggcagcggaggcgaggatgacatcagggagcttcgggccaagaagctggctctggccaggaagatagctgagcagcagcgtcgccaggaaaagatccaggctgtcctggaggaccacagtcagatgaggcagatggagctcgaaatcagacctttgttcctcgtaccagacaccaacggcttcattgaccacctggccagtctggcgcggctgctggagagcaggaagtacatcctggtggtgcccctcatcgtgatcaatgagctggacggcctggccaaggggcaggagacagaccaccgggctgggggctacgcccgtgtggtacaagagaaggcccgcaagtccatcgagttcctcgagcagcgattcgagagtcgggactcttgcctgcgagccctgaccagccgtggcaatgaactcgaatccatcgccttccgcagtgaggacatcactggccagctgggtaacaacgatgatctcatcctgtcctgctgcctccactactgcaaagacaaggctaaggacttcatgcccgccagcaaagaggagccaatccggctactgcgggaggtggtgctgttgacggatgaccggaacctgcgtgtgaaggcgctcacaaggaatgttcctgtacgggacatcccagccttcctcacgtgggcccaggtgggctgagggagccacactggggccccccccccgtggaaccgttcctgaaaggccaccaggcgcccagtgtagcacggaagatgcccacgtgcctgagccaccaatccacccagacaataaaccatcctcttccaacccacgccacggccatgctgtgggggacctgctcctcacagagcccctcccaaggatcgggcggaagctgctgggaccctcctgggctgccaggatttagcagggaggtggctggctacagcaacagcagctgggcaagccagataggccgcccatgctctcagcctttctccctcccccgtctcattccaaggctgagggagggccttctcgcctggggacgcagccactttctccagtggagacagggcaggggttctgagtttccgtcagatgcagtgaaatcacagttccctttcatcttcagaacctctgtcgtgaatgtgttcaagaggctttggttaagtcaggaagaagtgcccagggtgtgtgtccccagtctccctgaggcctggactcgcccatgaacccaagtcggcttctagacagcatgtccctaacagcagccctgggcccccacctcttctaccatccaccccagacttaccacacacccttcctgctgctcctcttcctgcccttatcaacctgggtccctcacacttcgccagttgcgtccccgtggacagtcatgagtctagaggaaaggggcatctggtctcaggcccgtgctctcgggtggcctccacctgctccctctctcctcactggcctttctttccgtctagcttcctcttcaggaaatgtcctgactcccctcagctcccccttcacccctccttgcccgcctaccctccctccagaatagcccctcacccttcttccccttctagttgatccttttcacctccctgatccccttcatttcttcaccgcggttcctcgtcataggggttctcactctgaactttccctctctactacccatggcaggaacctagtacaggtctcccacccagggccttccaccctcggctcctgtgctgggagaaacttccaggcgtggacagcccagcctgaggcattccagtgctggggcaccgtcgcctaacctggtttctagctttgccctcactccccggaaaaactgacactgacacaggggccctttccttgcccctttagctggtacctcagtggggaggcttccttaccaagaatgagttcctgaaacccagggccagagacaaggacaacttaggggaagacggggttttcggtggagccaggggcaaatcttaatgggaccagtgggggataccccagagcccatggcctgactgcacagcctgcctggaggatgggtgcgcagctctgccctccctgaggcccaggactatgccagaagcgatggggtaccgtgtaggggagccaaggccagtagtttgggggtaggagtcccctagagtctcagaagactgggctctttggagtacagggtccccggcctctcctttaagattctctccccagctggaaggccgatgactgggtggtcgggagggagacccagctctcctttctgtcccgtttgcagcactggttttgtttccttaataaatttttagttatgaaacata

SEQ ID NO: 182505 - DNA, 3473 bp, Homo sapiens
  Payload ID: 15959
  Gene Symbol: SMG6
  Gene Name: SMG6 nonsense mediated mRNA decay factor
  Uniprot ID: Q86US8
  ENST ID: ENST00000354901
  CDS Start-End: 296-1831
ggacccagatacccgtcagaatttccaggccttggtttggtttagacattttagaagatgttaacagcaataattgtaaaagactttgagtggcacgcatggtgaacagaaagtactagatcctgaagaggggggaaaggcatttctgtgctcttcctggtaaagtgtttgaaaatgaacattcagaagaaaacctaaagcacctgaaatgcacaggggacgagaatgagagctgaacaaaaggttcatcctcagttttctccatgcccatgggaagctgtttacccggattgggatggagacattccctgcagtggctgagaaggtcctcaaggagttccaggtgttactgcagcacagcccctctcccattggaagtacccgcatgctgcagcttatgaccatcaatatgtttgcagtacacaactcccagctgaaagactgcttctcggaggagtgccgctctgtgatccaggaacaagccgcagctctgggcttggccatgttttctctactggtccgccgctgcacctgcttacttaaggagtccgccaaagctcagctgtcctctcctgaggaccaggatgaccaagacgacatcaaggtgtcttcctttgtcccggacctgaaggagctgctccccagtgtcaaagtctggtcagattggatgctcggctacccggacacctggaatcctcctcccacatccctggatctgccctcgcatgttgctgtggatgtatggtcgacgctggctgatttctgtaacatactgactgcagtgaatcagtctgaggtgccactgtacaaggacccggatgatgacctcacccttcttatcctggaagaggatcggcttctctcgggctttgtccccttgctggctgcccctcaggacccctgctacgtggagaaaacctcggataaggttattgcagctgactgcaaaagggtcacagtgctgaagtattttctggaagccctttgtggacaagaagagcctctgctggcattcaagggtggaaagtatgtgtcagtggcacccgtcccagacaccatgggaaaggaaatgggaagccaagagggaacacgactggaagatgaggaggaggatgtggtgattgaagactttgaggaagattcagaggctgaaggcagcggaggcgaggatgacatcagggagcttcgggccaagaagctggctctggccaggaagatagctgagcagcagcgtcgccaggaaaagatccaggctgtcctggaggaccacagtcagatgaggcagatggagctcgaaatcagacctttgttcctcgtaccagacaccaacggcttcattgaccacctggccagtctggcgcggctgctggagagcaggaagtacatcctggtggtgcccctcatcgtgatcaatgagctggacggcctggccaaggggcaggagacagaccaccgggctgggggctacgcccgtgtggtacaagagaaggcccgcaagtccatcgagttcctcgagcagcgattcgagagtcgggactcttgcctgcgagccctgaccagccgtggcaatgaactcgaatccatcgccttccgcagtgaggacatcactggccagctgggtaacaacgatgatctcatcctgtcctgctgcctccactactgcaaagacaaggctaaggacttcatgcccgccagcaaagaggagccaatccggctactgcgggaggtggtgctgttgacggatgaccggaacctgcgtgtgaaggcgctcacaaggaatgttcctgtacgggacatcccagccttcctcacgtgggcccaggtgggctgagggagccacactggggccccccccccgtggaaccgttcctgaaaggccaccaggcgcccagtgtagcacggaagatgcccacgtgcctgagccaccaatccacccagacaataaaccatcctcttccaacccacgccacggccatgctgtgggggacctgctcctcacagagcccctcccaaggatcgggcggaagctgctgggaccctcctgggctgccaggatttagcagggaggtggctggctacagcaacagcagctgggcaagccagataggccgcccatgctctcagcctttctccctcccccgtctcattccaaggctgagggagggccttctcgcctggggacgcagccactttctccagtggagacagggcaggggttctgagtttccgtcagatgcagtgaaatcacagttccctttcatcttcagaacctctgtcgtgaatgtgttcaagaggctttggttaagtcaggaagaagtgcccagggtgtgtgtccccagtctccctgaggcctggactcgcccatgaacccaagtcggcttctagacagcatgtccctaacagcagccctgggcccccacctcttctaccatccaccccagacttaccacacacccttcctgctgctcctcttcctgcccttatcaacctgggtccctcacacttcgccagttgcgtccccgtggacagtcatgagtctagaggaaaggggcatctggtctcaggcccgtgctctcgggtggcctccacctgctccctctctcctcactggcctttctttccgtctagcttcctcttcaggaaatgtcctgactcccctcagctcccccttcacccctccttgcccgcctaccctccctccagaatagcccctcacccttcttccccttctagttgatccttttcacctccctgatccccttcatttcttcaccgcggttcctcgtcataggggttctcactctgaactttccctctctactacccatggcaggaacctagtacaggtctcccacccagggccttccaccctcggctcctgtgctgggagaaacttccaggcgtggacagcccagcctgaggcattccagtgctggggcaccgtcgcctaacctggtttctagctttgccctcactccccggaaaaactgacactgacacaggggccctttccttgcccctttagctggtacctcagtggggaggcttccttaccaagaatgagttcctgaaacccagggccagagacaaggacaacttaggggaagacggggttttcggtggagccaggggcaaatcttaatgggaccagtgggggataccccagagcccatggcctgactgcacagcctgcctggaggatgggtgcgcagctctgccctccctgaggcccaggactatgccagaagcgatggggtaccgtgtaggggagccaaggccagtagtttgggggtaggagtcccctagagtctcagaagactgggctctttggagtacagggtccccggcctctcctttaagattctctccccagctggaaggccgatgactgggtggtcgggagggagacccagctctcctttctgtcccgtttgcagcactggttttgtttccttaataaatttttagttatg

SEQ ID NO: 182506 - DNA, 1865 bp, Homo sapiens
  Payload ID: 15959
  Gene Symbol: SMG6
  Gene Name: SMG6 nonsense mediated mRNA decay factor
  Uniprot ID: Q86US8
  ENST ID: ENST00000536871
  CDS Start-End: 243-1778
ataccagagagtttagggactgtgaaggtttcaggaaatttgttgagtatttagaaaagccgatggtttcagagagaaactttgatattagcttgaacacagttattgccaggggtgaggaaatagcataccaaagcataataactcatagtgatttatccaaaacttgagttgtttgcatctctggaccctgaaaactcctttatcttgaatttgttcaaaattgcaggataccgggaaggatggagacattccctgcagtggctgagaaggtcctcaaggagttccaggtgttactgcagcacagcccctctcccattggaagtacccgcatgctgcagcttatgaccatcaatatgtttgcagtacacaactcccagctgaaagactgcttctcggaggagtgccgctctgtgatccaggaacaagccgcagctctgggcttggccatgttttctctactggtccgccgctgcacctgcttacttaaggagtccgccaaagctcagctgtcctctcctgaggaccaggatgaccaagacgacatcaaggtgtcttcctttgtcccggacctgaaggagctgctccccagtgtcaaagtctggtcagattggatgctcggctacccggacacctggaatcctcctcccacatccctggatctgccctcgcatgttgctgtggatgtatggtcgacgctggctgatttctgtaacatactgactgcagtgaatcagtctgaggtgccactgtacaaggacccggatgatgacctcacccttcttatcctggaagaggatcggcttctctcgggctttgtccccttgctggctgcccctcaggacccctgctacgtggagaaaacctcggataaggttattgcagctgactgcaaaagggtcacagtgctgaagtattttctggaagccctttgtggacaagaagagcctctgctggcattcaagggtggaaagtatgtgtcagtggcacccgtcccagacaccatgggaaaggaaatgggaagccaagagggaacacgactggaagatgaggaggaggatgtggtgattgaagactttgaggaagattcagaggctgaaggcagcggaggcgaggatgacatcagggagcttcgggccaagaagctggctctggccaggaagatagctgagcagcagcgtcgccaggaaaagatccaggctgtcctggaggaccacagtcagatgaggcagatggagctcgaaatcagacctttgttcctcgtaccagacaccaacggcttcattgaccacctggccagtctggcgcggctgctggagagcaggaagtacatcctggtggtgcccctcatcgtgatcaatgagctggacggcctggccaaggggcaggagacagaccaccgggctgggggctacgcccgtgtggtacaagagaaggcccgcaagtccatcgagttcctcgagcagcgattcgagagtcgggactcttgcctgcgagccctgaccagccgtggcaatgaactcgaatccatcgccttccgcagtgaggacatcactggccagctgggtaacaacgatgatctcatcctgtcctgctgcctccactactgcaaagacaaggctaaggacttcatgcccgccagcaaagaggagccaatccggctactgcgggaggtggtgctgttgacggatgaccggaacctgcgtgtgaaggcgctcacaaggaatgttcctgtacgggacatcccagccttcctcacgtgggcccaggtgggctgagggagccacactggggccccccccccgtggaaccgttcctgaaaggccaccaggcgcccagtgtagcacggaagatgcccacgtgcc

SEQ ID NO: 182507 - DNA, 574 bp, Homo sapiens
  Payload ID: 15959
  Gene Symbol: SMG6
  Gene Name: SMG6 nonsense mediated mRNA decay factor
  ENST ID: ENST00000575663
  CDS Start-End: 88-574
atacagaccccgatgagcagagccttgtgagagggaggaggacggcaacacacgaagaactgagacagatgactgggggcttctaggatggagacattccctgcagtggctgagaaggtcctcaaggagttccaggtgttactgcagcacagcccctctcccattggaagtacccgcatgctgcagcttatgaccatcaatatgtttgcagtacacaactcccagctgaaagactgcttctcggaggagtgccgctctgtgatccaggaacaagccgcagctctgggcttggccatgttttctctactggtccgccgctgcacctgcttacttaaggagtccgccaaagctcagctgtcctctcctgaggaccaggatgaccaagacgacatcaaggtgtcttcctttgtcccggacctgaaggagctgctccccagtgtcaaagtctggtcagattggatgctcggctacccggacacctggaatcctcctcccacatccctggatctgccctcgcatgttgctgtggatgtatggtcgacgctggctgatttctgtaacatactgactgcag

SEQ ID NO: 182508 - DNA, 588 bp, Homo sapiens
  Payload ID: 15959
  Gene Symbol: SMG6
  Gene Name: SMG6 nonsense mediated mRNA decay factor
  ENST ID: ENST00000571442
  CDS Start-End: 95-588
aaacgcttgggtaaaatatctttaggccgagtgcagtggctcatgcctgtaatcccagcactttgggaggccgaggcaggtggatcacttgaggatggagacattccctgcagtggctgagaaggtcctcaaggagttccaggtgttactgcagcacagcccctctcccattggaagtacccgcatgctgcagcttatgaccatcaatatgtttgcagtacacaactcccagctgaaagactgcttctcggaggagtgccgctctgtgatccaggaacaagccgcagctctgggcttggccatgttttctctactggtccgccgctgcacctgcttacttaaggagtccgccaaagctcagctgtcctctcctgaggaccaggatgaccaagacgacatcaaggtgtcttcctttgtcccggacctgaaggagctgctccccagtgtcaaagtctggtcagattggatgctcggctacccggacacctggaatcctcctcccacatccctggatctgccctcgcatgttgctgtggatgtatggtcgacgctggctgatttctgtaacatactgactgcagtgaatca

SEQ ID NO: 182509 - DNA, 572 bp, Homo sapiens
  Payload ID: 15959
  Gene Symbol: SMG6
  Gene Name: SMG6 nonsense mediated mRNA decay factor
  ENST ID: ENST00000570606
  CDS Start-End: 204-572
aataattgtaaaagactttgagtggcacgcatggtgaacagaaagtactagatcctgaagaggggggaaaggcatttctgtgctcttcctggtaaagtgtttgaaaatgaacattcagaagaaaacctaaagcacctgaaatgcacaggggacgagaatgagaggtgattagaagcccaacacatgcaccagttcttaggtggatggagacattccctgcagtggctgagaaggtcctcaaggagttccaggtgttactgcagcacagcccctctcccattggaagtacccgcatgctgcagcttatgaccatcaatatgtttgcagtacacaactcccagctgaaagactgcttctcggaggagtgccgctctgtgatccaggaacaagccgcagctctgggcttggccatgttttctctactggtccgccgctgcacctgcttacttaaggagtccgccaaagctcagctgtcctctcctgaggaccaggatgaccaagacgacatcaaggtgtcttcctttgtcccggacctgaaggagctgctccccagtgtcaaagtctggtcagat

SEQ ID NO: 182510 - DNA, 652 bp, Homo sapiens
  Payload ID: 15959
  Gene Symbol: SMG6
  Gene Name: SMG6 nonsense mediated mRNA decay factor
  ENST ID: ENST00000575454
  CDS Start-End: 29-652
aagcgtctcaggcacactgtctggaaagatgacaggaccctgcattaggcaactgagtctccaaattctttttcctctctgtgttgctgtggatgtatggtcgacgctggctgatttctgtaacatactgactgcagtgaatcagtctgaggtgccactgtacaaggacccggatgatgacctcacccttcttatcctggaagaggatcggcttctctcgggctttgtccccttgctggctgcccctcaggacccctgctacgtggagaaaacctcggataaggttattgcagctgactgcaaaagggtcacagtgctgaagtattttctggaagccctttgtggacaagaagagcctctgctggcattcaagggtggaaagtatgtgtcagtggcacccgtcccagacaccatgggaaaggaaatgggaagccaagagggaacacgactggaagatgaggaggaggatgtggtgattgaagactttgaggaagattcagaggctgaaggcagcggaggcgaggatgacatcagggagcttcgggccaagaagctggctctggccaggaagatagctgagcagcagcgtcgccaggaaaagatccaggctgtcctggaggaccacagtcagatgaggcagatggagctcgaa

SEQ ID NO: 182511 - DNA, 547 bp, Homo sapiens
  Payload ID: 15959
  Gene Symbol: SMG6
  Gene Name: SMG6 nonsense mediated mRNA decay factor
  ENST ID: ENST00000570668
  CDS Start-End: 191-547
acaaggcagccactttagtcagtgacacacacagcccgaaaacgatggtatcttctgaggttttaaaggatagggacagagtcatctcggattcgggagaagtactcagtcggggtgccatatggctcctgacagaccctttcctggtgagaggcagatcacacctgcacttggactccactgagagaggatggagacattccctgcagtggctgagaaggtcctcaaggagttccaggtgttactgcagcacagcccctctcccattggaagtacccgcatgctgcagcttatgaccatcaatatgtttgcagtacacaactcccagctgaaagactgcttctcggaggagtgccgctctgtgatccaggaacaagccgcagctctgggcttggccatgttttctctactggtccgccgctgcacctgcttacttaaggagtccgccaaagctcagctgtcctctcctgaggaccaggatgaccaagacgacatcaaggtgtcttcctttgtcccggacctgaaggagctgctccccagtgtcaaa

SEQ ID NO: 182512 - DNA, 592 bp, Homo sapiens
  Payload ID: 15959
  Gene Symbol: SMG6
  Gene Name: SMG6 nonsense mediated mRNA decay factor
  ENST ID: ENST00000570659
  CDS Start-End: 104-592
ttggctcagctgagcggcagctgttgggcatgtgccctggctgaacaaaaggttcatcctcagttttctccatgcccatgggaagctgtttacccggattgggatggagacattccctgcagtggctgagaaggtcctcaaggagttccaggtgttactgcagcacagcccctctcccattggaagtacccgcatgctgcagcttatgaccatcaatatgtttgcagtacacaactcccagctgaaagactgcttctcggaggagtgccgctctgtgatccaggaacaagccgcagctctgggcttggccatgttttctctactggtccgccgctgcacctgcttacttaaggagtccgccaaagctcagctgtcctctcctgaggaccaggatgaccaagacgacatcaaggtgtcttcctttgtcccggacctgaaggagctgctccccagtgtcaaagtctggtcagattggatgctcggctacccggacacctggaatcctcctcccacatccctggatctgccctcgcatgttgctgtggatgtatggtcgacgctggctgatttctgtaacatactgactgcagtg

SEQ ID NO: 182513 - DNA, 689 bp, Homo sapiens
  Payload ID: 15959
  Gene Symbol: SMG6
  Gene Name: SMG6 nonsense mediated mRNA decay factor
  ENST ID: ENST00000572369
  CDS Start-End: 274-689
ggggtaggtaggaagattgctgtttctttgctggtcagactctccaggctctctgcggagagtccaggcaggatctgtctgacttggattgcagttctctttttctgctgagctggggtgtgggcagcctaggcctgtgtaactcgtgacaggcctcccaaagtgccatgatggcatggatcctcgtggagctgttgagaacaaaaacaggactgcttctcggaggagtgccgctctgtgatccaggaacaagccgcagctctgggcttggccatgttttctctactggtccgccgctgcacctgcttacttaaggagtccgccaaagctcagctgtcctctcctgaggaccaggatgaccaagacgacatcaaggtgtcttcctttgtcccggacctgaaggagctgctccccagtgtcaaagtctggtcagattggatgctcggctacccggacacctggaatcctcctcccacatccctggatctgccctcgcatgttgctgtggatgtatggtcgacgctggctgatttctgtaacatactgactgcagtgaatcagtctgaggtgccactgtacaaggacccggatgatgacctcacccttcttatcctggaagaggatcggcttctctcgggctttgtccccttgctggctgcccctcaggacccctgctacgtggagaaaac

SEQ ID NO: 182514 - DNA, 557 bp, Homo sapiens
  Payload ID: 15959
  Gene Symbol: SMG6
  Gene Name: SMG6 nonsense mediated mRNA decay factor
  ENST ID: ENST00000575176
  CDS Start-End: 186-557
ctagttggttgagtcagaacctggagttagtttggtagggtgtggtttcaggtttgcagacatccccggttgatgcctatgaagggttggtgcctgatgtaactgaatagggtgctacttcagactgcttctcggaggagtgccgctctgtgatccaggaacaagccgcagctctgggcttggccatgttttctctactggtccgccgctgcacctgcttacttaaggagtccgccaaagctcagctgtcctctcctgaggaccaggatgaccaagacgacatcaaggtgtcttcctttgtcccggacctgaaggagctgctccccagtgtcaaagtctggtcagattggatgctcggctacccggacacctggaatcctcctcccacatccctggatctgccctcgcatgttgctgtggatgtatggtcgacgctggctgatttctgtaacatactgactgcagtgaatcagtctgaggtgccactgtacaaggacccggatgatgacctcacccttcttatcctggaagaggatcggcttctctcgggctttgtc

SEQ ID NO: 182515 - DNA, 551 bp, Homo sapiens
  Payload ID: 15959
  Gene Symbol: SMG6
  Gene Name: SMG6 nonsense mediated mRNA decay factor
  ENST ID: ENST00000572205
  CDS Start-End: 205-551
ttgatatcagaaaaaagaaaaagcttctctgggcagctagacagtgcaaggaatgtccccccaaatctgagcactgttgttctctgatgaagaaagtgacctgtgaatctgatctgagataggaagaggaacaggagtaaagactgcttctcggaggagtgccgctctgtgatccaggaacaagccgcagctctgggcttggccatgttttctctactggtccgccgctgcacctgcttacttaaggagtccgccaaagctcagctgtcctctcctgaggaccaggatgaccaagacgacatcaaggtgtcttcctttgtcccggacctgaaggagctgctccccagtgtcaaagtctggtcagattggatgctcggctacccggacacctggaatcctcctcccacatccctggatctgccctcgcatgttgctgtggatgtatggtcgacgctggctgatttctgtaacatactgactgcagtgaatcagtctgaggtgccactgtacaaggacccggatgatgacctcacccttcttatcctggaaga

SEQ ID NO: 182516 - DNA, 5788 bp, Homo sapiens
  Payload ID: 15960
  Gene Symbol: SMG7
  Gene Name: SMG7 nonsense mediated mRNA decay factor
  Uniprot ID: Q92540
  ENST ID: ENST00000347615
  CDS Start-End: 120-3533
gagccggaggagaggaagatggcggcggccgccagcacccgcggtgccgcggggccgctccgaggagcctgagagacccacggaggcttcgcgggaagacgcggcggcggcggcggaggatgagcctgcagagcgcgcagtacctccggcaggcagaagtcctgaaggctgacatgacagattctaagctgggtccagctgaagtctggacatccaggcaggctctgcaggacctgtaccagaaaatgctagttaccgatttggaatacgctttagacaagaaagtagaacaggatctctggaatcacgcctttaagaatcagatcacaacactgcaaggccaggcaaagaatcgagcaaatccgaatcggagtgaagttcaggcaaacctttctctgttcctagaggcagctagtggcttctatactcagttattacaagaactgtgtacagtatttaatgtagatttaccatgccgtgtgaagtcttcccaattgggaattatcagcaataaacagacgcataccagcgccatagtgaagccacagtctagctcctgttcctatatctgccagcactgcctcgtccaccttggagacattgctcgatacagaaaccagaccagccaggcagagtcctactataggcatgcagctcagcttgtcccctccaatggtcagccttataatcagttggctatcttagcttcttccaaaggagaccatctgaccacaattttctactactgcagaagcattgctgtgaagttccctttcccagctgcctccactaatctgcaaaaagcactttctaaagcactggaaagccgagatgaggtgaaaaccaagtggggtgtttctgacttcatcaaggcctttattaaattccacggtcatgtgtacctgagtaagagcttggaaaagttgagccctcttcgagagaaattggaagaacagtttaagaggctgctattccaaaaagctttcaactctcagcagttagttcatgtcactgtcattaacctgtttcaacttcatcaccttcgtgactttagcaatgaaaccgagcagcacacttatagccaagatgagcagctatgttggacacagttgctggccctctttatgtcttttcttggcatcctgtgcaagtgtcctctacagaatgagtctcaggaggagtcctacaatgcctatcctcttccagcagtcaaggtctccatggactggctaagactcagacccagggtctttcaggaggcagtggtggatgaaagacagtacatttggccctggttgatttctcttctgaatagtttccatccccatgaagaggacctctcaagtattagtgcgacaccacttccagaggagtttgaattacaaggatttttggcattgagaccttctttcaggaacttggatttttccaaaggtcaccagggtattacaggggacaaagaaggccagcaacgacgaatacgacagcaacgcttgatctctataggcaaatggattgctgataatcagccaaggctgattcagtgtgaaaatgaggtagggaaattgttgtttatcacagaaatcccagaattaatactggaagaccccagtgaagccaaagagaacctcattctgcaagaaacatctgtgatagagtcgctggctgcagatgggagcccagggctaaaatcagtgctatctacaagccgaaatttaagcaacaactgtgacacaggagagaagccagtggttaccttcaaagaaaacattaagacacgagaagtgaacagagaccaaggaagaagttttcctcccaaagaggtgagaagggactatagcaaaggaataactgtaactaagaatgatggaaagaaggacaacaacaagaggaaaactgaaaccaagaaatgcaccttagaaaagttacaggaaacaggaaagcagaatgtggcagtgcaggtaaaatcccagacagaactaagaaagactccagtgtctgaagccagaaaaacacctgtaactcaaaccccaactcaagcaagtaactcccagttcatccccattcatcaccctggagccttccctcctcttcccagcaggccagggtttccgcccccaacatatgttatccccccgcctgtggcattttctatgggctcaggttacaccttcccagctggtgtttctgtcccaggaacctttcttcagcctacagctcactctccagcaggaaaccaggtgcaagctgggaaacagtcccacattccttacagccagcaacggccctctggaccagggccaatgaaccagggacctcaacaatcacagccaccttcccagcaaccccttacatctttaccagctcagccaacagcacagtctacaagccagctgcaggttcaagctctaactcagcaacaacaatcccctacaaaagctgtgccggctttggggaaaagcccgcctcaccactctggattccagcagtatcaacaggcagatgcctccaaacagctgtggaatccccctcaggttcaaggcccattagggaaaattatgcctgtgaaacagccctactaccttcagacccaagaccccataaaactgtttgagccgtcattgcaacctcctgtaatgcagcagcagcctctagaaaaaaaaatgaagccttttcccatggagccatataaccataatccctcagaagtcaaggtcccagaattctactgggattcttcctacagcatggctgataacagatctgtaatggcacagcaagcaaacatagaccgcaggggcaaacggtcaccaggagtcttccgtccagagcaggatcctgtacccagaatgccgtttgagaaatccttattggagaagccctcagagctcatgtcacattcatcctctttcctgtccctcaccggattctctctcaatcaggaaagatacccaaataatagtatgttcaatgaggtatatgggaaaaacctgacatccagctccaaagcagaactcagtccctcaatggccccccaggaaacatctctgtattccctttttgaagggactccgtggtctccatcacttcctgccagttcagatcattcaacaccagccagccagtctcctcattcctctaacccaagcagcctacccagctctcctccaacacacaaccataattctgttccattctccaattttggacccattgggactccagataacagggatagaaggactgcagatcggtggaaaactgataagccagccatgggtgggtttggcattgattatctctcagcaacgtcatcctctgagagcagttggcatcaggccagcactccgagtggcacctggacaggccatggcccttccatggaggattcctctgctgtcctcatggaaagcctaaagtctatctggtccagttccatgatgcatcctggaccttctgctctggagcagctgttaatgcagcagaagcagaaacagcaacggggacaaggcaccatgaaccctccacactgaggccaaagtggcaacctgggaatgaaggctccataaaccatggcatgttgggtttgcaggactggcccacacagtcccctgcaggtggcagccctcttttctgtttctcgctgtcaagagggtgtaagtattccaccagcccgctgagtgtgcacgaaatgttcgcagtgcaacaaaaagaaaaatccatcaggaactctccgtccccccggggccctccggagggagagagagaggaactgctgtttatctcactcagttacttggtatcaccgcctctcaccttctccatcgtgcatgtccccagccacatgggaagtgaaagctgagaagggaaggcagatgggagaagccaatgggaacttctcagtccttttttcctctttggggaataaaataggaatccattaatgattgctttgctgactgagaatgtagttgaaattattcttaaacatcttttattattattactctcagtagtaaaatatcacactgaattcttccatacacaggtgtgcttctagtcagtgtgtagcaaggaaagccccgttcactgctcctgtgagaggttggtggtgacaggatggggaaccgacctcttcagccagtggaaatgttccataagggagagttcaaggcctgtcagaaggctctggtaggccttcctctggccaggagactccagcagggaatgcccttcactctgtaggtgctcgagccccaatcgaggatacagtgtgggtggtggtgctgggctggactagcaggtagactgctgtaggatttcaaattacgtttttgattcctgtacattttacagtcgcacagcaagcagtctcacagaaggcaggctagtccattcacagcctgacacgttctaataggtagaagctttcagtgtggttattttttctttggttggtttttgtgcccccattctacttcccaccctcctgccccatctccatcccttcttttacccaatgctgtatgctagtaattgtttttattcctaatgtgtgcaacatcacatctccccaagaagcaacagcatggggtccagcagttggggcccaaaagacagtctgaagaggaaggaagcagcagtatctgcgtagcccacagagggcccaggcccctgcccagctgcagtctcccagcctccactttcagagtgaaattcaaggcagcacggacatgtgcccatcaggcacagaagaaaacacgacgtcgtccattttggaagagacgaaagaaaggaaaataaactctttgtatgatatttattaggaggaaagaggactgaaaatgttcttgtgtagaaacagaaggacagcatttctgttagtcatttcctggaaaagtaatattttaaggggaaattatggaaacaatctaattgttcaattgctgtgctagtggtagggtttattttctgggaggtctctcctttgtgtgtctgtatgtttgtgtacacacacgtgcccatctgctgtcccagaggggaggggttgtgtgtgcgagtgtatggagttagtgtggaacttaagagctggaagacagctgtagagcaaagcacatccaggagccccagttgtcactgcagtctgggcaaccccagcaatgaaaaggggtgagataacgctcattgctcttcagagagagtggttggagccccccccgccccgtatgcttacattattgctcttttagtttgacatggtgtttgggttttgtttttttgaaaggtctgaaaaggtgaagccccctacccaatggcaatatgaaaccttttgtgcttctcttcagccccttccctgtgtccacctttctctcctcttcccaagcctttttcctactacctttacccagtttgtgtgtttgagctctgcattcaggcagctgcaacattccagtgtttgaactgtcactgattcttgcgccctagacaagctaaccaggtttaccatctcactcccagtaatacccagctcctatctaaagccccattctgcatgagaatttggtgtttggaatgttttctgactcttggggcgggattcctcgccttatcatcctcactgtggagtaatgagggggaggagaatctttatcagaaactggttttgtgtagtaaactttcttttgtggttttttgttttgttttctgggttttgttttttgtttttgtctgtgcaagacctgcagctgctgaaaatcagctttgcctttaattaaaccatgttctctcc

SEQ ID NO: 182517 - DNA, 5970 bp, Homo sapiens
  Payload ID: 15960
  Gene Symbol: SMG7
  Gene Name: SMG7 nonsense mediated mRNA decay factor
  ENST ID: ENST00000367537
  CDS Start-End: 196-3708
cccacccccctgccgagcgaggaggagccggaggagaggaagatggcggcggccgccagcacccgcggtgccgcggggccgctccgaggagcctgagagacccacggaggcttcgcgggaagacgcggcggcggcggcggaggatgagcctgcagagcgcgcagtacctccgaatgtcttaaaccattctaccttatgagaaattggatgttcttgcagatagtcattgtgggagaaaacgtttcatttaagtcccagatgaggaccgaaaacttgaaatcagaggagcatctgaaatcaagtaatattaggcaggcagaagtcctgaaggctgacatgacagattctaagctgggtccagctgaagtctggacatccaggcaggctctgcaggacctgtaccagaaaatgctagttaccgatttggaatacgctttagacaagaaagtagaacaggatctctggaatcacgcctttaagaatcagatcacaacactgcaaggccaggcaaagaatcgagcaaatccgaatcggagtgaagttcaggcaaacctttctctgttcctagaggcagctagtggcttctatactcagttattacaagaactgtgtacagtatttaatgtagatttaccatgccgtgtgaagtcttcccaattgggaattatcagcaataaacagacgcataccagcgccatagtgaagccacagtctagctcctgttcctatatctgccagcactgcctcgtccaccttggagacattgctcgatacagaaaccagaccagccaggcagagtcctactataggcatgcagctcagcttgtcccctccaatggtcagccttataatcagttggctatcttagcttcttccaaaggagaccatctgaccacaattttctactactgcagaagcattgctgtgaagttccctttcccagctgcctccactaatctgcaaaaagcactttctaaagcactggaaagccgagatgaggtgaaaaccaagtggggtgtttctgacttcatcaaggcctttattaaattccacggtcatgtgtacctgagtaagagcttggaaaagttgagccctcttcgagagaaattggaagaacagtttaagaggctgctattccaaaaagctttcaactctcagcagttagttcatgtcactgtcattaacctgtttcaacttcatcaccttcgtgactttagcaatgaaaccgagcagcacacttatagccaagatgagcagctatgttggacacagttgctggccctctttatgtcttttcttggcatcctgtgcaagtgtcctctacagaatgagtctcaggaggagtcctacaatgcctatcctcttccagcagtcaaggtctccatggactggctaagactcagacccagggtctttcaggaggcagtggtggatgaaagacagtacatttggccctggttgatttctcttctgaatagtttccatccccatgaagaggacctctcaagtattagtgcgacaccacttccagaggagtttgaattacaaggatttttggcattgagaccttctttcaggaacttggatttttccaaaggtcaccagggtattacaggggacaaagaaggccagcaacgacgaatacgacagcaacgcttgatctctataggcaaatggattgctgataatcagccaaggctgattcagtgtgaaaatgaggtagggaaattgttgtttatcacagaaatcccagaattaatactggaagaccccagtgaagccaaagagaacctcattctgcaagaaacatctgtgatagagtcgctggctgcagatgggagcccagggctaaaatcagtgctatctacaagccgaaatttaagcaacaactgtgacacaggagagaagccagtggttaccttcaaagaaaacattaagacacgagaagtgaacagagaccaaggaagaagttttcctcccaaagaggtaaaatcccagacagaactaagaaagactccagtgtctgaagccagaaaaacacctgtaactcaaaccccaactcaagcaagtaactcccagttcatccccattcatcaccctggagccttccctcctcttcccagcaggccagggtttccgcccccaacatatgttatccccccgcctgtggcattttctatgggctcaggttacaccttcccagctggtgtttctgtcccaggaacctttcttcagcctacagctcactctccagcaggaaaccaggtgcaagctgggaaacagtcccacattccttacagccagcaacggccctctggaccagggccaatgaaccagggacctcaacaatcacagccaccttcccagcaaccccttacatctttaccagctcagccaacagcacagtctacaagccagctgcaggttcaagctctaactcagcaacaacaatcccctacaaaagctgtgccggctttggggaaaagcccgcctcaccactctggattccagcagtatcaacaggcagatgcctccaaacagctgtggaatccccctcaggttcaaggcccattagggaaaattatgcctgtgaaacagccctactaccttcagacccaagaccccataaaactgtttgagccgtcattgcaacctcctgtaatgcagcagcagcctctagaaaaaaaaatgaagccttttcccatggagccatataaccataatccctcagaagtcaaggtcccagaattctactgggattcttcctacagcatggctgataacagatctgtaatggcacagcaagcaaacatagaccgcaggggcaaacggtcaccaggagtcttccgtccagagcaggatcctgtacccagaatgccgtttgaggaccccaagagctcccctctgcttcctccggacctgttaaagagtctggctgccttggaggaagaggaagagctgattttttctaaccctcctgatctttacccggctctgctggggcctctcgcctctcttcctggacgaagcctttttaaatccttattggagaagccctcagagctcatgtcacattcatcctctttcctgtccctcaccggattctctctcaatcaggaaagatacccaaataatagtatgttcaatgaggtatatgggaaaaacctgacatccagctccaaagcagaactcagtccctcaatggccccccaggaaacatctctgtattccctttttgaagggactccgtggtctccatcacttcctgccagttcagatcattcaacaccagccagccagtctcctcattcctctaacccaagcagcctacccagctctcctccaacacacaaccataattctgttccattctccaattttggacccattgggactccagataacagggatagaaggactgcagatcggtggaaaactgataagccagccatgggtgggtttggcattgattatctctcagcaacgtcatcctctgagagcagttggcatcaggccagcactccgagtggcacctggacaggccatggcccttccatggaggattcctctgctgtcctcatggaaagcctaaagtctatctggtccagttccatgatgcatcctggaccttctgctctggagcagctgttaatgcagcagaagcagaaacagcaacggggacaaggcaccatgaaccctccacactgaggccaaagtggcaacctgggaatgaaggctccataaaccatggcatgttgggtttgcaggactggcccacacagtcccctgcaggtggcagccctcttttctgtttctcgctgtcaagagggtgtaagtattccaccagcccgctgagtgtgcacgaaatgttcgcagtgcaacaaaaagaaaaatccatcaggaactctccgtccccccggggccctccggagggagagagagaggaactgctgtttatctcactcagttacttggtatcaccgcctctcaccttctccatcgtgcatgtccccagccacatgggaagtgaaagctgagaagggaaggcagatgggagaagccaatgggaacttctcagtccttttttcctctttggggaataaaataggaatccattaatgattgctttgctgactgagaatgtagttgaaattattcttaaacatcttttattattattactctcagtagtaaaatatcacactgaattcttccatacacaggtgtgcttctagtcagtgtgtagcaaggaaagccccgttcactgctcctgtgagaggttggtggtgacaggatggggaaccgacctcttcagccagtggaaatgttccataagggagagttcaaggcctgtcagaaggctctggtaggccttcctctggccaggagactccagcagggaatgcccttcactctgtaggtgctcgagccccaatcgaggatacagtgtgggtggtggtgctgggctggactagcaggtagactgctgtaggatttcaaattacgtttttgattcctgtacattttacagtcgcacagcaagcagtctcacagaaggcaggctagtccattcacagcctgacacgttctaataggtagaagctttcagtgtggttattttttctttggttggtttttgtgcccccattctacttcccaccctcctgccccatctccatcccttcttttacccaatgctgtatgctagtaattgtttttattcctaatgtgtgcaacatcacatctccccaagaagcaacagcatggggtccagcagttggggcccaaaagacagtctgaagaggaaggaagcagcagtatctgcgtagcccacagagggcccaggcccctgcccagctgcagtctcccagcctccactttcagagtgaaattcaaggcagcacggacatgtgcccatcaggcacagaagaaaacacgacgtcgtccattttggaagagacgaaagaaaggaaaataaactctttgtatgatatttattaggaggaaagaggactgaaaatgttcttgtgtagaaacagaaggacagcatttctgttagtcatttcctggaaaagtaatattttaaggggaaattatggaaacaatctaattgttcaattgctgtgctagtggtagggtttattttctgggaggtctctcctttgtgtgtctgtatgtttgtgtacacacacgtgcccatctgctgtcccagaggggaggggttgtgtgtgcgagtgtatggagttagtgtggaacttaagagctggaagacagctgtagagcaaagcacatccaggagccccagttgtcactgcagtctgggcaaccccagcaatgaaaaggggtgagataacgctcattgctcttcagagagagtggttggagccccccccgccccgtatgcttacattattgctcttttagtttgacatggtgtttgggttttgtttttttgaaaggtctgaaaaggtgaagccccctacccaatggcaatatgaaaccttttgtgcttctcttcagccccttccctgtgtccacctttctctcctcttcccaagcctttttcctactacctttacccagtttgtgtgtttgagctctgcattcaggcagctgcaacattccagtgtttgaactgtcactgattcttgcgccctagacaagctaaccaggtttaccatctcactcccagtaatacccagctcctatctaaagccccattctgcatgagaatttggtgtttggaatgttttctgactcttggggcgggattcctcgccttatcatcctcactgtggagtaatgagggggaggagaatctttatcagaaactggttttgtgtagtaaactttcttttgtggttttttgttttgttttctgggttttgttttttgtttttgtctgtgcaagacctgcagctgctgaaaatcagctttgcctttaattaaaccatgttctctccaaccaga

SEQ ID NO: 182518 - DNA, 2483 bp, Homo sapiens
  Payload ID: 15960
  Gene Symbol: SMG7
  Gene Name: SMG7 nonsense mediated mRNA decay factor
  ENST ID: ENST00000419169
  CDS Start-End: 214-2483
gagccggaggagaggaagatggcggcggccgccagcacccgcggtgccgcggggccgctccgaggagcctgagagacccacggaggcttcgcgggaagacgcggcggcggcggcggaggatgagcctgcagagcgcgcagtacctccgattctaagctgggtccagctgaagtctggacatccaggcaggctctgcaggacctgtaccagaaaatgctagttaccgatttggaatacgctttagacaagaaagtagaacaggatctctggaatcacgcctttaagaatcagatcacaacactgcaaggccaggcaaagaatcgagcaaatccgaatcggagtgaagttcaggcaaacctttctctgttcctagaggcagctagtggcttctatactcagttattacaagaactgtgtacagtatttaatgtagatttaccatgccgtgtgaagtcttcccaattgggaattatcagcaataaacagacgcataccagcgccatagtgaagccacagtctagctcctgttcctatatctgccagcactgcctcgtccaccttggagacattgctcgatacagaaaccagaccagccaggcagagtcctactataggcatgcagctcagcttgtcccctccaatggtcagccttataatcagttggctatcttagcttcttccaaaggagaccatctgaccacaattttctactactgcagaagcattgctgtgaagttccctttcccagctgcctccactaatctgcaaaaagcactttctaaagcactggaaagccgagatgaggtgaaaaccaagtggggtgtttctgacttcatcaaggcctttattaaattccacggtcatgtgtacctgagtaagagcttggaaaagttgagccctcttcgagagaaattggaagaacagtttaagaggctgctattccaaaaagctttcaactctcagcagttagttcatgtcactgtcattaacctgtttcaacttcatcaccttcgtgactttagcaatgaaaccgagcagcacacttatagccaagatgagcagctatgttggacacagttgctggccctctttatgtcttttcttggcatcctgtgcaagtgtcctctacagaatgagtctcaggaggagtcctacaatgcctatcctcttccagcagtcaaggtctccatggactggctaagactcagacccagggtctttcaggaggcagtggtggatgaaagacagtacatttggccctggttgatttctcttctgaatagtttccatccccatgaagaggacctctcaagtattagtgcgacaccacttccagaggagtttgaattacaaggatttttggcattgagaccttctttcaggaacttggatttttccaaaggtcaccagggtattacaggggacaaagaaggccagcaacgacgaatacgacagcaacgcttgatctctataggcaaatggattgctgataatcagccaaggctgattcagtgtgaaaatgaggtagggaaattgttgtttatcacagaaatcccagaattaatactggaagaccccagtgaagccaaagagaacctcattctgcaagaaacatctgtgatagagtcgctggctgcagatgggagcccagggctaaaatcagtgctatctacaagccgaaatttaagcaacaactgtgacacaggagagaagccagtggttaccttcaaagaaaacattaagacacgagaagtgaacagagaccaaggaagaagttttcctcccaaagaggtaaaatcccagacagaactaagaaagactccagtgtctgaagccagaaaaacacctgtaactcaaaccccaactcaagcaagtaactcccagttcatccccattcatcaccctggagccttccctcctcttcccagcaggccagggtttccgcccccaacatatgttatccccccgcctgtggcattttctatgggctcaggttacaccttcccagctggtgtttctgtcccaggaacctttcttcagcctacagctcactctccagcaggaaaccaggtgcaagctgggaaacagtcccacattccttacagccagcaacggccctctggaccagggccaatgaaccagggacctcaacaatcacagccaccttcccagcaaccccttacatctttaccagctcagccaacagcacagtctacaagccagctgcaggttcaagctctaactcagcaacaacaatcccctacaaaagctgtgccggctttggggaaaagcccgcctcaccactctggattccagcagtatcaacaggcagatgcctccaaacagctgtggaatccccctcaggttcaaggcccattagggaaaattatgcctgtgaaacagccctactaccttcagacccaagaccccataaaactgtttgagccgtcattgcaacctcctgtaatgcagcagcagcctct

SEQ ID NO: 182519 - DNA, 580 bp, Homo sapiens
  Payload ID: 15960
  Gene Symbol: SMG7
  Gene Name: SMG7 nonsense mediated mRNA decay factor
  ENST ID: ENST00000444547
  CDS Start-End: 120-341
gagccggaggagaggaagatggcggcggccgccagcacccgcggtgccgcggggccgctccgaggagcctgagagacccacggaggcttcgcgggaagacgcggcggcggcggcggaggatgagcctgcagagcgcgcagtacctccggcaggcagaagtcctgaaggctgacatgacagattctaagctgggtccagctgaagtctggacatccaggcaggctctgcaggacctgtaccagaaaatgctagttaccgatttggaatacgctttagacaagaaagtagaacaggatctggggaccagtgtctgcccagtgagtcactgctataccaaatagaattacattttgttttcagctggaatcacgcctttaagaatcagatcacaacactgcaaggccaggcaaagaatcgagcaaatccgaatcggagtgaagttcaggcaaacctttctctgttcctagaggcagctagtggcttctatactcagttattacaagaactgtgtacagtatttaatgtagatttaccatgccgtgtgaagtcttcccaattgggaattatcagcaataaacag

SEQ ID NO: 182520 - DNA, 1190 bp, Homo sapiens
  Payload ID: 15960
  Gene Symbol: SMG7
  Gene Name: SMG7 nonsense mediated mRNA decay factor
  ENST ID: ENST00000440812
  CDS Start-End: 406-960
gaagccgcacaggcgccacacagctcgttgatcccaaaagggagcgctacagagaggcggaaatcactgagggacaggcgctgctgaaatctcgcgagagggaccccctccctcgcccggtcgccgacttcctctgcttctcctctttcccccgcccctcctccctccccctcccccccgggtcggagtgtccctgcgccccacgggccagagcagcagcgagagcagctttccccactccctccccctcgcctcattcacccccacccccctgccgagcgaggaggagccggaggagaggaagatggcggcggccgccagcacccgcggtgccgcggggccgctccgaggagcctgagagacccacggaggcttcgcgggaagacgcggcggcggcggcggaggatgagcctgcagagcgcgcagtacctccggcaggcagaagtcctgaaggctgacatgacagattctaagctgggtccagctgaagtctggacatccaggcaggctctgcaggacctgtaccagaaaatgctagttaccgatttggaatacgctttagacaagaaagtagaacaggatctctggaatcacgcctttaagaatcagatcacaacactgcaaggccaggcaaagaatcgagcaaatccgaatcggagtgaagttcaggcaaacctttctctgttcctagaggcagctagtggcttctatactcagttattacaagaactgtgtacagtatttaatgtagatttaccatgccgtgtgaagtcttcccaattgggaattatcagcaataaacagacgcataccagcgccatagtgaagccacagtctagctcctgttcctatatctgccagcactgcctcgtccaccttggagacattgtgccatataactcaccccttcttgtgggccggctccaggtcaccagcatagtccatagtgggagctggtgatgcatgacactggaggacctgaaaatggggtctagctcgatacagaaaccagaccagccaggcagagtcctactataggcatgcagctcagcttgtcccctccaatggtcagccttataatcagttggctatcttagcttcttccaaaggagaccatctgaccacaattttctactactgcagaagcattgctgtgaagttccctttcccagctgcctccactaatctgc

SEQ ID NO: 182521 - DNA, 5629 bp, Homo sapiens
  Payload ID: 15960
  Gene Symbol: SMG7
  Gene Name: SMG7 nonsense mediated mRNA decay factor
  Uniprot ID: Q92540
  ENST ID: ENST00000515829
  CDS Start-End: 95-3370
cggccgccagcacccgcggtgccgcggggccgctccgaggagcctgagagacccacggaggcttcgcgggaagacgcggcggcggcggcggaggatgagcctgcagagcgcgcagtacctccggcaggcagaagtcctgaaggctgacatgacagattctaagctgggtccagctgaagtctggacatccaggcaggctctgcaggacctgtaccagaaaatgctagttaccgatttggaatacgctttagacaagaaagtagaacaggatctctggaatcacgcctttaagaatcagatcacaacactgcaaggccaggcaaagaatcgagcaaatccgaatcggagtgaagttcaggcaaacctttctctgttcctagaggcagctagtggcttctatactcagttattacaagaactgtgtacagtatttaatgtagatttaccatgccgtgtgaagtcttcccaattgggaattatcagcaataaacagacgcataccagcgccatagtgaagccacagtctagctcctgttcctatatctgccagcactgcctcgtccaccttggagacattgctcgatacagaaaccagaccagccaggcagagtcctactataggcatgcagctcagcttgtcccctccaatggtcagccttataatcagttggctatcttagcttcttccaaaggagaccatctgaccacaattttctactactgcagaagcattgctgtgaagttccctttcccagctgcctccactaatctgcaaaaagcactttctaaagcactggaaagccgagatgaggtgaaaaccaagtggggtgtttctgacttcatcaaggcctttattaaattccacggtcatgtgtacctgagtaagagcttggaaaagttgagccctcttcgagagaaattggaagaacagtttaagaggctgctattccaaaaagctttcaactctcagcagttagttcatgtcactgtcattaacctgtttcaacttcatcaccttcgtgactttagcaatgaaaccgagcagcacacttatagccaagatgagcagctatgttggacacagttgctggccctctttatgtcttttcttggcatcctgtgcaagtgtcctctacagaatgagtctcaggaggagtcctacaatgcctatcctcttccagcagtcaaggtctccatggactggctaagactcagacccagggtctttcaggaggcagtggtggatgaaagacagtacatttggccctggttgatttctcttctgaatagtttccatccccatgaagaggacctctcaagtattagtgcgacaccacttccagaggagtttgaattacaaggatttttggcattgagaccttctttcaggaacttggatttttccaaaggtcaccagggtattacaggggacaaagaaggccagcaacgacgaatacgacagcaacgcttgatctctataggcaaatggattgctgataatcagccaaggctgattcagtgtgaaaatgaggtagggaaattgttgtttatcacagaaatcccagaattaatactggaagaccccagtgaagccaaagagaacctcattctgcaagaaacatctgtgatagagtcgctggctgcagatgggagcccagggctaaaatcagtgctatctacaagccgaaatttaagcaacaactgtgacacaggagagaagccagtggttaccttcaaagaaaacattaagacacgagaagtgaacagagaccaaggaagaagttttcctcccaaagaggtaaaatcccagacagaactaagaaagactccagtgtctgaagccagaaaaacacctgtaactcaaaccccaactcaagcaagtaactcccagttcatccccattcatcaccctggagccttccctcctcttcccagcaggccagggtttccgcccccaacatatgttatccccccgcctgtggcattttctatgggctcaggttacaccttcccagctggtgtttctgtcccaggaacctttcttcagcctacagctcactctccagcaggaaaccaggtgcaagctgggaaacagtcccacattccttacagccagcaacggccctctggaccagggccaatgaaccagggacctcaacaatcacagccaccttcccagcaaccccttacatctttaccagctcagccaacagcacagtctacaagccagctgcaggttcaagctctaactcagcaacaacaatcccctacaaaagctgtgccggctttggggaaaagcccgcctcaccactctggattccagcagtatcaacaggcagatgcctccaaacagctgtggaatccccctcaggttcaaggcccattagggaaaattatgcctgtgaaacagccctactaccttcagacccaagaccccataaaactgtttgagccgtcattgcaacctcctgtaatgcagcagcagcctctagaaaaaaaaatgaagccttttcccatggagccatataaccataatccctcagaagtcaaggtcccagaattctactgggattcttcctacagcatggctgataacagatctgtaatggcacagcaagcaaacatagaccgcaggggcaaacggtcaccaggagtcttccgtccagagcaggatcctgtacccagaatgccgtttgagaaatccttattggagaagccctcagagctcatgtcacattcatcctctttcctgtccctcaccggattctctctcaatcaggaaagatacccaaataatagtatgttcaatgaggtatatgggaaaaacctgacatccagctccaaagcagaactcagtccctcaatggccccccaggaaacatctctgtattccctttttgaagggactccgtggtctccatcacttcctgccagttcagatcattcaacaccagccagccagtctcctcattcctctaacccaagcagcctacccagctctcctccaacacacaaccataattctgttccattctccaattttggacccattgggactccagataacagggatagaaggactgcagatcggtggaaaactgataagccagccatgggtgggtttggcattgattatctctcagcaacgtcatcctctgagagcagttggcatcaggccagcactccgagtggcacctggacaggccatggcccttccatggaggattcctctgctgtcctcatggaaagcctaaagtctatctggtccagttccatgatgcatcctggaccttctgctctggagcagctgttaatgcagcagaagcagaaacagcaacggggacaaggcaccatgaaccctccacactgaggccaaagtggcaacctgggaatgaaggctccataaaccatggcatgttgggtttgcaggactggcccacacagtcccctgcaggtggcagccctcttttctgtttctcgctgtcaagagggtgtaagtattccaccagcccgctgagtgtgcacgaaatgttcgcagtgcaacaaaaagaaaaatccatcaggaactctccgtccccccggggccctccggagggagagagagaggaactgctgtttatctcactcagttacttggtatcaccgcctctcaccttctccatcgtgcatgtccccagccacatgggaagtgaaagctgagaagggaaggcagatgggagaagccaatgggaacttctcagtccttttttcctctttggggaataaaataggaatccattaatgattgctttgctgactgagaatgtagttgaaattattcttaaacatcttttattattattactctcagtagtaaaatatcacactgaattcttccatacacaggtgtgcttctagtcagtgtgtagcaaggaaagccccgttcactgctcctgtgagaggttggtggtgacaggatggggaaccgacctcttcagccagtggaaatgttccataagggagagttcaaggcctgtcagaaggctctggtaggccttcctctggccaggagactccagcagggaatgcccttcactctgtaggtgctcgagccccaatcgaggatacagtgtgggtggtggtgctgggctggactagcaggtagactgctgtaggatttcaaattacgtttttgattcctgtacattttacagtcgcacagcaagcagtctcacagaaggcaggctagtccattcacagcctgacacgttctaataggtagaagctttcagtgtggttattttttctttggttggtttttgtgcccccattctacttcccaccctcctgccccatctccatcccttcttttacccaatgctgtatgctagtaattgtttttattcctaatgtgtgcaacatcacatctccccaagaagcaacagcatggggtccagcagttggggcccaaaagacagtctgaagaggaaggaagcagcagtatctgcgtagcccacagagggcccaggcccctgcccagctgcagtctcccagcctccactttcagagtgaaattcaaggcagcacggacatgtgcccatcaggcacagaagaaaacacgacgtcgtccattttggaagagacgaaagaaaggaaaataaactctttgtatgatatttattaggaggaaagaggactgaaaatgttcttgtgtagaaacagaaggacagcatttctgttagtcatttcctggaaaagtaatattttaaggggaaattatggaaacaatctaattgttcaattgctgtgctagtggtagggtttattttctgggaggtctctcctttgtgtgtctgtatgtttgtgtacacacacgtgcccatctgctgtcccagaggggaggggttgtgtgtgcgagtgtatggagttagtgtggaacttaagagctggaagacagctgtagagcaaagcacatccaggagccccagttgtcactgcagtctgggcaaccccagcaatgaaaaggggtgagataacgctcattgctcttcagagagagtggttggagccccccccgccccgtatgcttacattattgctcttttagtttgacatggtgtttgggttttgtttttttgaaaggtctgaaaaggtgaagccccctacccaatggcaatatgaaaccttttgtgcttctcttcagccccttccctgtgtccacctttctctcctcttcccaagcctttttcctactacctttacccagtttgtgtgtttgagctctgcattcaggcagctgcaacattccagtgtttgaactgtcactgattcttgcgccctagacaagctaaccaggtttaccatctcactcccagtaatacccagctcctatctaaagccccattctgcatgagaatttggtgtttggaatgttttctgactcttggggcgggattcctcgccttatcatcctcactgtggagtaatgagggggaggagaatctttatcagaaactggttttgtgtagtaaactttcttttgtggttttttgttttgttttctgggttttgttttttgtttttgtctgtgcaagacctgcagctgctgaaaatcagctttgcctttaattaaaccatgttctctccaacc

SEQ ID NO: 182522 - DNA, 566 bp, Homo sapiens
  Payload ID: 15960
  Gene Symbol: SMG7
  Gene Name: SMG7 nonsense mediated mRNA decay factor
  ENST ID: ENST00000502375
  CDS Start-End: 398-566
gtttgctagcgaggggtggagagaaacgtccggggaggcggcggcgaccccgagtggaggagcagaactaagaaagggaggccttatggaaagatgttttttaaaaaattgtttcataccttgcggaggagggagttggatgaggtggaagtctgaaatgagtggaaaagtcactttagctgtttagtgacatgaaagtattgacgtgtgtggatccctatatgtatattgcaagaggattgctgggaggagtaataactataaaatgataatgacaataatggccaacattttttgagggcttacttaccaaggaacagtcctaagtgctttacttctgttacctcatttaatcctcaaaacacctcaatgagaatgtcttaaaccattctaccttatgagaaattggatgttcttgcagatagtcattgtgggagaaaacgtttcatttaagtcccagatgaggaccgaaaacttgaaatcagaggagcatctgaaatcaagtaatattaggcaggcagaagtcctgaaggctgacatgacagattctaagctgggtccagctg

SEQ ID NO: 182523 - DNA, 760 bp, Homo sapiens
  Payload ID: 15960
  Gene Symbol: SMG7
  Gene Name: SMG7 nonsense mediated mRNA decay factor
  ENST ID: ENST00000507691
  CDS Start-End: 311-760
aggagccggaggagaggaagatggcggcggccgccagcacccgcggtgccgcggggccgctccgaggagcctgagagacccacggaggcttcgcgggaagacgcggcggcggcggcggaggatgagcctgcagagcgcgcagtacctccggattgctgggaggagtaataactataaaatgataatgacaataatggccaacattttttgagggcttacttaccaaggaacagtcctaagtgctttacttctgttacctcatttaatcctcaaaacacctcaatgagaatgtcttaaaccattctaccttatgagaaattggatgttcttgcagatagtcattgtgggagaaaacgtttcatttaagtcccagatgaggaccgaaaacttgaaatcagaggagcatctgaaatcaagtaatattaggcaggcagaagtcctgaaggctgacatgacagattctaagctgggtccagctgaagtctggacatccaggcaggctctgcaggacctgtaccagaaaatgctagttaccgatttggaatacgctttagacaagaaagtagaacaggatctctggaatcacgcctttaagaatcagatcacaacactgcaaggccaggcaaagaatcgagcaaatccgaatcggagtgaagttcaggcaaacctttctctgttcctagaggcagctagtggcttctatactcagttattacaagaactgtgtacagtatttaatgtagatttaccatgccgtgtg

SEQ ID NO: 182524 - DNA, 4642 bp, Homo sapiens
  Payload ID: 15960
  Gene Symbol: SMG7
  Gene Name: SMG7 nonsense mediated mRNA decay factor
  Uniprot ID: Q92540
  ENST ID: ENST00000507469
  CDS Start-End: 119-3655
agccggaggagaggaagatggcggcggccgccagcacccgcggtgccgcggggccgctccgaggagcctgagagacccacggaggcttcgcgggaagacgcggcggcggcggcggaggatgagcctgcagagcgcgcagtacctccggcaggcagaagtcctgaaggctgacatgacagattctaagctgggtccagctgaagtctggacatccaggcaggctctgcaggacctgtaccagaaaatgctagttaccgatttggaatacgctttagacaagaaagtagaacaggatctctggaatcacgcctttaagaatcagatcacaacactgcaaggccaggcaaagaatcgagcaaatccgaatcggagtgaagttcaggcaaacctttctctgttcctagaggcagctagtggcttctatactcagttattacaagaactgtgtacagtatttaatgtagatttaccatgccgtgtgaagtcttcccaattgggaattatcagcaataaacagacgcataccagcgccatagtgaagccacagtctagctcctgttcctatatctgccagcactgcctcgtccaccttggagacattgctcgatacagaaaccagaccagccaggcagagtcctactataggcatgcagctcagcttgtcccctccaatggtcagccttataatcagttggctatcttagcttcttccaaaggagaccatctgaccacaattttctactactgcagaagcattgctgtgaagttccctttcccagctgcctccactaatctgcaaaaagcactttctaaagcactggaaagccgagatgaggtgaaaaccaagtggggtgtttctgacttcatcaaggcctttattaaattccacggtcatgtgtacctgagtaagagcttggaaaagttgagccctcttcgagagaaattggaagaacagtttaagaggctgctattccaaaaagctttcaactctcagcagttagttcatgtcactgtcattaacctgtttcaacttcatcaccttcgtgactttagcaatgaaaccgagcagcacacttatagccaagatgagcagctatgttggacacagttgctggccctctttatgtcttttcttggcatcctgtgcaagtgtcctctacagaatgagtctcaggaggagtcctacaatgcctatcctcttccagcagtcaaggtctccatggactggctaagactcagacccagggtctttcaggaggcagtggtggatgaaagacagtacatttggccctggttgatttctcttctgaatagtttccatccccatgaagaggacctctcaagtattagtgcgacaccacttccagaggagtttgaattacaaggatttttggcattgagaccttctttcaggaacttggatttttccaaaggtcaccagggtattacaggggacaaagaaggccagcaacgacgaatacgacagcaacgcttgatctctataggcaaatggattgctgataatcagccaaggctgattcagtgtgaaaatgaggtagggaaattgttgtttatcacagaaatcccagaattaatactggaagaccccagtgaagccaaagagaacctcattctgcaagaaacatctgtgatagagtcgctggctgcagatgggagcccagggctaaaatcagtgctatctacaagccgaaatttaagcaacaactgtgacacaggagagaagccagtggttaccttcaaagaaaacattaagacacgagaagtgaacagagaccaaggaagaagttttcctcccaaagaggtaaaatcccagacagaactaagaaagactccagtgtctgaagccagaaaaacacctgtaactcaaaccccaactcaagcaagtaactcccagttcatccccattcatcaccctggagccttccctcctcttcccagcaggccagggtttccgcccccaacatatgttatccccccgcctgtggcattttctatgggctcaggttacaccttcccagctggtgtttctgtcccaggaacctttcttcagcctacagctcactctccagcaggaaaccaggtgcaagctgggaaacagtcccacattccttacagccagcaacggccctctggaccagggccaatgaaccagggacctcaacaatcacagccaccttcccagcaaccccttacatctttaccagctcagccaacagcacagtctacaagccagctgcaggttcaagctctaactcagcaacaacaatcccctacaaaagctgtgccggctttggggaaaagcccgcctcaccactctggattccagcagtatcaacaggcagatgcctccaaacagctgtggaatccccctcaggttcaaggcccattagggaaaattatgcctgtgaaacagccctactaccttcagacccaagaccccataaaactgtttgagccgtcattgcaacctcctgtaatgcagcagcagcctctagaaaaaaaaatgaagccttttcccatggagccatataaccataatccctcagaagtcaaggtcccagaattctactgggattcttcctacagcatggctgataacagatctgtaatggcacagcaagcaaacatagaccgcaggggcaaacggtcaccaggagtcttccgtccagagcaggatcctgtacccagaatgccgtttgaggaccccaagagctcccctctgcttcctccggacctgttaaagagtctggctgccttggaggaagaggaagagctgattttttctaaccctcctgatctttacccggctctgctggggcctctcgcctctcttcctggacgaagcctttttaaatccttattggagaagccctcagagctcatgtcacattcatcctctttcctgtccctcaccggattctctctcaatcaggaaagatacccaaataatagtatgttcaatgaggtatatgggaaaaacctgacatccagctccaaagcagaactcagtccctcaatggccccccaggaaacatctctgtattccctttttgaagggactccgtggtctccatcacttcctgccagttcagatcattcaacaccagccagccagtctcctcattcctctaacccaagcagcctacccagctctcctccaacacacaaccataattctgttccattctccaattttggacccattgggactccagataacagggatagaaggactgcagatcggtggaaaactgataagccagccatgggtgggtttggcattgattatctctcagcaacgtcatcctctgagagcagttggcatcaggccagcactccgagtggcacctggacaggccatggcccttccatggaggattcctctgctgtcctcatggaaagcctaaagaagcaacagcatggggtccagcagttggggcccaaaagacagtctgaagaggaaggaagcagcagtatctgcgtagcccacagagggcccaggcccctgcccagctgcagtctcccagcctccactttcagagtgaaattcaaggcagcacggacatgtgcccatcaggcacagaagaaaacacgacgtcgtccattttggaagagacgaaagaaaggaaaataaactctttgtatgatatttattaggaggaaagaggactgaaaatgttcttgtgtagaaacagaaggacagcatttctgttagtcatttcctggaaaagtaatattttaaggggaaattatggaaacaatctaattgttcaattgctgtgctagtggtagggtttattttctgggaggtctctcctttgtgtgtctgtatgtttgtgtacacacacgtgcccatctgctgtcccagaggggaggggttgtgtgtgcgagtgtatggagttagtgtggaacttaagagctggaagacagctgtagagcaaagcacatccaggagccccagttgtcactgcagtctgggcaaccccagcaatgaaaaggggtgagataacgctcattgctcttcagagagagtggttggagccccccccgccccgtatgcttacattattgctcttttagtttgacatggtgtttgggttttgtttttttgaaaggtctgaaaaggtgaagccccctacccaatggcaatatgaaaccttttgtgcttctcttcagccccttccctgtgtccacctttctctcctcttcccaagcctttttcctactacctttacccagtttgtgtgtttgagctctgcattcaggcagctgcaacattccagtgtttgaactgtcactgattcttgcgccctagacaagctaaccaggtttaccatctcactcccagtaatacccagctcctatctaaagccccattctgcatgagaatttggtgtttggaatgttttctgactcttggggcgggattcctcgccttatcatcctcactgtggagtaatgagggggaggagaatctttatcagaaactggttttgtgtagtaaactttcttttgtggttttttgttttgttttctgggttttgttttttgtttttgtctgtgcaagacctgcagctgctgaaaatcagctttgcctttaattaaaccatgttctctccaa

SEQ ID NO: 182525 - DNA, 3985 bp, Homo sapiens
  Payload ID: 15960
  Gene Symbol: SMG7
  Gene Name: SMG7 nonsense mediated mRNA decay factor
  Uniprot ID: Q92540
  ENST ID: ENST00000508461
  CDS Start-End: 216-3653
aggagccggaggagaggaagatggcggcggccgccagcacccgcggtgccgcggggccgctccgaggagcctgagagacccacggaggcttcgcgggaagacgcggcggcggcggcggaggatgagcctgcagagcgcgcagtacctccgattctaagctgggtccagctgaagtctggacatccaggcaggctctgcaggacctgtaccagaaaatgctagttaccgatttggaatacgctttagacaagaaagtagaacaggatctctggaatcacgcctttaagaatcagatcacaacactgcaaggccaggcaaagaatcgagcaaatccgaatcggagtgaagttcaggcaaacctttctctgttcctagaggcagctagtggcttctatactcagttattacaagaactgtgtacagtatttaatgtagatttaccatgccgtgtgaagtcttcccaattgggaattatcagcaataaacagacgcataccagcgccatagtgaagccacagtctagctcctgttcctatatctgccagcactgcctcgtccaccttggagacattgctcgatacagaaaccagaccagccaggcagagtcctactataggcatgcagctcagcttgtcccctccaatggtcagccttataatcagttggctatcttagcttcttccaaaggagaccatctgaccacaattttctactactgcagaagcattgctgtgaagttccctttcccagctgcctccactaatctgcaaaaagcactttctaaagcactggaaagccgagatgaggtgaaaaccaagtggggtgtttctgacttcatcaaggcctttattaaattccacggtcatgtgtacctgagtaagagcttggaaaagttgagccctcttcgagagaaattggaagaacagtttaagaggctgctattccaaaaagctttcaactctcagcagttagttcatgtcactgtcattaacctgtttcaacttcatcaccttcgtgactttagcaatgaaaccgagcagcacacttatagccaagatgagcagctatgttggacacagttgctggccctctttatgtcttttcttggcatcctgtgcaagtgtcctctacagaatgagtctcaggaggagtcctacaatgcctatcctcttccagcagtcaaggtctccatggactggctaagactcagacccagggtctttcaggaggcagtggtggatgaaagacagtacatttggccctggttgatttctcttctgaatagtttccatccccatgaagaggacctctcaagtattagtgcgacaccacttccagaggagtttgaattacaaggatttttggcattgagaccttctttcaggaacttggatttttccaaaggtcaccagggtattacaggggacaaagaaggccagcaacgacgaatacgacagcaacgcttgatctctataggcaaatggattgctgataatcagccaaggctgattcagtgtgaaaatgaggtagggaaattgttgtttatcacagaaatcccagaattaatactggaagaccccagtgaagccaaagagaacctcattctgcaagaaacatctgtgatagagtcgctggctgcagatgggagcccagggctaaaatcagtgctatctacaagccgaaatttaagcaacaactgtgacacaggagagaagccagtggttaccttcaaagaaaacattaagacacgagaagtgaacagagaccaaggaagaagttttcctcccaaagaggtgagaagggactatagcaaaggaataactgtaactaagaatgatggaaagaaggacaacaacaagaggaaaactgaaaccaagaaatgcaccttagaaaagttacaggaaacaggaaagcagaatgtggcagtgcaggtaaaatcccagacagaactaagaaagactccagtgtctgaagccagaaaaacacctgtaactcaaaccccaactcaagcaagtaactcccagttcatccccattcatcaccctggagccttccctcctcttcccagcaggccagggtttccgcccccaacatatgttatccccccgcctgtggcattttctatgggctcaggttacaccttcccagctggtgtttctgtcccaggaacctttcttcagcctacagctcactctccagcaggaaaccaggtgcaagctgggaaacagtcccacattccttacagccagcaacggccctctggaccagggccaatgaaccagggacctcaacaatcacagccaccttcccagcaaccccttacatctttaccagctcagccaacagcacagtctacaagccagctgcaggttcaagctctaactcagcaacaacaatcccctacaaaagctgtgccggctttggggaaaagcccgcctcaccactctggattccagcagtatcaacaggcagatgcctccaaacagctgtggaatccccctcaggttcaaggcccattagggaaaattatgcctgtgaaacagccctactaccttcagacccaagaccccataaaactgtttgagccgtcattgcaacctcctgtaatgcagcagcagcctctagaaaaaaaaatgaagccttttcccatggagccatataaccataatccctcagaagtcaaggtcccagaattctactgggattcttcctacagcatggctgataacagatctgtaatggcacagcaagcaaacatagaccgcaggggcaaacggtcaccaggagtcttccgtccagagcaggatcctgtacccagaatgccgtttgaggaccccaagagctcccctctgcttcctccggacctgttaaagagtctggctgccttggaggaagaggaagagctgattttttctaaccctcctgatctttacccggctctgctggggcctctcgcctctcttcctggacgaagcctttttaaatccttattggagaagccctcagagctcatgtcacattcatcctctttcctgtccctcaccggattctctctcaatcaggaaagatacccaaataatagtatgttcaatgaggtatatgggaaaaacctgacatccagctccaaagcagaactcagtccctcaatggccccccaggaaacatctctgtattccctttttgaagggactccgtggtctccatcacttcctgccagttcagatcattcaacaccagccagccagtctcctcattcctctaacccaagcagcctacccagctctcctccaacacacaaccataattctgttccattctccaattttggacccattgggactccagataacagggatagaaggactgcagatcggtggaaaactgataagccagccatgggtgggtttggcattgattatctctcagcaacgtcatcctctgagagcagttggcatcaggccagcactccgagtggcacctggacaggccatggcccttccatggaggattcctctgctgtcctcatggaaagcctaaagtctatctggtccagttccatgatgcatcctggaccttctgctctggagcagctgttaatgcagcagaagcagaaacagcaacggggacaaggcaccatgaaccctccacactgaggccaaagtggcaacctgggaatgaaggctccataaaccatggcatgttgggtttgcaggactggcccacacagtcccctgcaggtggcagccctcttttctgtttctcgctgtcaagagggtgtaagtattccaccagcccgctgagtgtgcacgaaatgttcgcagtgcaacaaaaagaaaaatccatcaggaactctccgtccccccggggccctccggagggagagagagaggaactgctgtttatctcactcagttacttggtatcaccgcctctcaccttctccatcgtgcatgtccccagccacatgggaagtgaaagctgagaa

SEQ ID NO: 182526 - DNA, 3263 bp, Homo sapiens
  Payload ID: 15961
  Gene Symbol: SMG8
  Gene Name: SMG8 nonsense mediated mRNA decay factor
  Uniprot ID: Q8ND04
  ENST ID: ENST00000300917
  CDS Start-End: 43-3018
tttactaacggaccggaaggactctagagaacgctctgcactatggctggtcccgtgagcttgcgagaccttctaatgggagcatcagcctggatgggctctgaaagtcccggagggtcccctactgagggcggagggagcgcggctggcggaccggagcctccatggcgggaggatgagatctgcgttgtgggaatcttcggcaagacggctctacgcctgaattccgagaagttctctcttgtgaatacggtgtgcgaccgacaggtctttcctctctttcgccaccaagatcctggggatccaggacctggaatcagaactgaggctggcgccgtgggtgaggccggtggagccgaggaccctggggctgcagccgggggttcagttcggggaagtggagctgtcgcggaaggtaaccgaactgaggcaggctcccaggactacagccttctgcaggcctactacagtcaggaaagcaaagttctgtatcttctcctcacctccatctgtgacaattcacagcttctccgggcttgtcgggctcttcagagcggggaagctggaggtggactctctttacctcatgcagaagcacacgagttctggaagcatcaagagaagctgcagtgcctcagtctcctttacctattctctgtctgtcatatcttgcttctggtccatcccacttgttcctttgatatcacttatgatcgagtattcagagccctggatgggctgagacagaaggtcctgccgctccttaaaacagccattaaggattgtccagttggcaaagactggaagctaaactgccgaccttgcccacctagactccttttcctctttcaactcaatggagccctcaaggtagaacctcctcggaaccaagacccagctcatccagacaagcccaagaaacattctcccaaaaggaggctgcagcatgccctggaggaccagatctatagaatcttccggaagagtcgtgtcttgactaatcagagcatcaactgcctctttactgtgcctgccaaccaagctttcgtgtacatagtaccgggaagccaggaggaggacccagtaggtatgttgctggaccaacttaggagtcattgtactgtgaaggacccggaatctttgctggtgcctgcacccctttctgggcctaggcgataccaggtgatgaggcagcacagccgacaacaactttcctttcacattgacagcagcagttccagttcttcaggccagctagtggatttcactcttcgggaattcctatggcagcatgtggagctagttctaagcaagaaaggtttcgatgacagtgtgggcaggaacccacagccttcccattttgaacttcctacttatcagaagtggatctcagcagcttcaaaactgtatgaggtggctattgatgggaaagaagaggacttggggtcacccactggagagctaacatctaagattttaagcagtattaaagtcttggaaggatttttggatattgacacaaaattctcagaaaaccgatgccaaaaagctttacccatggcccacagtgcctaccagtcaaatttgcctcataattacacaatgactgtccataagaatcagcttgcccaggctcttcgagtgtacagtcaacatgctagaggtccagcatttcacaaatacgccatgcagttacatgaggactgctacaaattttggagcaatggccatcagctctgtgaggagaggagtttaactgatcaacactgtgtgcacaaatttcactcattacctaaatcaggagaaaaaccagaggctgatagaaatccgcctgtgctatatcacaatagccgagctcgatctactggtgcttgcaactgtggaaggaaacaagcacctcgagatgatccctttgatatcaaagcagccaattatgacttctatcagcttctggaagaaaagtgttgtggaaaattggatcatatcaatttcccagtatttgaaccaagtactccagatcctgctcctgctaaaaatgaatcctctcctgctcctccagattcggatgctgataaacttaaagaaaaagaacctcaaacccaaggagagagcacgagcctgagtttagctttgagtttgggccaatccacagatagcttaggtacctatccagctgatccacaagcaggaggagataatccagaagttcatggtcaagtagaagtgaaaactgagaagaggccaaacttcgttgatcgacaggcatccacagttgagtatctcccaggcatgctacattcaaattgccctaaaggtctcctacccaaattctccagctggtctttggttaaactaggccctgctaagtcttataactttcatacaggtttggaccaacagggctttattccaggaacaaattatcttatgccttgggacattgtcatcaggactagagctgaagatgaaggagacttagacacaaactcttggcctgctccaaataaagctattcctggaaagagaagtgcggttgtaatgggaagaggaagacggcgagatgacatagctcgagcttttgtgggctttgaatatgaagactctcgaggtcggagattcatgtgctctgggcctgacaaagtaatgaaagtaatgggaagtgggccaaaggaatcagctttaaaagccctaaatagtgacatgcccttatatattctgtcatcctctcaaggtagagggctgaaacctcattatgctcaacttatgaggctttttgttgtggttcctgatgctcctttgcagataatactaatgcctcaggttcagccaggcccaccaccatgtccggtattctacccagaaaaacaagaaatcacccttccacctgatggcctttgggttttgagatttccttatgcatatgtgactgagagaggaccttgtttcccccctaaggaaaatgtgcagttaatgagctacaaggtgctccgtggggttcttaaggcagtaacacaataagtgttttccagccagttcaatcctatacttgagctggtttttgtttttggtatttgtggctgtgtttttggtatgtgtttactgtgttttcccaaatccaaaatgtgttttggttacaggagttcagtatttggaaactaatttgttctactttttcattatattgttgatatttattgtaaacgtgactacaactttctaataaagattggttgttctagaaaagaatataaaatacatggatg

SEQ ID NO: 182527 - DNA, 3477 bp, Homo sapiens
  Payload ID: 15961
  Gene Symbol: SMG8
  Gene Name: SMG8 nonsense mediated mRNA decay factor
  Uniprot ID: Q8ND04
  ENST ID: ENST00000543872
  CDS Start-End: 265-3240
cactctgtcgcccaggctggagtgcagcggggtgatctcggctcactgcaacctccacctcctggttcgagcaattctcctgcctcagcctcctgagcagctggaactacagttgaggaaacaaactaggagaggagaagaggaggcggaactcaagtgacgggaaagcaggaactgaagaagcggaggaaggatttcaaaattggacgaaagccggtcggttttactaacggaccggaaggactctagagaacgctctgcactatggctggtcccgtgagcttgcgagaccttctaatgggagcatcagcctggatgggctctgaaagtcccggagggtcccctactgagggcggagggagcgcggctggcggaccggagcctccatggcgggaggatgagatctgcgttgtgggaatcttcggcaagacggctctacgcctgaattccgagaagttctctcttgtgaatacggtgtgcgaccgacaggtctttcctctctttcgccaccaagatcctggggatccaggacctggaatcagaactgaggctggcgccgtgggtgaggccggtggagccgaggaccctggggctgcagccgggggttcagttcggggaagtggagctgtcgcggaaggtaaccgaactgaggcaggctcccaggactacagccttctgcaggcctactacagtcaggaaagcaaagttctgtatcttctcctcacctccatctgtgacaattcacagcttctccgggcttgtcgggctcttcagagcggggaagctggaggtggactctctttacctcatgcagaagcacacgagttctggaagcatcaagagaagctgcagtgcctcagtctcctttacctattctctgtctgtcatatcttgcttctggtccatcccacttgttcctttgatatcacttatgatcgagtattcagagccctggatgggctgagacagaaggtcctgccgctccttaaaacagccattaaggattgtccagttggcaaagactggaagctaaactgccgaccttgcccacctagactccttttcctctttcaactcaatggagccctcaaggtagaacctcctcggaaccaagacccagctcatccagacaagcccaagaaacattctcccaaaaggaggctgcagcatgccctggaggaccagatctatagaatcttccggaagagtcgtgtcttgactaatcagagcatcaactgcctctttactgtgcctgccaaccaagctttcgtgtacatagtaccgggaagccaggaggaggacccagtaggtatgttgctggaccaacttaggagtcattgtactgtgaaggacccggaatctttgctggtgcctgcacccctttctgggcctaggcgataccaggtgatgaggcagcacagccgacaacaactttcctttcacattgacagcagcagttccagttcttcaggccagctagtggatttcactcttcgggaattcctatggcagcatgtggagctagttctaagcaagaaaggtttcgatgacagtgtgggcaggaacccacagccttcccattttgaacttcctacttatcagaagtggatctcagcagcttcaaaactgtatgaggtggctattgatgggaaagaagaggacttggggtcacccactggagagctaacatctaagattttaagcagtattaaagtcttggaaggatttttggatattgacacaaaattctcagaaaaccgatgccaaaaagctttacccatggcccacagtgcctaccagtcaaatttgcctcataattacacaatgactgtccataagaatcagcttgcccaggctcttcgagtgtacagtcaacatgctagaggtccagcatttcacaaatacgccatgcagttacatgaggactgctacaaattttggagcaatggccatcagctctgtgaggagaggagtttaactgatcaacactgtgtgcacaaatttcactcattacctaaatcaggagaaaaaccagaggctgatagaaatccgcctgtgctatatcacaatagccgagctcgatctactggtgcttgcaactgtggaaggaaacaagcacctcgagatgatccctttgatatcaaagcagccaattatgacttctatcagcttctggaagaaaagtgttgtggaaaattggatcatatcaatttcccagtatttgaaccaagtactccagatcctgctcctgctaaaaatgaatcctctcctgctcctccagattcggatgctgataaacttaaagaaaaagaacctcaaacccaaggagagagcacgagcctgagtttagctttgagtttgggccaatccacagatagcttaggtacctatccagctgatccacaagcaggaggagataatccagaagttcatggtcaagtagaagtgaaaactgagaagaggccaaacttcgttgatcgacaggcatccacagttgagtatctcccaggcatgctacattcaaattgccctaaaggtctcctacccaaattctccagctggtctttggttaaactaggccctgctaagtcttataactttcatacaggtttggaccaacagggctttattccaggaacaaattatcttatgccttgggacattgtcatcaggactagagctgaagatgaaggagacttagacacaaactcttggcctgctccaaataaagctattcctggaaagagaagtgcggttgtaatgggaagaggaagacggcgagatgacatagctcgagcttttgtgggctttgaatatgaagactctcgaggtcggagattcatgtgctctgggcctgacaaagtaatgaaagtaatgggaagtgggccaaaggaatcagctttaaaagccctaaatagtgacatgcccttatatattctgtcatcctctcaaggtagagggctgaaacctcattatgctcaacttatgaggctttttgttgtggttcctgatgctcctttgcagataatactaatgcctcaggttcagccaggcccaccaccatgtccggtattctacccagaaaaacaagaaatcacccttccacctgatggcctttgggttttgagatttccttatgcatatgtgactgagagaggaccttgtttcccccctaaggaaaatgtgcagttaatgagctacaaggtgctccgtggggttcttaaggcagtaacacaataagtgttttccagccagttcaatcctatacttgagctggtttttgtttttggtatttgtggctgtgtttttggtatgtgtttactgtgttttcccaaatccaaaatgtgttttggttacaggagttcagtatttggaaactaatttgttctactttttcattatattgttgatatttattgtaaacgtgactacaactttctaataaagattggttgttctagaaaagaatataaaata

SEQ ID NO: 182528 - DNA, 2178 bp, Homo sapiens
  Payload ID: 15961
  Gene Symbol: SMG8
  Gene Name: SMG8 nonsense mediated mRNA decay factor
  Uniprot ID: Q8ND04
  ENST ID: ENST00000578922
  CDS Start-End: 186-1952
tgttttttgtttttgatatctcaattcctacagttgaggaaacaaactaggagaggagaagaggaggcggaactcaagtgacgggaaagcaggaactgaagaagcggaggaaggatttcaaaattggacgaaagccggtcggttttactaacggaccggaaggactctagagaacgctctgcactatggctggtcccgtgagcttgcgagaccttctaatgggagcatcagcctggatgggctctgaaagtcccggagggtcccctactgagggcggagggagcgcggctggcggaccggagcctccatggcgggaggatgagatctgcgttgtgggaatcttcggcaagacggctctacgcctgaattccgagaagttctctcttgtgaatacggtgtgcgaccgacaggtctttcctctctttcgccaccaagatcctggggatccaggacctggaatcagaactgaggctggcgccgtgggtgaggccggtggagccgaggaccctggggctgcagccgggggttcagttcggggaagtggagctgtcgcggaaggtaaccgaactgaggcaggctcccaggactacagccttctgcaggcctactacagtcaggaaagcaaagttctgtatcttctcctcacctccatctgtgacaattcacagcttctccgggcttgtcgggctcttcagagcggggaagctggaggtggactctctttacctcatgcagaagcacacgagttctggaagcatcaagagaagctgcagtgcctcagtctcctttacctattctctgtctgtcatatcttgcttctggtccatcccacttgttcctttgatatcacttatgatcgagtattcagagccctggatgggctgagacagaaggtcctgccgctccttaaaacagccattaaggattgtccagttggcaaagactggaagctaaactgccgaccttgcccacctagactccttttcctctttcaactcaatggagccctcaaggtagaacctcctcggaaccaagacccagctcatccagacaagcccaagaaacattctcccaaaaggaggctgcagcatgccctggaggaccagatctatagaatcttccggaagagtcgtgtcttgactaatcagagcatcaactgcctctttactgtgcctgccaaccaagctttcgtgtacatagtaccgggaagccaggaggaggacccagtaggtatgttgctggaccaacttaggagtcattgtactgtgaaggacccggaatctttgctggtgcctgcacccctttctgggcctaggcgataccaggtgatgaggcagcacagccgacaacaactttcctttcacattgacagcagcagttccagttcttcaggccagctagtggatttcactcttcgggaattcctatggcagcatgtggagctagttctaagcaagaaaggtttcgatgacagtgtgggcaggaacccacagccttcccattttgaacttcctacttatcagaagtggatctcagcagcttcaaaactgtatgaggtggctattgatgggaaagaagaggacttggggtcacccactggagagctaacatctaagattttaagcagtattaaagtcttggaaggatttttggatattgacacaaaattctcagaaaaccgatgccaaaaagctttacccatggcccacagtgcctaccagtcaaatttgcctcataattacacaatgactgtccataagaatcagcttgcccaggctcttcgagtgtacagtcaacatgctagaggtccagcatttcacaaatacgccatgcagttacatgaggactgctacaaattttggagcaatggccatcagctctgtgaggagaggagtttaactgatcaacactgtgtgcacaaatttcactcattacctaaatcaggtagctaaaatttgttcagcattttgaaataaaaactttgagctgtgttttcattcttgttttaagatagtctgttcactatgtattgatattttagaaagagccctacagaaatttaggtgcatcagctatacgttttctctcctgctgtaaaaggaaaatatcagctatgactactttcttattttttttcatttaaaggatacgtcctagtgaattggtaagtgagaatta

SEQ ID NO: 182529 - DNA, 1144 bp, Homo sapiens
  Payload ID: 15961
  Gene Symbol: SMG8
  Gene Name: SMG8 nonsense mediated mRNA decay factor
  ENST ID: ENST00000582469
  CDS Start-End: 1-816
gtggctattgatgggaaagaagaggacttggggtcacccactggagagctaacatctaagattttaagcagtattaaagtcttggaaggatttttggatattgacacaaaattctcagaaaaccgatgccaaaaagctttacccatggcccacagtgcctaccagtcaaatttgcctcataattacacaatgactgtccataagaatcagcttgcccaggctcttcgagtgtacagtcaacatgctagaggtccagcatttcacaaatacgccatgcagttacatgaggactgctacaaattttggagcaatggccatcagctctgtgaggagaggagtttaactgatcaacactgtgtgcacaaatttcactcattacctaaatcaggagaaaaaccagaggctgatagaaatccgcctgtgctatatcacaatagccgagctcgatctactggtgcttgcaactgtggaaggaaacaagcacctcgagatgatccctttgatatcaaagcagccaattatgacttctatcagcttctggaagaaaagtgttgtggaaaattggatcatatcaatttcccagtatttgaaccaagtactccagatcctgctcctgctaaaaatgaatcctctcctgctcctccagattcggatgctgataaacttaaagaaaaagaacctcaaacccaaggagagagcacgagcctgagtttagctttgagtttgggccaatccacagatagcttaggttcagccaggcccaccaccatgtccggtattctacccagaaaaacaagaaatcacccttccacctgatggcctttgggttttgagatttccttatgcatatgtgactgagagaggaccttgtttcccccctaaggaaaatgtgcagttaatgagctacaaggtgctccgtggggttcttaaggcagtaacacaataagtgttttccagccagttcaatcctatacttgagctggtttttgtttttggtatttgtggctgtgtttttggtatgtgtttactgtgttttcccaaatccaaaatgtgttttggttacaggagttcagtatttggaaactaatttgttctactttttcattatattgttgatatttattgtaaacgtgactacaacttt

SEQ ID NO: 182530 - DNA, 583 bp, Homo sapiens
  Payload ID: 15961
  Gene Symbol: SMG8
  Gene Name: SMG8 nonsense mediated mRNA decay factor
  ENST ID: ENST00000580798
  CDS Start-End: 1-97
attttggagcaatggccatcagctctgtgaggagaggagtttaactgatcaacactgtgtgcacaaatttcactcattacctaaatcaggtagctaaaatttgttcagcattttgaaataaaaactttgagctgtgttttcattcttgttttaagatagtctgttcactatgtattgatattttagaaagagccctacagaaatttaggtgcatcagctatacgttttctctcctgctgtaaaaggaaaatatcagctatgactactttcttattttttttcatttaaaggatacgtcctagtgaattggagaaaaaccagaggctgatagaaatccgcctgtgctatatcacaatagccgagctcgatctactggtgcttgcaactgtggaaggaaacaagcacctcgagatgatccctttgatatcaaagcagccaattatgacttctatcagcttctggaagaaaagtgttgtggaaaattggatcatatcaatttcccagtatttgaaccaagtactccagatcctgctcctgctaaaaatgaatcctctcctgctcctccagattcggatgctgataa

SEQ ID NO: 182531 - DNA, 5510 bp, Homo sapiens
  Payload ID: 15962
  Gene Symbol: SMG9
  Gene Name: SMG9 nonsense mediated mRNA decay factor
  Uniprot ID: Q9H0W8
  ENST ID: ENST00000270066
  CDS Start-End: 344-1906
atccacgcacgctcagcccggcgagcgcattcagttctcgagctccagccctcagcgcatgcgcaggacgagtcgcctgagggaactgatctcagctcgggcccgcgttacatcctcctcctcttcttccttcggcccagctttccttaggggctgcaacccggacgccgaggccggtttcggagtggggagtgcccattttctctccttcccacgttcctggcccccagacgccatttgcaggcgggtggcttgggtcagcctccccgcccccacccgactcccgtcacgggagagcgcacaccgcgccccgagaaccaatcagcagccgcgttaggtaaccatgtctgagtctggacacagtcagcctggactctatgggatagagcggcggcgacggtggaaggagcctggctctggtggcccccagaatctctctgggcctggtggtcgggagagggactacattgcaccatgggaaagagagagaagggatgccagcgaagagacaagcacttccgtcatgcagaaaacccccatcatcctctcaaaacctccagcagagcggtcaaaacagccaccacctccaacagcccctgctgccccgcctgctccagcccctctggagaagcccatcgttctcatgaagccacgggaggaggggaaggggcctgtggccgtgacaggtgcctctacccctgagggcaccgccccaccaccccctgcagcccctgcgccacccaagggggagaaggaggggcagagacccacacagcctgtgtaccagatccagaaccggggcatgggcactgccgcaccagcagccatggaccctgtcgtgggtcaggccaaactactgcccccagagcgcatgaagcacagcatcaagttggtggatgaccagatgaattggtgtgacagtgccatcgagtacctgttggatcagactgatgtgttggtggttggtgtcctgggcctccaggggacaggcaagtccatggtcatgtcattgttgtcagccaacactccagaggaggaccagaggacttatgttttccgggcccagagcgctgaaatgaaggaacgagggggcaaccagaccagtggcatcgacttctttattacccaagaacggattgttttcctggacacacagcccatcctgagcccttctatcctagaccatctcatcaataatgaccgcaaactgcctccagagtacaaccttccccacacttacgttgaaatgcagtcactccagattgctgccttccttttcacggtctgccatgtggtgattgttgtccaggactggttcacagacctcagtctctacaggttcctgcagacagcagagatggtgaagccctccaccccatcccccagccacgagtccagcagctcatcgggctccgatgaaggcaccgagtactacccccacctagtcttcttgcagaacaaagctcgccgagaggacttctgtcctcggaagctgcggcagatgcacctgatgattgaccagctcatggcccactcccacctgcgttacaagggaactctgtccatgttacaatgcaatgtcttcccggggcttccacctgacttcctggactctgaggtcaacttattcctggtacccttcatggacagtgaagcagagagtgaaaacccaccaagagcaggacctggttccagcccactcttctccctgctgcctgggtatcgtggccaccccagtttccagtccttggtgagcaagctccggagccaagtgatgtccatggcccggccacagctgtcacacacgatcctcaccgagaagaactggttccactacgctgcccggatctgggatggggtgagaaagtcctctgctctggcagagtacagccgcctgctggcctgaggccaaggagaggaatgtcatgcaggggacctcctgggtccgcagtgtactgcgagggagcacagatgtccatcccccgctggggtggagagcggcagcaggcctgatggatgagggatcgtggcttcccggcccagagacatgaggtgtccagggccaggccccccaccctcagttggggctgttccgggggtgactgtgagcgatcccaccccaaacctgagatggggtagcccgtcctgtgtcctccacagggacaagcagtgggaggagtctgaatggtcaccaggaagcccgggctccatcttgacctcctttttcagggacaggagcaacaggcccctcttccctgactctaagcccttccctgtaaggtgaggcagggtctggagagctctttattggaacagatctggtggttcaaataaacacagtcatgcaagcctgttcttatgttccacttactcctctacccaccatgcagctctgggaagcaggacaaattggacacccagcccttgcgggcagatggagatcagtctctgctaagaagtccctagaaggggttattctgtttcctggggtggcatcaagcctcccctgtgtatgttttggatgggaaaatacactggtgcagctgagtacagcaactaccctcgtgtcttctgctctcacttaaagacagttacctgcctttgggttaaatgcccagttaaatacagtgcctaggctgggcatggtggctcacgtctataatcctagcactttgggaggccgaggcaggcggatcacttgagatcaggagttcgagaccagcctggccaacatggtgagaccctgtctctactaaaaatacaaaaaaaaattagctgggcgtggtggcgcacgcctgtaatcctagctacttgggaggctgaggtgggagaactgcttgaacccgggaggcagaggttgcagtgagccaagatcacgccactgcactctccagcttgggcaacagagcgagactccgtctcaaaaaaaaaaaaaaagcctacttttgacttaagaaacagaacttgtccttaaatgtagtaagtacttacccttaatccaaataccatgcctcacccgtacagacagtgccttctgttggttaaatacagtggctttcctctcgtaaacctcatctactcttgcttagaaatggcaaccctcacctttaatgtaaatccagaacctaccctcagttaaatccactctgcgatttggtacagtaccaaccctcatctgctcagttaaatacagtacatgatcttagtttgaggtttcccaaagtatgtctccaaattggtctcgccaccccaaattaatccatcgttcagtaaagcagtcagctccagtccagctggctgagtctgttcatccattgccctcccccaccccctgccgcccgtggcacatatttgtctccctggtttcctcctgctttcaagcatcccatacagccctggtgtttcataccatggggatccagggccttgtgagaaacaactgaagtgagggggggcggggggtcagtgaagaaagcactcagcagggccagagaaggtcaggccagaagtggatagaatgccagtctctacagagggctgaggcctgggagacaggaggcccagcacaggctctggcacagccacttcctgaccgactgtagtaggcaaggagcctcccctctctggccattattccaacatttaagatcatcctcgaggcccttcagagctgtgacattcactgcccttttaccgaaatgcttctaaatcctttgccccactgtcgtgatctctacagaaccctcctgaccatcctctccagctagataacccagctcttccctgccttgtcaaaatgtctgccccaagtctcatccccacccctgcttccccagggggtcttcctgctggttgatttgggggtttgccagagtaggaaaggtggtgggggcaacggccagagaaagatgggagacccaaggcaagacggcaccagacagcatgcaactcagtccaggagagttggagcttcagtttcttccatcccagcccctttcagcacaaggctggggacagagagaactgtgccctcccagccctaacctaccacctcctgctggcccagctcagggctgagattgttgattggattcacctgtgatcttgtggtcagtgttgccaaggaaggtctgaatcagcacactcttggtgtccctggctgccaaatccaggggcgtgtgaagcatccggtagatggtggtgaaggaggtgctgcaggtgaccaggatgcccggatgggtgaaatgaggcactctggaaatccggcctagcgtttccaccaccaccaccgtggtgatctggtgaccttggtccaaaggccctgtcccacctccagggttttgtgcaggggctggctcgttgaggcagtttgacagaggagtcaaactggcagtagccttctgaacagtgggtaagtatgtaccggtcacccgccaccccctttacatccagcagaggactcaggctgatgctgccagcaggccactgtggacaccagctagatatactgctgcagggaggccttctgctctaggatgggctgcaagatgggcctggccaccaggaatgcctgctgcttgtggctctccagtcccttcatcattcccagcaggtggaactcacgcttttcaattcagacacaggaatacattggtatccttctcaccctccactgcaggaaacatgagcaccgctcaatcagcttctacactggagcaggccatgttgtgctggcagctgcctgggctcaagcgcctgtcatgagcgcagcacttggcctaagaatgtcagccctgcagccaggctgcctatgttcagatcccagccttgccatctaccacctgtgtggcattggacaagttgctaaagcttgctgggcatctgttttgtctgcaaaataaggtgatgattgtacctacctcctaggggtgttgtggtgattaattgagttcataatggtgtctgttttagtcggttcttgcattgctgtaaggaaatacctgagactgggtaatttataaagaaaaggggtttaattggctcagagttctgcaggctgaaccagaagcatggtgctggcatctgctcggcttctggggaggcctcaggaaacttacaatcatggcggaaggtgaactgggagcaggtacttcacatgcccagagcaggagcaagagggggcaggtggcacacactttgaaaccacgagctcttacaacagattcactattgtgaggacagtaccaaggggctggcgctgaaccatgagaaaccacccccatgatgccgtccctcccgccaggccccacctccaacagtggtgactacaaactacaagttgacatgagatctggtggggacacagatccaaaccatatcagtgcctgacctatgctgagcctcaataaatgttaaatgccaccatcatccacaggtgccaggtctgcattgggcacatagcattttgcaatcctctaactttgcaaataaatgagccaatacatactctt

SEQ ID NO: 182532 - DNA, 438 bp, Homo sapiens
  Payload ID: 15962
  Gene Symbol: SMG9
  Gene Name: SMG9 nonsense mediated mRNA decay factor
  ENST ID: ENST00000599804
  CDS Start-End: 78-438
gcgcgaggctagcgcaccggcggcgggcggggcgctccggcaggccccgcccccgccttggccattgaaaggtaaccatgtctgagtctggacacagtcagcctggactctatgggatagagcggcggcgacggtggaaggagcctggctctggtggcccccagaatctctctgggcctggtggtcgggagagggactacattgcaccatgggaaagagagagaagggatgccagcgaagagacaagcacttccgtcatgcagaaaacccccatcatcctctcaaaacctccagcagagcggtcaaaacagccaccacctccaacagcccctgctgccccgcctgctccagcccctctggagaagcccatcgttctcatgaagccacgggaggaggggaaggggcctgtggccgtgacaggtgcctctacccctgagg

SEQ ID NO: 182533 - DNA, 550 bp, Homo sapiens
  Payload ID: 15962
  Gene Symbol: SMG9
  Gene Name: SMG9 nonsense mediated mRNA decay factor
  ENST ID: ENST00000601925
  CDS Start-End: 105-550
gctagcgcaccggcggcgggcggggcgctccggcaggccccgcccccgccttggccattgaaaggtcgctgggacgtccggcgggggtgcggcactgagtaaccatgtctgagtctggacacagtcagcctggactctatgggatagagcggcggcgacggtggaaggagcctggctctggtggcccccagaatctctctgggcctggtggtcgggagagggactacattgcaccatgggaaagagagagaagggatgccagcgaagagacaagcacttccgtcatgcagaaaacccccatcatcctctcaaaacctccagcagagcggtcaaaacagccaccacctccaacagcccctgctgccccgcctgctccagcccctctggagaagcccatcgttctcatgaagccacgggaggaggggaaggggcctgtggccgtgacaggtgcctctacccctgagggcaccgccccaccaccccctgcagcccctgcgccacccaagggggagaaggaggggcagagacccacacagcctgtgtaccagat

SEQ ID NO: 182534 - DNA, 650 bp, Homo sapiens
  Payload ID: 15962
  Gene Symbol: SMG9
  Gene Name: SMG9 nonsense mediated mRNA decay factor
  ENST ID: ENST00000602222
  CDS Start-End: 100-650
gcgcgaggctagcgcaccggcggcgggcggggcgctccggcaggccccgcccccgccttggccattgaaaggtcgctgggacgtccggcgggggtaaccatgtctgagtctggacacagtcagcctggactctatgggatagagcggcggcgacggtggaaggagcctggctctggtggcccccagaatctctctgggcctggtggtcgggagagggactacattgcaccatgggaaagagagagaagggatgccagcgaagagacaagcacttccgtcatgcagaaaacccccatcatcctctcaaaacctccagcagagcggtcaaaacagccaccacctccaacagcccctgctgccccgcctgctccagcccctctggagaagcccatcgttctcatgaagccacgggaggaggggaaggggcctgtggccgtgacaggtgcctctacccctgagggcaccgccccaccaccccctgcagcccctgcgccacccaagggggagaaggaggggcagagacccacacagcctgtgtaccagatccagaaccggggcatgggcactgccgcaccagcagccatggaccctgtcgtgggtcaggccaaactactgcccccagagcgcatgaagcacagcatcaagttggt

SEQ ID NO: 182535 - DNA, 576 bp, Homo sapiens
  Payload ID: 15962
  Gene Symbol: SMG9
  Gene Name: SMG9 nonsense mediated mRNA decay factor
  ENST ID: ENST00000596714
  CDS Start-End: 231-576
gctccggcaggccccgcccccgccttggccattgaaaggtcgctgggacgtccggcgggggtgcggcactgagtagggggccggcgaccgtcaattcgatactgggttggcaggaatgggggcgggggacggaaataacgtgtaaatgagaaacttatgctctgcgagatccaagtacagcctgcaaactgcccgtcaagtactggggaggccgccccaataacgtaaccatgtctgagtctggacacagtcagcctggactctatgggatagagcggcggcgacggtggaaggagcctggctctggtggcccccagaatctctctgggcctggtggtcgggagagggactacattgcaccatgggaaagagagagaagggatgccagcgaagagacaagcacttccgtcatgcagaaaacccccatcatcctctcaaaacctccagcagagcggtcaaaacagccaccacctccaacagcccctgctgccccgcctgctccagcccctctggagaagcccatcgttctcatgaagccacgggaggaggggaaggggcctgtggccgtgacaggtg

SEQ ID NO: 182536 - DNA, 2387 bp, Homo sapiens
  Payload ID: 15962
  Gene Symbol: SMG9
  Gene Name: SMG9 nonsense mediated mRNA decay factor
  Uniprot ID: Q9H0W8
  ENST ID: ENST00000601170
  CDS Start-End: 316-1803
attcagttctcgagctccagccctcagcgcatgcgcaggacgagtcgcctgagggaactgatctcagctcgggcccgcgttacatcctcctcctcttcttccttcggcccagctttccttaggggctgcaacccggacgccgaggccggtttcggagtggggagtgcccattttctctccttcccacgttcctggcccccagacgccatttgcaggcgggtggcttgggtcagcctccccgcccccacccgactcccgtcacgggagagcgcacaccgcgccccgagaaccaatcagcagccgcgttaggtaaccatgtctgagtctggacacagtcagcctggactctatgggatagagcggcggcgacggtggaaggagcctggctctggtggcccccagaatctctctgggcctggtggtcgggagagggactacattgcaccatgggaaagagagagaagggatgccagcgaagagacaagcacttccgtcatgcagaaaacccccatcatcctctcaaaacctccagcagagcggtcaaaacagccaccacctccaacagcccctgctgccccgcctgctccagcccctctggagaagcccatcgttctcatgaagccacgggaggaggggaaggggcctgtggccgtgacaggtgcctctacccctgagggcaccgccccaccaccccctgcagcccctgcgccacccaagggggagaaggaggggcagagacccacacagcctgtgtaccagatccagaaccggggcatgggcactgccgcaccagcagccatggaccctgtcgtgggtcaggccaaactactgcccccagagcgcatgaagcacagcatcaagttggtggatgaccagatgaattggtgtgacagtgccatcgagtacctgttggatcagactgatgtgttggtggttggtgtcctgggcctccaggggacaggcaagtccatggtcatgtcattgttgtcagccaacactccagaggaggaccagaggacttatgttttccgggcccagagcgctgaaatgaaggaacgagggggcaaccagaccagtggcatcgacttctttattacccaagaacggattgttttcctggacacacagcccatcctgagcccttctatcctagaccatctcatcaataatgaccgcaaactgcctccagagtacaaccttccccacacttacgttgaaatgcagtcactccagattgctgccttccttttcacggtctgccatgtggtgattgttgtccaggactggttcacagacctcagtctctacaggttcctgcagacagcagagatggtgaagccctccaccccatcccccagccacgagtccagcagctcatcgggctccgatgaaggcaccgagtactacccccacctagtcttcttgcagaacaaagctcgccgagaggacttctgtcctcggaagctgcggcagatgcacctgatgattgaccagctcatggcccactcccacctgcgttacaagggaactctgtccatgttacaatgcaatgtcttcccggggcttccacctgacttcctggactctgaggtcaacttattcctggtacccttcatggacagtgaagcagagagtgaaaacccaccaagagcaggacctggttccagcccactcttctccctgctgcctgggtatcgtggccaccccagtttccagtccttggtgagcaagctccggagccaagtgatgtccatggcccggccacagctgtcacacacgatcctcaccgagaagaactggtaagagctctttgcagagggggtcaatttgaggcaccccaccctggtgtagagagaagggggcgtcccttagatcggcatgaccttgtgaagcccctcctctccagatcccaggttccttttctggaacagtgatgattgctactgtcttgtaagcatctcacccatgtggcaacatgctgtttcctgtgactttgaatcctcctaatcagccagcatcatgtaggtccttgtcaccagttttcctggtggggaaatttaggctcggggaaaagtgttacatagcaaggccacacatctgtggctaggagtcatttgattgctaggagtaggaccagtgaccagatttagcttaaggaagatttattccagggacctgatcacagaaagcagggccctgcagcagatgggaaccaggaagccatcagggtctcattcttcacacttctgcatttgtcttgtttcctgcctctggctttctctccctgctttcacttggcccggcactagctctgtggcccctactttacattacttctttgtccagagctctcagcatatgagtccaggtcttcctcatcttacttc

SEQ ID NO: 182537 - DNA, 1077 bp, Homo sapiens
  Payload ID: 15962
  Gene Symbol: SMG9
  Gene Name: SMG9 nonsense mediated mRNA decay factor
  ENST ID: ENST00000597598
  CDS Start-End: 1-473
ctgcgccacccaagggggagaaggaggggcagagacccacacagcctgtgtaccagatccagaaccggggcatgggcactgccgcaccagcagccatggaccctgtcgtgggtcaggccaaactactgcccccagagcgcatgaagcacagcatcaagttggtggatgaccagatgaattggtgtgacagtgccatcgagtacctgttggatcagactgatgtgttggtggttggtgtcctgggcctccaggggacaggcaagtccatggtcatgtcattgttgtcagccaacactccagaggaggaccagaggacttatgttttccgggcccagagcgctgaaatgaaggaacgagggggcaaccagaccagtggcatcgacttctttattacccaagaacggattgttttcctggacacacaggtgccagccccgcctgcctttgccccaccctgccacatcctgcattgagcctcttcctggaatgtgattaagccagaaccctgcgtggattccatgtgcttccagtcaagccatggacatactggctgccctggggcaaattgtgtcttttcttggcccttagtctcttgtcacttttgcccccatctcattcgccttctacacagtagcctaaaggatttctagtatagtgctgaaaagtgtgggccctggagaatgtgtgttctgatcctgtctgttagttcttaccagctgggtgactttcagttttaaactcccttaaaccacagctctttatctgtaaatagggatggtaactgtacttagcctcttaggagtttcaaggattcagtggaacaatccaggcaaagtgcttggccaggacctggcacaagcccatcctgagcccttctatcctagaccatctcatcaataatgaccgcaaactgcctccagagtacaaccttccccacacttacgttgaaatgcagtcactccagattgctgccttccttttcacggtctgccatgtggtgattgttgtccaggactggttcacagacctcagtctctacaggttcctgcagacagcagagatggtgaagccctccac

SEQ ID NO: 182538 - DNA, 697 bp, Homo sapiens
  Payload ID: 15962
  Gene Symbol: SMG9
  Gene Name: SMG9 nonsense mediated mRNA decay factor
  ENST ID: ENST00000597586
  CDS Start-End: 230-697
ccggcaggccccgcccccgccttggccattgaaaggtcgctgggacgtccggcgggggtgcggcactgagtagggggccggcgaccgtcaattcgatactgggttggcaggaatgggggcgggggacggaaataacgtgtaaatgagaaacttatgctctgcgagatccaagtacagcctgcaaactgcccgtcaagtactggggaggccgccccaataacgtgtaaccatgtctgagtctggacacagtcagcctggactctatgggatagagcggcggcgacggtggaaggagcctggctctggtggcccccagaatctctctgggcctggtggtcgggagagggactacattgcaccatgggaaagagagagaagggatgccagcgaagagacaagcacttccgtcatgcagaaaacccccatcatcctctcaaaacctccagcagagcggtcaaaacagccaccacctccaacagcccctgctgccccgcctgctccagcccctctggagaagcccatcgttctcatgaagccacgggaggaggggaaggggcctgtggccgtgacaggtgcctctacccctgagggcaccgccccaccaccccctgcagcccctgcgccacccaagggggagaaggaggggcagagacccacacagcctgtgtaccagatccagaaccggggcatgggcact

SEQ ID NO: 182539 - DNA, 8279 bp, Homo sapiens
  Payload ID: 15963
  Gene Symbol: SMCR8
  Gene Name: Smith-Magenis syndrome chromosome region, candidate 8
  Uniprot ID: Q8TEV9
  ENST ID: ENST00000406438
  CDS Start-End: 481-3294
cggcgccgcggtagcaggatccgggttgtggcgtcctaggagccgcgacggtttctgccctcgggcagtgaggggcagcagcgcttggctgacccctgcggcgtcccgtagcctcgcgttaagccttgttcagagcgggggcttttgctgtcgcagtgggttccggagagtgcaggtgatttcgcagcaggtttcttgtgctggccgcgctcgccggacgaagaagagaagggcagttgggcctgcggccttggcgttcatgaggcctcagagagctccggaggagctacaactgtgagggggctgctagagttcttctcctcgggtgtgtgagaagcagcctaggaccccgggttcggggagtcgcaaagaaggccgtaagggcttcacttccttctccggaggcctgccttctgcgcgtcgattaacaccgcattctttcccacttcctctcaatgttttcttcatatatctggaaatatgatcagcgcccctgacgtagtggccttcaccaaagaggaagagtatgaagaagagccttacaatgagccggccctgcctgaggagtactcggtgccgctcttccccttcgccagtcagggtgctaacccctggtcaaaactgtccggggccaagttttcgagggacttcattcttatttccgagttctctgagcaggtgggaccccaacccttactgaccatccccaatgacaccaaagtttttggcacttttgatctcaattacttctccctgcgtatcatgtctgtggattaccaggcttccttcgtgggccatcctcctggatctgcctaccccaagctgaacttcgtggaggactccaaggtggtgctgggagattctaaggagggcgcctttgcatacgtgcaccaccttaccctatacgacctggaggcccgtggcttcgtgaggccgttttgcatggcttatatctctgcagaccagcataaaatcatgcagcagttccaggagctttcagccgaattttccagagcttctgagtgcttgaagactggcaacaggaaggcatttgctggggaacttgaaaaaaagctgaaagacttggattacaccaggacagtgctacacacagaaacggagatccagaagaaagccaacgacaaaggcttttactcatctcaggcaattgagaaagccaatgaactggccagtgtggagaagtccatcattgaacatcaagacctgctgaagcagatccgctcataccctcatcggaagttgaaggggcatgatttgtgtcctggtgagatggagcacatccaggatcaggccagccaggcatccactacctctaaccctgatgagtctgccgacacagacctttacacctgcagaccagcctacaccccaaaacttatcaaagcaaagtccaccaagtgttttgacaagaagttgaagaccttggaggagctctgtgacactgaatatttcacccagaccctggctcagctcagccacattgaacacatgttcagaggagacctgtgttacctcctgaccagtcagattgatagagcacttctaaaacaacagcatataacaaactttctctttgaagactttgtggaggtcgatgacaggatggtggagaaacaagaaagcataccctctaagcccagtcaagacaggccgccttccagttctctagaagaatgcccaattcctaaagtgttaattagtgttggttcttacaagtccagtgtggagtctgtgttgatcaagatggagcaggaactgggagatgaggagtacaaggaagtggaagtgactgagttgagcagtttcgacccccaggaaaacttggactacctggatatggatatgaaagggagtatcagcagtggtgaaagtattgaagttttgggcacggagaaatccacctccgtgctttctaaatctgacagccaggcaagcctcacagtaccattgagcccccaggtggtccggagcaaagcagtcagccacaggaccatcagcgaggacagtattgaagtcctcagtacctgcccctctgaggccctcatccctgatgactttaaggccagctacccaagtgccattaatgaagaagaatcatatccagatggcaatgaaggagccatccgcttccaggcaagcatcagtcctccagaactgggtgagacagaggaaggcagcatagaaaacaccccatcacaaatagactcctcctgctgtattgggaaggagagcgatggtcagttggtgctgccctccactccagcccacacacactctgacgaggatggggtggtgagcagccccccacagcgccacaggcagaaggaccaggggttccgtgtagacttttcagtggaaaatgccaacccttcttcccgagacaacagttgtgaagggtttcccgcttatgagctggacccgagccacctgctggctagccgggacatcagtaagaccagcctggacaactactcagacaccaccagctacgtgagcagtgtagcgtccaccagctcagacaggatcccctctgcttatcctgctggcctgtcttccgataggcataaaaagagggctggccagaacgccttaaaattcatccgccagtacccctttgcccacccagccatctactccctgctcagtgggaggacacttgtggtcctgggggaagatgaggccatagtcaggaaactcgtgactgcactggctatctttgtccccagctatggctgctacgctaagcccgtgaaacattgggcctcctcccctttgcacattatggattttcagaagtggaagcttattggcttgcagagagtggcctcccctgccggtgccggtaccctccatgccctgagccgctacagccgctacacgagcatcctggaccttgacaacaaaaccctgcgctgccccctttacagaggcaccctggtgccccgcctggcagaccaccgcacacagatcaagcggggcagcacctactacctgcatgtccagagcatgctcacccagctctgctccaaggccttcctctacaccttctgccaccacctgcacctgcctacccacgacaaggagacagaggagctggtagccagccgccagatgagcttcctaaagctgaccctgggtctggtgaatgaggatgttagggtggtccagtacctggctgagctgctgaagctgcactacatgcaggaatctccagggaccagccaccccatgctcaggtttgactatgtccccagctttttgtataaaatctgaggtcggtcccagacactgtgaccaagacctgtgactcagggtatggggaggggaggggttggcatgaccaaacagttgcctgagctggactgtttaagtttctggtgtctggcagcatggttcccacgtggctcctagtagtttttaagttggacatgggcagaagtggagcctggctccctctaaaggcgtctggagggatggtgacagctacatttggctccctggtgaagagtggcccctggatatggagggggccttggttttctgaggactggcagccagggcagaagggaagccaccagtcccttggtggggcagggtgagggcaggaaggccaaagcctgatgggaggagcacactggctgtattcagcattgccggacacttgagtggcaaaatgaacgagggtgacagccaggtaactgttgtggtttggtggaaaacaggagggcagaacacccatcgcctccttcagacccagatgcagccctttatttgcttcctggagcccactgtcctaggggaggccctggaccagccagtgggggtgagaaaggctgccaccctctgggtcgtgggaaacatgcgaccttggcctcagggccacagagcgtgagcagcaccctgtccgctgtcctcgccacctttacctgggagagaagtgcctgtgagcgggccttgggactcactccccatactctttcaccaggaacgagcagagtgttcactagtcctagtgtgaagcgggcacaagtgaccaaagccaatggtgaggaccaccttgggggctggagagcacagcaggcagagcagggctgaggcgccatgaggccatcaccaccatgcaagggaggagcagccagcagctctcctgggtggcccactggctcctgccggccagagcgcatgagcactgaccttcctcgtggggaaggtctgcagacccgtgtgaacatggcagaggccacactccagctcccacccacataaacctttgcaaccacttcactacctctcactgggtctcgtgggcttgggacagcaacggttctgtttagtcagctggtgcaggtggttggcccagccgatgagaactcaaatagcacggatttcctggatgagctaccacgtggcgctcttcaggttctgcctctgggaggctgtgtgcacctcagtcaccacagctcacggccgtccccagttgagtcccccttctgaggacaagtttgaaactgggaaggagacaccccctggttccgccagcacctatcccactgatagtgatcccctggcctccccgagcctccttaggcaatggccactggtttgtagacagagagtttcttgcagccttgaaaattttattccctaagtggggacagctctggtattactgcttctttaatttgttccacaaaaattatgctgaaatggacctgaatcagccctgggtgtgcttctgttggcgcctgctgctgaggcccggcctgcccatcggcctgtagtacgccatcgaggtcatcatggagccagccagcttctcttctcatcaaggaggcagagacccctggtggaagccaagagtgaccgaagagggcttgcatcacgtcactccagtggttccctccttgtccaagtcctcgttttaagggcatggcccgttggctccagccgttggcttctgttcagggtccttgctcccatcagaggtgtttgattttgctcctggggctgcgatggagaaccttttgtggcagatggtgctgcctacatctcattggttctctgtacctgtgcccgttgcgcatgttcacagacaggagagtcgccagcaataccttggcagcctttaaatgtgaaacgtctgttacttgcgctggaggcagaggctgtgcagggagcctgcttctaatcgtgggctcccttatctgttacggttccctcccctcctgttctagatgctgattcgttttctcactggctggttaattgctgtctacttaggcctccaaggccataactgtgcaacattttatctgagaaggaaggaaggtcagaaagtgatcactggcaccaccactgtggcattcctgtcacaccaacacagaaattcacagctcatactgttctcacctgggaaacttgggaagggctgatgagtttggggcagatcctgaattgcagccacacttggccttctagaagctgaagttgtgccctcaagtggtcctaagtagaagtccacttgaggtatttgctggcacacaccctcaagggtggttcagaaggtcctgaaacctaaggcaaaaggctgctggggcatgaacagaacagaccgtctcaggggcagccatgtaagtggcaagcagggctggtctccctcaaggtggttcttcattaagtaaagatggcttcgtgactagtgtttagctcccagatttatatttgggttaaaaactaacttttcaatgtggcagtttcaaaggattacttgatgcaaagtatgtttcctttcaaagggatcttgacgtggtaccaggactgagtcatgatttgggcagaggcagttaacactgggaagccctgcccctccctatgcccccttcactccggggaactgaaacctactctgagtctcacatctctaaacctcagtgctgagacctatgcagtgggactaatctcatcaagaattttcagttgaggccgggcgcagtggctcacgcctgtaatcccaacactttgggaggccgaggtgggcggatcacctgaggtcaggagttggagaccagcctggccaacatggtgaaaccccatctctactaaaaatacaaagaaagttagccaggtctggtggtgcgtgcctgtaatcccacttactcgggaggctgaggcaggagaatcacttgaacccaggaggcagaggttacagtgagccgagatcgcgccactgcactccaccctgggcaacaagagcgaaaactgtctcaaaaaaaaaaaatttttcatttgaggtattcttccagtagaaggttagtaagtttttaatgaaaccattaaaaattacacttcccagaaaatagatgacatcagtgccccttgctactttctcagtcctcactattgctttgagggcccaggtactgaaactggttgtcttgagttttgtgtcagctttttctccagtccattatccccctcccttgcttctgaagcagtctaggttaaactagccaggcaggtagttgtggactggtgattttcaaaagccccactttagagatcaggccacagctttttatatcgcacaggacacatcagcctgagctgctgcctcatgcctgtttccccaggaacctcactcctttggtagaaccttgggattttagaaattgtggcttttccataactcatttactccaacagttgaagttacacacattgctcccaaatttggaaatagaccacagtaccttacctttcattccccatctggcctttaccttctttgcttcagtggttgaaaacagttgccatattcaaagtatagtagatttcaacctcacacaaatgacaagtcccattttacaatcctaggaaggcccaccaatttcatttcacgcgccagggcggctgcagttggaggccgagggcagccctctgctcactgaatgtcttgcatgtgctgactgctgcccgcagtgctgaacatgccccaccgcccaggcccagcactgcttgttgggtcagcatctagtgctgctgtcacatctttgtctgcacagccagtaggattgcctcagccagggggtttatcagaaggtgtgcaaggcctttgggggaactgagcccctatagtgggcagtctcctttaccttcccacctccctgaaaagcacagaagacagtgccttggtttgtgttttgaagcaaacaagtcagctttctggctttgccccaaaactgtgatggaacataataaaactggagatatggtttttaacactgcaaaaaggaaaaagcatcaagtttctacttctggctggaaagcaaaaccaatctcagctgacaaggctgggcaaactaagttttcctgagcccattttcctttgagccctgacctagcctggccttacctcattaaggtttggttaaagcagtggaaaggaggaggaggcaggggtggatgggggtgtggggaggggatgagcactctgcagccgattaatctgttggtaggggcccagcttcttgggagtgcttattcagcccaagagtggaggctgtttacagcgagccctggagatggcagcttgtctccagctggggaggggtcaggcccctaaattgaagaccactttggtagcagaactgtagggactggtgagtcaactcacagattctgcagcagctgctccacccacaataaagcaaacgccgacaggctagaccccagattgcaggggctgccacctacaaggtgggaccacaggctgcctcaccgggattgtctgccactaaatagctggagtcacagattgagataaatgccaccttcaaggttgcagtgaaaagcataatcctatgtgatgaatttatatgtgttattttttaaaaagctattttattactgcatgttcccgtcccgtcttgtgaatgtgagtccccgccaccacgtgaggtgcagtcgttgcagcggctggtgcaggagtgcagctggcgcgtgtgtgatagcatctcgtaggtgttgctgcacaagagttaaccagagtcaatgccaaacacatagtatgagaagtgtactttttaagaaattaatttatttgagttcaaatatttttgaaatataaaaattggttgtattttttaaagctataattcttgtagacattctgtggttaaaaatttgattgtgcttattaaaaatggtcatctatgttttgcacttcagctacgtgaaaataaaatttctttgggaaggtg

SEQ ID NO: 182540 - DNA, 3130 bp, Homo sapiens
  Payload ID: 15964
  Gene Symbol: SMTN
  Gene Name: smoothelin
  Uniprot ID: P53814
  ENST ID: ENST00000347557
  CDS Start-End: 219-2972
cagaatccaggggacggttgctgagcgggcctgggacagcgggtcgcggcacctccggcctgcgcgtgtctaatccgtctgtcgggtcccgaaagagctaagccgagcctgcgccggacgggtgggctggactgagagaattctctgagctggtgacaggtgccacaggcactggggatctcaccagaaaggaaccgacggagctaggggccagcgagatggcggacgaggccttagctgggctggatgagggagcccttcggaagctgctggaggtcacagcagatctggcagagcggcggcgcatccgctcagccatccgggaactgcagcggcaggagctggagcgcgaggaggaggccctggcatccaagcgtttccgtgccgagcggcaggacaacaaggagaactggctgcactctcagcagcgggaagctgagcagcgggctgccctggcacggctggcagggcagctggagtccatgaacgatgtggaggaattgactgcactgttgcgaagcgctggtgagtatgaggagcgcaagctgatccgagctgccatccgccgtgtacgggctcaggagattgaggctgccaccttggctgggaggttgtacagcgggcgtcccaacagtggctcaagagaggacagcaaggggctagcggcacacaggctggaacagtgtgaggtgccagagcgagaggaacaggaacagcaggcagaggtttcaaagccaacccccacccctgaaggcaccagccaggatgtgaccacagtgacactcctgctgcgagccccacctgggagcacatccagctcacctgcctcacccagcagttcacccacccctgcctctcctgagcctccattggagcctgccgaggcccagtgccttacagctgaggttccaggcagcccagagccaccccccagcccacccaagaccaccagccctgagcctcaggagtctccaacgctccccagcactgagggccaggtggtcaacaagcttctgtctggccccaaagagacccctgctgcccagagccccaccagaggcccctctgacaccaagagagcagacgtggctggaccccgaccctgccaacgctccctgtcggtgctcagcccccgccaaccagcccagaaccgagagtccaccccccttgccagcggaccttcctcattccagcgggctggctctgtgcgggatcgtgtccacaagttcacatctgattctcctatggctgctaggctccaggatggcacaccccaggctgccctaagtcccctgacccccgcaaggctcctgggcccctccctcaccagcaccacccctgcctcctcctccagcggctcctcctctcggggccccagtgatacctcctcccggttcagcaaggagcaacgaggagtagcccagcccctggcccagcttcgaagctgcccccaggaggagggccccagggggcggggcttggctgctaggccccttgaaaacagagcaggggggcctgtggcacgttcagaggagcctggtgccccgctgcccgtggccgtcggcactgccgagccagggggcagtatgaagaccacattcaccatcgagatcaaggacggccgtggccaggcctccacaggccgggtgctgctgcccacaggcaaccagagggcagaactgacactggggctgcgggcgcccccgaccctactcagcaccagtagtgggggcaagagcaccatcacccgtgtcaacagccctgggaccctggctcggctgggcagtgtcactcatgtcaccagcttcagccatgccccccccagtagccgaggaggctgcagcatcaagatggaagcagagccagcagagcctctcgctgcagcagtggaagcggccaatggggctgagcagacccgagtgaacaaagcaccagaagggcggagccctctgagcgctgaggagctgatgactattgaggatgaaggagtcttggacaagatgctggatcagagcacggactttgaagagcggaagctcatccgggctgcacttcgtgagctccgacaaaggaagagagaccagcgggacaaggagcgggaacggcggctgcaggaggcacggggccggccaggggaggggcgcggcaacacagccactgagaccaccacgaggcacagccagcgggcagctgatggctctgctgtcagcactgttaccaagactgagcggctcgtccactccaatgatggcacacggacggcccgcaccaccacagtggagtcgagtttcgtgaggcgctcggagaatggcagtggcagcaccatgatgcaaaccaagaccttctcctcttcctcctcatccaagaagatgggcagcatcttcgaccgcgaggaccaggccagcccacgggccggcagcctggcggcgctcgagaaacggcaggccgagaagaagaaagagctgatgaaggcgcagagtctgcccaagacctcagcctcccaggcgcgcaaggccatgattgagaagctggagaaggagggcgcggccggcagccctggcggaccccgcgcagccgtgcagcgatccaccagcttcggggtccccaacgccaacagcatcaagcagatgctgctggactggtgtcgagccaagactcgcggctacgagcacgtcgacatccagaacttctcctccagctggagtgatgggatggccttctgtgccctggtgcacaacttcttccctgaggccttcgactatgggcagcttagccctcagaaccgacgccagaacttcgaggtggccttctcatctgcggagatgctggtggactgtgtgcccctggtggaggtggacgacatgatgatcatgggcaagaagcctgaccccaagtgtgtcttcacctatgtgcagtcgctctacaaccacctgcgacgccacgaactgcgcctgcgcggcaagaatgtctagcctgcccgcccgcatggccagccagtggcaagctgccgcccccactctccgggcaccgtctcctgcctgtgcgtccgcccaccgctgccctgtctgttgcgacaccctcccccccacatacacacgcagcgttttgataaattattggttttcaacga

SEQ ID NO: 182541 - DNA, 3295 bp, Homo sapiens
  Payload ID: 15964
  Gene Symbol: SMTN
  Gene Name: smoothelin
  Uniprot ID: P53814
  ENST ID: ENST00000333137
  CDS Start-End: 219-2966
cagaatccaggggacggttgctgagcgggcctgggacagcgggtcgcggcacctccggcctgcgcgtgtctaatccgtctgtcgggtcccgaaagagctaagccgagcctgcgccggacgggtgggctggactgagagaattctctgagctggtgacaggtgccacaggcactggggatctcaccagaaaggaaccgacggagctaggggccagcgagatggcggacgaggccttagctgggctggatgagggagcccttcggaagctgctggaggtcacagcagatctggcagagcggcggcgcatccgctcagccatccgggaactgcagcggcaggagctggagcgcgaggaggaggccctggcatccaagcgtttccgtgccgagcggcaggacaacaaggagaactggctgcactctcagcagcgggaagctgagcagcgggctgccctggcacggctggcagggcagctggagtccatgaacgatgtggaggaattgactgcactgttgcgaagcgctggtgagtatgaggagcgcaagctgatccgagctgccatccgccgtgtacgggctcaggagattgaggctgccaccttggctgggaggttgtacagcgggcgtcccaacagtggctcaagagaggacagcaaggggctagcggcacacaggctggaacagtgtgaggtgccagagcgagaggaacaggaacagcaggcagaggtttcaaagccaacccccacccctgaaggcaccagccaggatgtgaccacagtgacactcctgctgcgagccccacctgggagcacatccagctcacctgcctcacccagcagttcacccacccctgcctctcctgagcctccattggagcctgccgaggcccagtgccttacagctgaggttccaggcagcccagagccaccccccagcccacccaagaccaccagccctgagcctcaggagtctccaacgctccccagcactgagggccaggtggtcaacaagcttctgtctggccccaaagagacccctgctgcccagagccccaccagaggcccctctgacaccaagagagcagacgtggctggaccccgaccctgccaacgctccctgtcggtgctcagcccccgccaaccagcccagaaccgagagtccaccccccttgccagcggaccttcctcattccagcgggctggctctgtgcgggatcgtgtccacaagttcacatctgattctcctatggctgctaggctccaggatggcacaccccaggctgccctaagtcccctgacccccgcaaggctcctgggcccctccctcaccagcaccacccctgcctcctcctccagcggctcctcctctcggggccccagtgatacctcctcccggttcagcaaggagcaacgaggagtagcccagcccctggcccagcttcgaagctgcccccaggaggagggccccagggggcggggcttggctgctaggccccttgaaaacagagcaggggggcctgtggcacgttcagaggagcctggtgccccgctgcccgtggccgtcggcactgccgagccagggggcagtatgaagaccacattcaccatcgagatcaaggacggccgtggccaggcctccacaggccgggtgctgctgcccacaggcaaccagagggcagaactgacactggggctgcgggcgcccccgaccctactcagcaccagtagtgggggcaagagcaccatcacccgtgtcaacagccctgggaccctggctcggctgggcagtgtcactcatgtcaccagcttcagccatgccccccccagtagccgaggaggctgcagcatcaagatggaagcagagccagcagagcctctcgctgcagcagtggaagcggccaatggggctgagcagacccgagtgaacaaagcaccagaagggcggagccctctgagcgctgaggagctgatgactattgaggatgaaggagtcttggacaagatgctggatcagagcacggactttgaagagcggaagctcatccgggctgcacttcgtgagctccgacaaaggaagagagaccagcgggacaaggagcgggaacggcggctgcaggaggcacggggccggccaggggaggggcgcggcaacacagccactgagaccaccacgaggcacagccagcgggcagctgatggctctgctgtcagcactgttaccaagactgagcggctcgtccactccaatgatggcacacggacggcccgcaccaccacagtggagtcgagtttcgtgaggcgctcggagaatggcagtggcagcaccatgatgcaaaccaagaccttctcctcttcctcctcatccaagaagatgggcagcatcttcgaccgcgaggaccaggccagcccacgggccggcagcctggcggcgctcgagaaacggcaggccgagaagaagaaagagctgatgaaggcgcagagtctgcccaagacctcagcctcccaggcgcgcaaggccatgattgagaagctggagaaggagggcgcggccggcagccctggcggaccccgcgcagccgtgcagcgatccaccagcttcggggtccccaacgccaacagcatcaagcagatgctgctggactggtgtcgagccaagactcgcggctacgagcacgtcgacatccagaacttctcctccagctggagtgatgggatggccttctgtgccctggtgcacaacttcttccctgaggccttcgactatgggcagcttagccctcagaaccgacgccagaacttcgaggtggccttctcatctgcggagacccatgcggactgcccgcagctcctggatacagaggacatggtgcggcttcgagagcctgactggaagtgcgtgtacacgtacatccaggaattctaccgctgtctggtccagaaggggctggtaaaaaccaaaaagtcctaacccctgctcggggccccacggatgctggtggactgtgtgcccctggtggaggtggacgacatgatgatcatgggcaagaagcctgaccccaagtgtgtcttcacctatgtgcagtcgctctacaaccacctgcgacgccacgaactgcgcctgcgcggcaagaatgtctagcctgcccgcccgcatggccagccagtggcaagctgccgcccccactctccgggcaccgtctcctgcctgtgcgtccgcccaccgctgccctgtctgttgcgacaccctcccccccacatacacacgcagcgttttgataaattattggttttcaacga

SEQ ID NO: 182542 - DNA, 3198 bp, Homo sapiens
  Payload ID: 15964
  Gene Symbol: SMTN
  Gene Name: smoothelin
  Uniprot ID: P53814
  ENST ID: ENST00000358743
  CDS Start-End: 219-3041
cagaatccaggggacggttgctgagcgggcctgggacagcgggtcgcggcacctccggcctgcgcgtgtctaatccgtctgtcgggtcccgaaagagctaagccgagcctgcgccggacgggtgggctggactgagagaattctctgagctggtgacaggtgccacaggcactggggatctcaccagaaaggaaccgacggagctaggggccagcgagatggcggacgaggccttagctgggctggatgagggagcccttcggaagctgctggaggtcacagcagatctggcagagcggcggcgcatccgctcagccatccgggaactgcagcggcaggagctggagcgcgaggaggaggccctggcatccaagcgtttccgtgccgagcggcaggacaacaaggagaactggctgcactctcagcagcgggaagctgagcagcgggctgccctggcacggctggcagggcagctggagtccatgaacgatgtggaggaattgactgcactgttgcgaagcgctggtgagtatgaggagcgcaagctgatccgagctgccatccgccgtgtacgggctcaggagattgaggctgccaccttggctgggaggttgtacagcgggcgtcccaacagtggctcaagagaggacagcaaggggctagcggcacacaggctggaacagtgtgaggtgccagagcgagaggaacaggaacagcaggcagaggtttcaaagccaacccccacccctgaaggcaccagccaggatgtgaccacagtgacactcctgctgcgagccccacctgggagcacatccagctcacctgcctcacccagcagttcacccacccctgcctctcctgagcctccattggagcctgccgaggcccagtgccttacagctgaggttccaggcagcccagagccaccccccagcccacccaagaccaccagccctgagcctcaggagtctccaacgctccccagcactgagggccaggtggtcaacaagcttctgtctggccccaaagagacccctgctgcccagagccccaccagaggcccctctgacaccaagagagcagacgtggctggaccccgaccctgccaacgctccctgtcggtgctcagcccccgccaaccagcccagaaccgagagtccaccccccttgccagcggaccttcctcattccagcgggctggctctgtgcgggatcgtgtccacaagttcacatctgattctcctatggctgctaggctccaggatggcacaccccaggctgccctaagtcccctgacccccgcaaggctcctgggcccctccctcaccagcaccacccctgcctcctcctccagcggctcctcctctcggggccccagtgatacctcctcccggttcagcaaggagcaacgaggagtagcccagcccctggcccagcttcgaagctgcccccaggaggagggccccagggggcggggcttggctgctaggccccttgaaaacagagcaggggggcctgtggcacgttcagaggagcctggtgccccgctgcccgtggccgtcggcactgccgagccagggggcagtatgaagaccacattcaccatcgagatcaaggacggccgtggccaggcctccacaggccgggtgctgctgcccacaggcaaccagagggcagaactgacactggggctgcgggcgcccccgaccctactcagcaccagtagtgggggcaagagcaccatcacccgtgtcaacagccctgggaccctggctcggctgggcagtgtcactcatgtcaccagcttcagccatgccccccccagtagccgaggaggctgcagcatcaagatggaagcagagccagcagagcctctcgctgcagcagtggaagcggccaatggggctgagcagacccgagtgaacaaagcaccagaagggcggagccctctgagcgctgaggagctgatgactattgaggatgaaggagtcttggacaagatgctggatcagagcacggactttgaagagcggaagctcatccgggctgcacttcgtgagctccgacaaaggaagagagaccagcgggacaaggagcgggaacggcggctgcaggaggcacggggccggccaggggaggggcgcggcaacacagccactgagaccaccacgaggcacagccagcgggcagctgatggctctgctgtcagcactgttaccaagactgagcggctcgtccactccaatgatggcacacggacggcccgcaccaccacagtggagtcgagtttcgtgaggcgctcggagaatggcagtggcagcaccatgatgcaaaccaagaccttctcctcttcctcctcatccaagaagatgggcagcatcttcgaccgcgaggaccaggccagcccacgggccggcagcctggcggcgctcgagaaacggcaggccgagaagaagaaagagctgatgaaggcgcagagtctgcccaagacctcagcctcccaggcgcgcaaggccatgattgagaagctggagaaggagggcgcggccggcagccctggcggaccccgcgcagccgtgcagcgatccaccagcttcggggtccccaacgccaacagcatcaagcagatgctgctggactggtgtcgagccaagactcgcggctacgagcacgtcgacatccagaacttctcctccagctggagtgatgggatggccttctgtgccctggtgcacaacttcttccctgaggccttcgactatgggcagcttagccctcagaaccgacgccagaacttcgaggtggccttctcatctgcggagacccatgcggactgcccgcagctcctggatacagaggacatggtgcggcttcgagagcctgactggaagatgctggtggactgtgtgcccctggtggaggtggacgacatgatgatcatgggcaagaagcctgaccccaagtgtgtcttcacctatgtgcagtcgctctacaaccacctgcgacgccacgaactgcgcctgcgcggcaagaatgtctagcctgcccgcccgcatggccagccagtggcaagctgccgcccccactctccgggcaccgtctcctgcctgtgcgtccgcccaccgctgccctgtctgttgcgacaccctcccccccacatacacacgcagcgttttgataaattattggttttcaacg

SEQ ID NO: 182543 - DNA, 1735 bp, Homo sapiens
  Payload ID: 15964
  Gene Symbol: SMTN
  Gene Name: smoothelin
  ENST ID: ENST00000404574
  CDS Start-End: 91-1407
gaccagctgcaaagactcagacactcagccagagacagcagcccctgccactgccccaccattaccccccatagagtccccaccagcaccatgccgggggtaccagggcctgggcctgagctggccgcagcccttgaggagcagttgggccgggcactggaggagctgcgggcggtggctgaagcaggccgggtggcagtgacccaggcagccgaggtagctgtagccaccgtggagccggtggcccgggcagctgaagagctgcgggcagagagagcagcactgagccggcggctggatgcactgagcaggcaggtggaggtgctgagcctacggctgggggtcccacttgtgtccggccttgagcctgagctggagcccagcgagctgctcctggctgccgccgaccccgaggccctctttcaggctgccgaggatgccgggacccccgtggcccacccacctgccttcagcacccgccgccgctcctccaccggcaccacccgcagcactagtctcatggaagcagagccagcagagcctctcgctgcagcagtggaagcggccaatggggctgagcagacccgagtgaacaaagcaccagaagggcggagccctctgagcgctgaggagctgatgactattgaggatgaaggagtcttggacaagatgctggatcagagcacggactttgaagagcggaagctcatccgggctgcacttcgtgagctccgacaaaggaagagagatggcagtggcagcaccatgatgcaaaccaagaccttctcctcttcctcctcatccaagaagatgggcagcatcttcgaccgcgaggaccaggccagcccacgggccggcagcctggcggcgctcgagaaacggcaggccgagaagaagaaagagctgatgaaggcgcagagtctgcccaagacctcagcctcccaggcgcgcaaggccatgattgagaagctggagaaggagggcgcggccggcagccctggcggaccccgcgcagccgtgcagcgatccaccagcttcggggtccccaacgccaacagcatcaagcagatgctgctggactggtgtcgagccaagactcgcggctacgagcacgtcgacatccagaacttctcctccagctggagtgatgggatggccttctgtgccctggtgcacaacttcttccctgaggccttcgactatgggcagcttagccctcagaaccgacgccagaacttcgaggtggccttctcatctgcggagacccatgcggactgcccgcagctcctggatacagaggacatggtgcggcttcgagagcctgactggaagtgcgtgtacacgtacatccaggaattctaccgctgtctggtccagaaggggctggtaaaaaccaaaaagtcctaacccctgctcggggccccacggatgctggtggactgtgtgcccctggtggaggtggacgacatgatgatcatgggcaagaagcctgaccccaagtgtgtcttcacctatgtgcagtcgctctacaaccacctgcgacgccacgaactgcgcctgcgcggcaagaatgtctagcctgcccgcccgcatggccagccagtggcaagctgccgcccccactctccgggcaccgtctcctgcctgtgcgtccgcccaccgctgccctgtctgttgcgacaccctcccccccacatacacacgcagcgttttgataaattattggttttcaacg

SEQ ID NO: 182544 - DNA, 566 bp, Homo sapiens
  Payload ID: 15964
  Gene Symbol: SMTN
  Gene Name: smoothelin
  ENST ID: ENST00000422839
  CDS Start-End: 456-566
gtaacaacatggcagctcccatgagaacggcatggttggagtcagaagaggaagaagcagaactgggcaggactccagaccccatcctcccaactccacccactttagtctccatggagacccaagggcggctttagggcctctggcactgaagatggaatagctttgccttgtggatctgacctcctgggtaccctggctgattccttgtttggtcttggacatgtcagctctctctgggcctcaatttcccccttttgctgaatgacagcctggactccatattccctatttaggactccagcgctcctaaaggcagactctcagggcttggaaggtagaagcatgctacaagaaggcaatgtctgttcaaagaattctctgagctggtgacaggtgccacaggcactggggatctcaccagaaaggaaccgacggagctaggggccagcgagatggcggacgaggccttagctgggctggatgagggagcccttcggaagctgctggaggtcacagcagatctggcagagcggcggcgcatccgctcagccatccgggaactg

SEQ ID NO: 182545 - DNA, 648 bp, Homo sapiens
  Payload ID: 15964
  Gene Symbol: SMTN
  Gene Name: smoothelin
  ENST ID: ENST00000455608
  CDS Start-End: 1-648
ggatccactagccgggagctcagccgggaaagggatccccaagcgggccacccggctgcccagatggaagcagagccagcagagcctctcgctgcagcagtggaagcggccaatggggctgagcagacccgagtgaacaaagcaccagaagggcggagccctctgagcgctgaggagctgatgactattgaggatgaaggagtcttggacaagatgctggatcagagcacggactttgaagagcggaagctcatccgggctgcacttcgtgagctccgacaaaggaagagagatggcagtggcagcaccatgatgcaaaccaagaccttctcctcttcctcctcatccaagaagatgggcagcatcttcgaccgcgaggaccaggccagcccacgggccggcagcctggcggcgctcgagaaacggcaggccgagaagaagaaagagctgatgaaggcgcagagtctgcccaagacctcagcctcccaggcgcgcaaggccatgattgagaagctggagaaggagggcgcggccggcagccctggcggaccccgcgcagccgtgcagcgatccaccagcttcggggtccccaacgccaacagcatcaagcagatgctgctggactggtgtcgagccaagactcgcggc

SEQ ID NO: 182546 - DNA, 534 bp, Homo sapiens
  Payload ID: 15964
  Gene Symbol: SMTN
  Gene Name: smoothelin
  ENST ID: ENST00000431481
  CDS Start-End: 61-534
attgtgccctaggcagagccgtgggcagctggtgccagccctccgcccctggcagccaaaatgacctgcctctcgcacccactgcagctggaggtcacagcagatctggcagagcggcggcgcatccgctcagccatccgggaactgcagcggcaggagctggagcgcgaggaggaggccctggcatccaagcgtttccgtgccgagcggcaggacaacaaggagaactggctgcactctcagcagcgggaagctgagcagcgggctgccctggcacggctggcagggcagctggagtccatgaacgatgtggaggaattgactgcactgttgcgaagcgctggtgagtatgaggagcgcaagctgatccgagctgccatccgccgtgtacgggctcaggagattgaggctgccaccttggctgggaggttgtacagcgggcgtcccaacagtggctcaagagaggacagcaaggggctagcggcacacaggctggaacagtgtgaggtgccagagcgagaggaacaggaacag

SEQ ID NO: 182547 - DNA, 567 bp, Homo sapiens
  Payload ID: 15964
  Gene Symbol: SMTN
  Gene Name: smoothelin
  ENST ID: ENST00000432777
  CDS Start-End: 294-567
agctgtggggtctgtaacaacatggcagctcccatgagaacggcatggttggagtcagaagaggaagaagcagaactgggcaggactccagaccccatcctcccaactccacccactttagtctccatggagacccaagggcggctttagggcctctggcactgaagatggaatagctttgccttgtggatctgacctcctgggactccagcgctcctaaaggcagactctcagggcttggaaggtagaagcatgctacaagaaggcaatgtctgttcaaaggtttagacaggatgagagtccatcccaggccacacagcagactggcggccaagctggcagggctggaaccagagaccccctaccctgggtttgaattctctgagctggtgacaggtgccacaggcactggggatctcaccagaaaggaaccgacggagctaggggccagcgagatggcggacgaggccttagctgggctggatgagggagcccttcggaagctgctggaggtcacagcagatctggcagagcggcggcgcatccgctcagccatccgggaactgc

SEQ ID NO: 182548 - DNA, 574 bp, Homo sapiens
  Payload ID: 15964
  Gene Symbol: SMTN
  Gene Name: smoothelin
  ENST ID: ENST00000426927
  CDS Start-End: 151-574
gcagaatccaggggacggttgctgagcgggcctgggacagcgggtcgcggcacctccggcctgcgcgtgtctaatccgtctgtcgggtcccgaaagagctaagccgagcctgcgccggacgggtgggctggactgagaggtttagacaggatgagagtccatcccaggccacacagcagactggcggccaagctggcagggctggaaccagagaccccctaccctgggtttgaattctctgagctggtgacaggtgccacaggcactggggatctcaccagaaaggaaccgacggagctaggggccagcgagatggcggacgaggccttagctgggctggatgagggagcccttcggaagctgctggaggtcacagcagatctggcagagcggcggcgcatccgctcagccatccgggaactgcagcggcaggagctggagcgcgaggaggaggccctggcatccaagcgtttccgtgccgagcggcaggacaacaaggagaactggctgcactctcagcagcgggaagctgagcagcgggctgccctggcacggctggcagggcagctggagt

SEQ ID NO: 182549 - DNA, 599 bp, Homo sapiens
  Payload ID: 15964
  Gene Symbol: SMTN
  Gene Name: smoothelin
  ENST ID: ENST00000440425
  CDS Start-End: 145-599
gcagaatccaggggacggttgctgagcgggcctgggacagcgggtcgcggcacctccggcctgcgcgtgtctaatccgtctgtcgggtcccgaaagagctaagccgagcctgcgccggacgggtgggctggactgagagacaggatgagagtccatcccaggccacacagcagactggcggccaagctggcagggctggaaccagagaccccctaccctgggtttgaattctctgagctggtgacaggtgccacaggcactggggatctcaccagaaaggaaccgacggagctaggggccagcgagatggcggacgaggccttagctgggctggatgagggagcccttcggaagctgctggaggtcacagcagatctggcagagcggcggcgcatccgctcagccatccgggaactgcagcggcaggagctggagcgcgaggaggaggccctggcatccaagcgtttccgtgccgagcggcaggacaacaaggagaactggctgcactctcagcagcgggaagctgagcagcgggctgccctggcacggctggcagggcagctggagtccatgaacgatgtggaggaattgactgcact

SEQ ID NO: 182550 - DNA, 545 bp, Homo sapiens
  Payload ID: 15964
  Gene Symbol: SMTN
  Gene Name: smoothelin
  ENST ID: ENST00000438223
  CDS Start-End: 164-545
gacaaatccttggccctctccaatcttctcagtttgcctgaaatccaggggttgggcaggtcagcttctgaaagcccttccagaattctctgagctggtgacaggtgccacaggcactggggatctcaccagaaaggaaccgacggagctaggggccagcgagatggcggacgaggccttagctgggctggatgagggagcccttcggaagctgctggaggtcacagcagatctggcagagcggcggcgcatccgctcagccatccgggaactgcagcggcaggagctggagcgcgaggaggaggccctggcatccaagcgtttccgtgccgagcggcaggacaacaaggagaactggctgcactctcagcagcgggaagctgagcagcgggctgccctggcacggctggcagggcagctggagtccatgaacgatgtggaggaattgactgcactgttgcgaagcgctggtgagtatgaggagcgcaagctgatccgagctgccatccgccgtgtacgggctcaggagattgaggctgccacct

SEQ ID NO: 182551 - DNA, 823 bp, Homo sapiens
  Payload ID: 15964
  Gene Symbol: SMTN
  Gene Name: smoothelin
  ENST ID: ENST00000416786
  CDS Start-End: 530-823
ggggacttgcacgccgcgtgcccctccaccacccgccgggacgccctctgcctcggtcccgagttcgagttcgacctccgccactcagctgggtgtcctggggaccttggtttcttccctttagatccggacactgaagcaggcggtagcgggtgtcttcctacctggctaccccttcggcgcctagcgcgaggcagggggaaccctgggccagtcctctctcccttgagccacggaggatctgtatgtagcaggtggctctacatggtggaggtgtgggggaggcaacaggattggctgactcactccagagaagctggaggtcacagcagatctggcagagcggcggcgcatccgctcagccatccgggaactgcagcggcaggagctggagcgcgaggaggaggccctggcatccaagcgtttccgtgccgagcggcaggacaacaaggagaactggctgcactctcagcagcgggaagctgagcagcgggctgccctggcacggctggcagggcagctggagtccatgaacgatgtggaggaattgactgcactgttgcgaagcgctggtgagtatgaggagcgcaagctgatccgagctgccatccgccgtgtacgggctcaggagattgaggctgccaccttggctgggaggttgtacagcgggcgtcccaacagtggctcaagagaggacagcaaggggctagcggcacacaggctggaacagtgtgaggtgccagagcgagaggaacaggaacagcaggcagaggtttcaaagccaacccccacccctgaaggcaccagccaggatgtgaccaca

SEQ ID NO: 182552 - DNA, 3321 bp, Homo sapiens
  Payload ID: 15964
  Gene Symbol: SMTN
  Gene Name: smoothelin
  ENST ID: ENST00000612341
  CDS Start-End: 78-2993
agcgtctggccgatttggggacgcgggcagtcgcttccggccccggctcccgcacattcttgaggattgggccggggatgggaggaatggggacgcctggggacttgcacgccgcgtgcccctccaccacccgccgggacgccctctgcctcggtcccgagttcgagttcgacctccgccactcagctgggtgtcctggggaccttggtttcttccctttagatccggacactgaagcaggcggtagcgggtgtcttcctacctggctaccccttcggcgcctagcgcgaggcaggctggaggtcacagcagatctggcagagcggcggcgcatccgctcagccatccgggaactgcagcggcaggagctggagcgcgaggaggaggccctggcatccaagcgtttccgtgccgagcggcaggacaacaaggagaactggctgcactctcagcagcgggaagctgagcagcgggctgccctggcacggctggcagggcagctggagtccatgaacgatgtggaggaattgactgcactgttgcgaagcgctggtgagtatgaggagcgcaagctgatccgagctgccatccgccgtgtacgggctcaggagattgaggctgccaccttggctgggaggttgtacagcgggcgtcccaacagtggctcaagagaggacagcaaggggctagcggcacacaggctggaacagtgtgaggtgccagagcgagaggaacaggaacagcaggcagaggtttcaaagccaacccccacccctgaaggcaccagccaggatgtgaccacagtgacactcctgctgcgagccccacctgggagcacatccagctcacctgcctcacccagcagttcacccacccctgcctctcctgagcctccattggagcctgccgaggcccagtgccttacagctgaggttccaggcagcccagagccaccccccagcccacccaagaccaccagccctgagcctcaggagtctccaacgctccccagcactgagggccaggtggtcaacaagcttctgtctggccccaaagagacccctgctgcccagagccccaccagaggcccctctgacaccaagagagcagacgtggctggaccccgaccctgccaacgctccctgtcggtgctcagcccccgccaaccagcccagaaccgagagtccaccccccttgccagcggaccttcctcattccagcgggctggctctgtgcgggatcgtgtccacaagttcacatctgattctcctatggctgctaggctccaggatggcacaccccaggctgccctaagtcccctgacccccgcaaggctcctgggcccctccctcaccagcaccacccctgcctcctcctccagcggctcctcctctcggggccccagtgatacctcctcccggttcagcaaggagcaacgaggagtagcccagcccctggcccagcttcgaagctgcccccaggaggagggccccagggggcggggcttggctgctaggccccttgaaaacagagcaggggggcctgtggcacgttcagaggagcctggtgccccgctgcccgtggccgtcggcactgccgagccagggggcagtatgaagaccacattcaccatcgagatcaaggacggccgtggccaggcctccacaggccgggtgctgctgcccacaggcaaccagagggcagaactgacactggggctgcgggcgcccccgaccctactcagcaccagtagtgggggcaagagcaccatcacccgtgtcaacagccctgggaccctggctcggctgggcagtgtcactcatgtcaccagcttcagccatgccccccccagtagccgaggaggctgcagcatcaagatggaagcagagccagcagagcctctcgctgcagcagtggaagcggccaatggggctgagcagacccgagtgaacaaagcaccagaagggcggagccctctgagcgctgaggagctgatgactattgaggatgaaggagtcttggacaagatgctggatcagagcacggactttgaagagcggaagctcatccgggctgcacttcgtgagctccgacaaaggaagagagaccagcgggacaaggagcgggaacggcggctgcaggaggcacggggccggccaggggaggggcgcggcaacacagccactgagaccaccacgaggcacagccagcgggcagctgatggctctgctgtcagcactgttaccaagactgagcggctcgtccactccaatgatggcacacggacggcccgcaccaccacagtggagtcgagtttcgtgaggcgctcggagaatggcagtggcagcaccatgatgcaaaccaagaccttctcctcttcctcctcatccaagaagatgggcagcatcttcgaccgcgaggaccaggccagcccacgggccggcagcctggcggcgctcgagaaacggcaggccgagaagaagaaagagctgatgaaggcgcagagtctgcccaagacctcagcctcccaggcgcgcaaggccatgattgagaagctggagaaggagggcgcggccggcagccctggcggaccccgcgcagccgtgcagcgatccaccagcttcggggtccccaacgccaacagcatcaagcagatgctgctggactggtgtcgagccaagactcgcggctacgagcacgtcgacatccagaacttctcctccagctggagtgatgggatggccttctgtgccctggtgcacaacttcttccctgaggccttcgactatgggcagcttagccctcagaaccgacgccagaacttcgaggtggccttctcatctgcggagacccatgcggactgcccgcagctcctggatacagaggacatggtgcggcttcgagagcctgactggaagtgcgtgtacacgtacatccaggaattctaccgctgtctggtccagaaggggctggtaaaaaccaaaaagtcctaacccctgctcggggccccacggatgctggtggactgtgtgcccctggtggaggtggacgacatgatgatcatgggcaagaagcctgaccccaagtgtgtcttcacctatgtgcagtcgctctacaaccacctgcgacgccacgaactgcgcctgcgcggcaagaatgtctagcctgcccgcccgcatggccagccagtggcaagctgccgcccccactctccgggcaccgtctcctgcctgtgcgtccgcccaccgctgccctgtctgttgcgacaccctcccccccacatacacacgcagcgttttgataaattattggttttcaacg

SEQ ID NO: 182553 - DNA, 3227 bp, Homo sapiens
  Payload ID: 15964
  Gene Symbol: SMTN
  Gene Name: smoothelin
  ENST ID: ENST00000619644
  CDS Start-End: 62-3070
ttgccaggccctggcttctcaatccaggtccctgccctccctgttttgaggtttagacaggatgagagtccatcccaggccacacagcagactggcggccaagctggcagggctggaaccagagaccccctaccctgggtttgaattctctgagctggtgacaggtgccacaggcactggggatctcaccagaaaggaaccgacggagctaggggccagcgagatggcggacgaggccttagctgggctggatgagggagcccttcggaagctgctggaggtcacagcagatctggcagagcggcggcgcatccgctcagccatccgggaactgcagcggcaggagctggagcgcgaggaggaggccctggcatccaagcgtttccgtgccgagcggcaggacaacaaggagaactggctgcactctcagcagcgggaagctgagcagcgggctgccctggcacggctggcagggcagctggagtccatgaacgatgtggaggaattgactgcactgttgcgaagcgctggtgagtatgaggagcgcaagctgatccgagctgccatccgccgtgtacgggctcaggagattgaggctgccaccttggctgggaggttgtacagcgggcgtcccaacagtggctcaagagaggacagcaaggggctagcggcacacaggctggaacagtgtgaggtgccagagcgagaggaacaggaacagcaggcagaggtttcaaagccaacccccacccctgaaggcaccagccaggatgtgaccacagtgacactcctgctgcgagccccacctgggagcacatccagctcacctgcctcacccagcagttcacccacccctgcctctcctgagcctccattggagcctgccgaggcccagtgccttacagctgaggttccaggcagcccagagccaccccccagcccacccaagaccaccagccctgagcctcaggagtctccaacgctccccagcactgagggccaggtggtcaacaagcttctgtctggccccaaagagacccctgctgcccagagccccaccagaggcccctctgacaccaagagagcagacgtggctggaccccgaccctgccaacgctccctgtcggtgctcagcccccgccaaccagcccagaaccgagagtccaccccccttgccagcggaccttcctcattccagcgggctggctctgtgcgggatcgtgtccacaagttcacatctgattctcctatggctgctaggctccaggatggcacaccccaggctgccctaagtcccctgacccccgcaaggctcctgggcccctccctcaccagcaccacccctgcctcctcctccagcggctcctcctctcggggccccagtgatacctcctcccggttcagcaaggagcaacgaggagtagcccagcccctggcccagcttcgaagctgcccccaggaggagggccccagggggcggggcttggctgctaggccccttgaaaacagagcaggggggcctgtggcacgttcagaggagcctggtgccccgctgcccgtggccgtcggcactgccgagccagggggcagtatgaagaccacattcaccatcgagatcaaggacggccgtggccaggcctccacaggccgggtgctgctgcccacaggcaaccagagggcagaactgacactggggctgcgggcgcccccgaccctactcagcaccagtagtgggggcaagagcaccatcacccgtgtcaacagccctgggaccctggctcggctgggcagtgtcactcatgtcaccagcttcagccatgccccccccagtagccgaggaggctgcagcatcaaggctgccgaggatgccgggacccccgtggcccacccacctgccttcagcacccgccgccgctcctccaccggcaccacccgcagcactagtctcatggaagcagagccagcagagcctctcgctgcagcagtggaagcggccaatggggctgagcagacccgagtgaacaaagcaccagaagggcggagccctctgagcgctgaggagctgatgactattgaggatgaaggagtcttggacaagatgctggatcagagcacggactttgaagagcggaagctcatccgggctgcacttcgtgagctccgacaaaggaagagagaccagcgggacaaggagcgggaacggcggctgcaggaggcacggggccggccaggggaggggcgcggcaacacagccactgagaccaccacgaggcacagccagcgggcagctgatggctctgctgtcagcactgttaccaagactgagcggctcgtccactccaatgatggcacacggacggcccgcaccaccacagtggagtcgagtttcgtgaggcgctcggagaatggcagtggcagcaccatgatgcaaaccaagaccttctcctcttcctcctcatccaagaagatgggcagcatcttcgaccgcgaggaccaggccagcccacgggccggcagcctggcggcgctcgagaaacggcaggccgagaagaagaaagagctgatgaaggcgcagagtctgcccaagacctcagcctcccaggcgcgcaaggccatgattgagaagctggagaaggagggcgcggccggcagccctggcggaccccgcgcagccgtgcagcgatccaccagcttcggggtccccaacgccaacagcatcaagcagatgctgctggactggtgtcgagccaagactcgcggctacgagcacgtcgacatccagaacttctcctccagctggagtgatgggatggccttctgtgccctggtgcacaacttcttccctgaggccttcgactatgggcagcttagccctcagaaccgacgccagaacttcgaggtggccttctcatctgcggagatgctggtggactgtgtgcccctggtggaggtggacgacatgatgatcatgggcaagaagcctgaccccaagtgtgtcttcacctatgtgcagtcgctctacaaccacctgcgacgccacgaactgcgcctgcgcggcaagaatgtctagcctgcccgcccgcatggccagccagtggcaagctgccgcccccactctccgggcaccgtctcctgcctgtgcgtccgcccaccgctgccctgtctgttgcgacaccctcccccccacatacacacgcagcgttttgataaattattggttttcaacg

SEQ ID NO: 182554 - DNA, 1263 bp, Homo sapiens
  Payload ID: 15964
  Gene Symbol: SMTN
  Gene Name: smoothelin
  ENST ID: ENST00000624247
  CDS Start-End: 1-934
gcggaagctcatccgggctgcacttcgtgagctccgacaaaggaagagagaccagcgggacaaggagcgggaacggcggctgcaggaggcacggggccggccaggggaggggcgcggcaacacagccactgagaccaccacgaggcacagccagcgggcagctgatggctctgctgtcagcactgttaccaagactgagcggctcgtccactccaatgatggcacacggacggcccgcaccaccacagtggagtcgagtttcgtgaggcgctcggagaatggcagtggcagcaccatgatgcaaaccaagaccttctcctcttcctcctcatccaagaagatgggcagcatcttcgaccgcgaggaccaggccagcccacgggccggcagcctggcggcgctcgagaaacggcaggccgagaagaagaaagagctgatgaaggcgcagagtctgcccaagacctcagcctcccaggcgcgcaaggccatgattgagaagctggagaaggagggcgcggccggccctggcggaccccgcgcagccgtgcagcgatccaccagcttcggggtccccaacgccaacagcatcaagcagatgctgctggactggtgtcgagccaagactcgcggctacgagcacgtcgacatccagaacttctcctccagctggagtgatgggatggccttctgtgccctggtgcacaacttcttccctgaggccttcgactatgggcagcttagccctcagaaccgacgccagaacttcgaggtggccttctcatctgcggagacccatgcggactgcccgcagctcctggatacagaggacatggtgcggcttcgagagcctgactggaagtgcgtgtacacgtacatccaggaattctaccgctgtctggtccagaaggggctggtaaaaaccaaaaagtcctaacccctgctcggggccccacggatgctggtggactgtgtgcccctggtggaggtggacgacatgatgatcatgggcaagaagcctgaccccaagtgtgtcttcacctatgtgcagtcgctctacaaccacctgcgacgccacgaactgcgcctgcgcggcaagaatgtctagcctgcccgcccgcatggccagccagtggcaagctgccgcccccactctccgggcaccgtctcctgcctgtgcgtccgcccaccgctgccctgtctgttgcgacaccctcccccccacatacacacgcagcgttttgataaattattggttttcaacga

SEQ ID NO: 182555 - DNA, 589 bp, Homo sapiens
  Payload ID: 15964
  Gene Symbol: SMTN
  Gene Name: smoothelin
  ENST ID: ENST00000482444
  CDS Start-End: 575-589
gcagaatccaggggacggttgctgagcgggcctgggacagcgggtcgcggcacctccggcctgcgcgtgtctaatccgtctgtcgggtcccgaaagagctaagccgagcctgcgccggacgggtgggctggactgagagaattctctgagctggtgacaggtgccacaggcactggggatctcaccagaaaggaaccgacggagctaggggccagcgagatggcggacgaggccttagctgggctggatgagggagcccttcggaagctgccaaaatgacctgcctctcgcacccactgcagctggaggtcacagcagatctggcagagcggcggcgcatccgctcagccatccgggaactgcagcggcaggagctggagcgcgaggaggaggccctggcatccaagcgtttccgtgccgagcggcaggacaacaaggagaactggctgcacccacatcctccacgacctggccatggcagtggtggttacagtcatgatgtctctgcagctctcagcagcgggaagctgagcagcgggctgccctggcacggctggcagggcagctggagtccatgaacgatgtggag

SEQ ID NO: 182556 - DNA, 1536 bp, Homo sapiens
  Payload ID: 15965
  Gene Symbol: SMTNL1
  Gene Name: smoothelin-like 1
  Uniprot ID: A8MU46
  ENST ID: ENST00000399154
  CDS Start-End: 1-1374
atggagcagaaggaagggaagctctctgaggatgggaccaccgtctccccagctgcggacaaccctgagatgtcaggaggtggagcccctgcagaggagaccaaaggcacagctggaaaggccatcaatgaggggcctcccactgagtcaggaaagcaggaaaaggcaccagccgaggacggcatgtcagcagaactccagggggaagcaaatggattagatgaggtcaaagtggaatctcagagggaggctggtgggaaagaggatgctgaggctgaacttaaaaaggaggatggtgagaaggaagagaccactgtgggttctcaggagatgactggcaggaaagaagagaccaaatctgaacccaaagaggctgaggaaaaggagagcacgctggcctctgagaagcagaaggctgaggagaaagaggccaaacctgaatctgggcagaaagccgatgccaatgacagagacaagcctgaacctaaggcaacagttgaggaggaggacgccaagacagcctctcaggaggagacagttgtggaggatgaggctaaggctgaacccaaggagcccgatgggaaagaggaggccaaacatggtgcaaaagaggaggctgatgagccaggcagtcccagcgaagagcaggagcaggacgtggaaaaagagccagagggaggggcaggggtgattcccagctccccagaggagtggcctgagagccccactggggaggggcacaacctcagcacagatgggctgggtccagactgtgtagcttccggacagaccagtccttcagccagtgagtcttcacccagcgacgtgccccagagtccccctgagtccccttcctcaggggagaagaaggagaaggcaccagagcgcagggtatcagcccctgctcggccccgggggccccgggcacagaaccgcaaagccatcgtggacaagtttggcggggcagcttccggccccacggccttgttccgcaacactaaggcagccggggcagccattggtggtgtcaagaacatgctcttggagtggtgccgagccatgacaaaaaaatacgagcatgtggacatccagaacttctcctccagctggagcagtggtatggccttctgtgccctcatccacaagttcttccctgacgcctttgactacgcagagctggatcccgcaaagcgccggcacaacttcaccctggccttctccacagcagagaaactggctgactgtgctcagctgctggacgtggatgacatggtgcggttggctgtgcccgactccaagtgcgtctacacatacatccaggaactgtaccgcagccttgtgcagaaaggactggtgaagaccaagaagaagtgaggaggtgactggctctgtgggcagagatgggcagggtgcccagctcagcagccacggcccgggggttcccttctgctccatggaggcaccagagccaggggcttaggcaagggtgtgtggcgttggttttaactgcattaaaagtacttttgtaaaatcctg

SEQ ID NO: 182557 - DNA, 1649 bp, Homo sapiens
  Payload ID: 15965
  Gene Symbol: SMTNL1
  Gene Name: smoothelin-like 1
  ENST ID: ENST00000527972
  CDS Start-End: 3-1487
agatggagcagaaggaagggaagctctctgaggatgggaccaccgtctccccagctgcggacaaccctgagatgtcaggaggtggagcccctgcagaggagaccaaaggcacagctggaaaggccatcaatgaggggcctcccactgagtcaggaaagcaggaaaaggcaccagccgaggacggcatgtcagcagaactccagggggaagcaaatggattagatgaggtcaaagtggaatctcagagggaggctggtgggaaagaggatgctgaggctgaacttaaaaaggaggatggtgagaaggaagagaccactgtgggttctcaggagatgactggcaggaaagaagagaccaaatctgaacccaaagaggctgaggaaaaggagagcacgctggcctctgagaagcagaaggctgaggagaaagaggccaaacctgaatctgggcagaaagccgatgccaatgacagagacaagcctgaacctaaggcaacagttgaggaggaggacgccaagacagcctctcaggaggagacaggccagaggaaagagtgcagcactgaacccaaggagaaggctactgatgaagaggccaaggctgaatcgcagaaggctgttgtggaggatgaggctaaggctgaacccaaggagcccgatgggaaagaggaggccaaacatggtgcaaaagaggaggctgatgcaaaagaggaggcggaggatgcagaggaggcagagccaggcagtcccagcgaagagcaggagcaggacgtggaaaaagagccagagggaggggcaggggtgattcccagctccccagaggagtggcctgagagccccactggggaggggcacaacctcagcacagatgggctgggtccagactgtgtagcttccggacagaccagtccttcagccagtgagtcttcacccagcgacgtgccccagagtccccctgagtccccttcctcaggggagaagaaggagaaggcaccagagcgcagggtatcagcccctgctcggccccgggggccccgggcacagaaccgcaaagccatcgtggacaagtttggcggggcagcttccggccccacggccttgttccgcaacactaaggcagccggggcagccattggtggtgtcaagaacatgctcttggagtggtgccgagccatgacaaaaaaatacgagcatgtggacatccagaacttctcctccagctggagcagtggtatggccttctgtgccctcatccacaagttcttccctgacgcctttgactacgcagagctggatcccgcaaagcgccggcacaacttcaccctggccttctccacagcagagaaactggctgactgtgctcagctgctggacgtggatgacatggtgcggttggctgtgcccgactccaagtgcgtctacacatacatccaggaactgtaccgcagccttgtgcagaaaggactggtgaagaccaagaagaagtgaggaggtgactggctctgtgggcagagatgggcagggtgcccagctcagcagccacggcccgggggttcccttctgctccatggaggcaccagagccaggggcttaggcaagggtgtgtggcgttggttttaactgcattaaaagtacttttgtaaaatcctg

SEQ ID NO: 182558 - DNA, 1919 bp, Homo sapiens
  Payload ID: 15966
  Gene Symbol: SMTNL2
  Gene Name: smoothelin-like 2
  Uniprot ID: Q2TAL5
  ENST ID: ENST00000338859
  CDS Start-End: 134-1087
gacagcgcgtagtcgcagagtcagggaggggacctcaccacctgtctcctccctgaggtcttagaacagatacaagaaattccaggcgaaggtcccacagagtttggatcacgatgaggccagtgagtcggagatgagaaagacctcaaactcctgcatcatggaaaatgggcaccagccgggggcaggtccaggcgatggaccccctgagattgcccaaaacttctcagcaccagatccccccaggcctcgtcctgtgagcctctccttgcggctgccccaccagccagtcacggccatcacccgagtctctgacaggttctctggggagacctcagctgcggctctatcacccatgtctgctgccaccctggggggcctcaacccaagccccagcgaggtcatcacgccctggactcccagtcctagcgagaagaattcctctttcacgtggtctgtgccaagctctggctatggggcagtgacagcaagcaaacacagcaatagcccaccgctggtgacaccaccccagtcgcccgtgtccccgcagccgccagccataactcaggtccatcggcagggggagcgtcgcagggagctggtgaggtcgcagacgctgccccgcacctcggaggcgcaggcccggaaagcattgtttgagaagtgggagcaggaaacggcggccggcaaggggaaaggcgaggcccgggccaggctgaagcggtcgcagagcttcggcgtggccagcgccagcagcatcaagcagatcctgctcgagtggtgccgcagcaagacgctgggctaccagcacgtggacctgcagaacttctcctccagctggagcgacggcatggccttctgcgccctggtacactccttcttccccgatgcctttgactacaactccctgagccccacgcagaggcagaagaacttcgagctggctttcaccatggccgagaatctggccaactgtgagcgcctcatcgaagtggaggacatgatggtgatgggccgcaagccggaccccatgtgtgtcttcacctacgtccagtcgctgtacaaccacctgcgtcgcttcgagtaaagcccctgagcctggattgccaaagagcagccccaggaagaggccgggggtccgcttgcgattccccagccaggatgcccccaggagccttgccgtttggtgtgagcgcgctgtttgttctgtggcatgtgacggcactccccttcgagcccagctgtgttactgattaaaagtactgctgagctgtggtccgacagcactgatcacagccaagggcttggaggaaaaggaaaaattatgagagagagagagacattggtgctaagtaatgatcttcctaaagaaatgcttgtgtttatagcttccagaatgctaatctacaattttccctctggtgaattcgatacatcggctttacagggttacagtgattaccaagtgtttttttttatcaaaatacccagagttttttacttcctcacgcgattgtaggttcctctcctccctccctctgggccactgccaggaaacagagagaccgcttaatcagcagcttgacaaagaagacctcaagtcttgggaagaaacagtttaatcactcccaagtcctgggcaacagatgaccttcaagtcacctccgctctccggggagatgggaaggctctcctctcggtcccaaagtcctcctgttcttcccaggaggccccacaagtgtttggctaagcacaggctctcgggaatttaacacttttggggaaggaataggccctttgtgctgagagagagtttttattcacatcttttttaggggatttgctgcagatatttataaaaagtaactccctctgtaccactgacccatttatacataaaaaagatgtgttgaattttg

SEQ ID NO: 182559 - DNA, 2280 bp, Homo sapiens
  Payload ID: 15966
  Gene Symbol: SMTNL2
  Gene Name: smoothelin-like 2
  Uniprot ID: Q2TAL5
  ENST ID: ENST00000389313
  CDS Start-End: 68-1453
cggagctgcggagctcggatcttctcccccgtctggcccgctctcgacccgcgcgctctgctgggccatggagccggcccccgacgcccaggaggcgcgcactgtgcgcgaggcgctgggccgctacgaggcggcgctggagggtgcggtgcgcgcgctgcacgaggacatgcgggggctgcagcgcggcgtggagcggcgagtggcagaggcgatgcgcctggccggccccctggcgcgcacggtggccgacctgcagcgggacaaccagcggctgcaggcgcagctcgagcgcctgacgcgccaggtggaggcgctgggcttggccagcgggatgtccccggtgcccggcactcccggcacgcccagccccccgcccgcgcccggggttcccgaccgcgcgccccgcctgggcagcgcacgcttcgccagccacgccaccttctcgctgtccggccgcggccagagtttggatcacgatgaggccagtgagtcggagatgagaaagacctcaaactcctgcatcatggaaaatgggcaccagccgggggcaggtccaggcgatggaccccctgagattgcccaaaacttctcagcaccagatccccccaggcctcgtcctgtgagcctctccttgcggctgccccaccagccagtcacggccatcacccgagtctctgacaggttctctggggagacctcagctgcggctctatcacccatgtctgctgccaccctggggggcctcaacccaagccccagcgaggtcatcacgccctggactcccagtcctagcgagaagaattcctctttcacgtggtctgtgccaagctctggctatggggcagtgacagcaagcaaacacagcaatagcccaccgctggtgacaccaccccagtcgcccgtgtccccgcagccgccagccataactcaggtccatcggcagggggagcgtcgcagggagctggtgaggtcgcagacgctgccccgcacctcggaggcgcaggcccggaaagcattgtttgagaagtgggagcaggaaacggcggccggcaaggggaaaggcgaggcccgggccaggctgaagcggtcgcagagcttcggcgtggccagcgccagcagcatcaagcagatcctgctcgagtggtgccgcagcaagacgctgggctaccagcacgtggacctgcagaacttctcctccagctggagcgacggcatggccttctgcgccctggtacactccttcttccccgatgcctttgactacaactccctgagccccacgcagaggcagaagaacttcgagctggctttcaccatggccgagaatctggccaactgtgagcgcctcatcgaagtggaggacatgatggtgatgggccgcaagccggaccccatgtgtgtcttcacctacgtccagtcgctgtacaaccacctgcgtcgcttcgagtaaagcccctgagcctggattgccaaagagcagccccaggaagaggccgggggtccgcttgcgattccccagccaggatgcccccaggagccttgccgtttggtgtgagcgcgctgtttgttctgtggcatgtgacggcactccccttcgagcccagctgtgttactgattaaaagtactgctgagctgtggtccgacagcactgatcacagccaagggcttggaggaaaaggaaaaattatgagagagagagagacattggtgctaagtaatgatcttcctaaagaaatgcttgtgtttatagcttccagaatgctaatctacaattttccctctggtgaattcgatacatcggctttacagggttacagtgattaccaagtgtttttttttatcaaaatacccagagttttttacttcctcacgcgattgtaggttcctctcctccctccctctgggccactgccaggaaacagagagaccgcttaatcagcagcttgacaaagaagacctcaagtcttgggaagaaacagtttaatcactcccaagtcctgggcaacagatgaccttcaagtcacctccgctctccggggagatgggaaggctctcctctcggtcccaaagtcctcctgttcttcccaggaggccccacaagtgtttggctaagcacaggctctcgggaatttaacacttttggggaaggaataggccctttgtgctgagagagagtttttattcacatcttttttaggggatttgctgcagatatttataaaaagtaactccctctgtaccactgacccatttatacataaaaaagatgtgttgaa

SEQ ID NO: 182560 - DNA, 286 bp, Homo sapiens
  Payload ID: 15966
  Gene Symbol: SMTNL2
  Gene Name: smoothelin-like 2
  ENST ID: ENST00000572951
  CDS Start-End: 40-286
ctgtagagtttggatcacgatgaggccagtgagtcggagatgagaaagacctcaaactcctgcatcatggaaaatgggcaccagccgggggcagagaagaattcctctttcacgtggtctgtgccaagctctggctatggggcagtgacagcaagcaaacacagcaatagcccaccgctggtgacaccaccccagtcgcccgtgtccccgcagccgccagccataactcaggtccatcggcagggggagcgtcgcagggagctggtgaggtcgcagacgctgcccc

SEQ ID NO: 182561 - DNA, 3738 bp, Homo sapiens
  Payload ID: 15967
  Gene Symbol: SMO
  Gene Name: smoothened, frizzled class receptor
  Uniprot ID: Q99835
  ENST ID: ENST00000249373
  CDS Start-End: 281-2644
gggctgaagacaacttggattgcgaggctagggcttggggagtcgtgcatcccgttccgggcctccgcagcccaacatgggccccgggttccaaagtttgcgaagttgggcgccgaggggccggggcgcgcggagcgtccgggggggcccgggcccggattctctgggcgcacaggtcgcctgagccgcctccgcggccgccgaggtcgtgcgtgtggccggggggctccgaggagcaggcgggggcgccggggcttttgctgagttggcggggttggccatggccgctgcccgcccagcgcgggggccggagctcccgctcctggggctgctgctgctgctgctgctgggggacccgggccggggggcggcctcgagcgggaacgcgaccgggcctgggcctcggagcgcgggcgggagcgcgaggaggagcgcggcggtgactggccctccgccgccgctgagccactgcggccgggctgccccctgcgagccgctgcgctacaacgtgtgcctgggctcggtgctgccctacggggccacctccacactgctggccggagactcggactcccaggaggaagcgcacggcaagctcgtgctctggtcgggcctccggaatgccccccgctgctgggcagtgatccagcccctgctgtgtgccgtatacatgcccaagtgtgagaatgaccgggtggagctgcccagccgtaccctctgccaggccacccgaggcccctgtgccatcgtggagagggagcggggctggcctgacttcctgcgctgcactcctgaccgcttccctgaaggctgcacgaatgaggtgcagaacatcaagttcaacagttcaggccagtgcgaagtgcccttggttcggacagacaaccccaagagctggtacgaggacgtggagggctgcggcatccagtgccagaacccgctcttcacagaggctgagcaccaggacatgcacagctacatcgcggccttcggggccgtcacgggcctctgcacgctcttcaccctggccacattcgtggctgactggcggaactcgaatcgctaccctgctgttattctcttctacgtcaatgcgtgcttctttgtgggcagcattggctggctggcccagttcatggatggtgcccgccgagagatcgtctgccgtgcagatggcaccatgaggcttggggagcccacctccaatgagactctgtcctgcgtcatcatctttgtcatcgtgtactacgccctgatggctggtgtggtttggtttgtggtcctcacctatgcctggcacacttccttcaaagccctgggcaccacctaccagcctctctcgggcaagacctcctacttccacctgctcacctggtcactcccctttgtcctcactgtggcaatccttgctgtggcgcaggtggatggggactctgtgagtgggatttgttttgtgggctacaagaactaccgataccgtgcgggcttcgtgctggccccaatcggcctggtgctcatcgtgggaggctacttcctcatccgaggagtcatgactctgttctccatcaagagcaaccaccccgggctgctgagtgagaaggctgccagcaagatcaacgagaccatgctgcgcctgggcatttttggcttcctggcctttggctttgtgctcattaccttcagctgccacttctacgacttcttcaaccaggctgagtgggagcgcagcttccgggactatgtgctatgtcaggccaatgtgaccatcgggctgcccaccaagcagcccatccctgactgtgagatcaagaatcgcccgagccttctggtggagaagatcaacctgtttgccatgtttggaactggcatcgccatgagcacctgggtctggaccaaggccacgctgctcatctggaggcgtacctggtgcaggttgactgggcagagtgacgatgagccaaagcggatcaagaagagcaagatgattgccaaggccttctctaagcggcacgagctcctgcagaacccaggccaggagctgtccttcagcatgcacactgtgtcccacgacgggcccgtggcgggcttggcctttgacctcaatgagccctcagctgatgtctcctctgcctgggcccagcatgtcaccaagatggtggctcggagaggagccatactgccccaggatatttctgtcacccctgtggcaactccagtgcccccagaggaacaagccaacctgtggctggttgaggcagagatctccccagagctgcagaagcgcctgggccggaagaagaagaggaggaagaggaagaaggaggtgtgcccgctggcgccgccccctgagcttcacccccctgcccctgcccccagtaccattcctcgactgcctcagctgccccggcagaaatgcctggtggctgcaggtgcctggggagctggggactcttgccgacagggagcgtggaccctggtctccaacccattctgcccagagcccagtccccctcaggatccatttctgcccagtgcaccggcccccgtggcatgggctcatggccgccgacagggcctggggcctattcactcccgcaccaacctgatggacacagaactcatggatgcagactcggacttctgagcctgcagagcaggacctgggacaggaaagagaggaaccaataccttcaaggctcttcttcctcaccgagcatgcttccctaggatcccgtcttccagagaacctgtgggctgactgccctccgaagagagttctggatgtctggctcaaagcagcaggactgtgggaaagagcctaacatctccatggggaggcctcaccccagggacagggccctggagctcagggtccttgtttctgccctgccagctgcagcctggttggcagcatctgctccatcggggcagggggtatgcagagcttgtggtggggcaggaacggtggaggcagaggtgacagttcccagagtgggctttggtggccagggaggcagcctagcctatgtctggcagatgagggctggctgccgttttctgggctgatgggtgccctttcctggcagtctcagtccaaaagtgttgactgtgtcattagtcctttgtctaagtagggccagggcaccgtattcctctcccaggtgtttgtggggctggaaggacctgctcccacaggggccatgtcctctcttaataggtggcactaccccaaacccatcttttgttctcctatatcctccttcttctgttccatttcagttcagtttcagcggtgccaacctctttgcgtttcctttttgttgatgaggacccagagctgctgcacacactcacctctaaccccctcccctcgctgctgggccccatctccacaggagagactggttcagctctagggcctcagtctggagtgggataggagcagtgagtgacaaagcctctgaaagatgcatcatctcttcctcacacccatttagtgggggatgggtcctctagacttgaggggctaccctgggaagctgccgtagcttcagccaggcaagaaagcttccttcaacctgcatagccggtgggtgaggagattcccaccttccatagcctccaaacatgttcccaaggccccactttcaagaatcagacagcaggaagccatagatgctggctgggttccaggttatggggagaagaaatacagtcaataaaaggtttttgtataaa

SEQ ID NO: 182562 - DNA, 787 bp, Homo sapiens
  Payload ID: 15967
  Gene Symbol: SMO
  Gene Name: smoothened, frizzled class receptor
  ENST ID: ENST00000462420
  CDS Start-End: 1-454
ctccaatgagactctgtcctgcgtcatcatctttgtcatcgtgtactacgccctgatggctggtgtggtttggtttgtggtcctcacctatgcctggcacacttccttcaaagccctgggcaccacctaccagcctctctcgggcaagacctcctacttccacctgctcacctggtcactcccctttgtcctcactgtggcaatccttgctgtggcgcaggtggatggggactctgtgagtgggatttgttttgtgggctacaagaactaccgataccgtgcgggcttcgtgctggccccaatcggcctggtgctcatcgtgggaggctacttcctcatccgaggagtcatgactctgttctccatcaagagcaaccaccccgggctgctgagtgagaaggctgccagcaagatcaacgagaccatgctgcgcctggatgtcaggccaatgtgaccatcgggctgcccaccaagcagcccatccctgactgtgagatcaagaatcgcccgagccttctggtggagaagatcaacctgtttgccatgtttggaactggcatcgccatgagcacctgggtctggaccaaggccacgctgctcatctggaggcgtacctggtgcaggttgactgggcagagtgacgatgagccaaagcggatcaagaagagcaagatgattgccaaggccttctctaagcggcacgagctcctgcagaacccaggccaggagctgtccttcagcatgcacactgtgtcccacgacgggcccgtgggtgagcctcacccct

SEQ ID NO: 182563 - DNA, 582 bp, Homo sapiens
  Payload ID: 15967
  Gene Symbol: SMO
  Gene Name: smoothened, frizzled class receptor
  ENST ID: ENST00000475779
  CDS Start-End: 1-213
accaaggccacgctgctcatctggaggcgtacctggtgcaggttgactgggcagagtgacgatgagccaaagcggatcaagaagagcaagatgattgccaaggccttctctaagcggcacgagctcctgcagaacccaggccaggagctgtccttcagcatgcacactgtgtcccacgacgggcccgtggttgctctccctgggcaagagtaagtcagggttccaagaactggatttctggcctccagttaggccctttggggacgtgaggcccttctcttcagattctgaaggggtagagatcaccgtggttacaggcgggcttggcctttgacctcaatgagccctcagctgatgtctcctctgcctgggcccagcatgtcaccaagatggtggctcggagaggagccatactgccccaggatatttctgtcacccctgtggcaactccagtgcccccagaggaacaagccaacctgtggctggttgaggcagagatctccccagagctgcagaagcgcctgggccggaagaagaagaggaggaagaggaagaaggaggtgtgcccgctggcgccgcccc

SEQ ID NO: 182564 - DNA, 7122 bp, Homo sapiens
  Payload ID: 15968
  Gene Symbol: SMU1
  Gene Name: smu-1 suppressor of mec-8 and unc-52 homolog (C. elegans)
  Uniprot ID: Q2TAY7
  ENST ID: ENST00000397149
  CDS Start-End: 52-1593
cgcgactggccttgagggagagctggggcctgctcccggagagatacggctatgtcgatcgaaatcgaatcttcggatgtgatccgccttattatgcagtacttgaaggagaacagtttacatcgggcgttagccaccttgcaggaggagactactgtgtctctgaatactgtggacagcattgagagttttgtggctgacattaacagtggccattgggatactgtgttgcaggctatacagtctctgaaattgccagacaaaaccctcattgacctctatgaacaggttgttctggaattgatagagctccgtgaattgggtgctgccaggtcacttttgagacagactgatcccatgatcatgttaaaacaaacacagccagagcgatatattcatctggagaaccttttggccaggtcttactttgatcctcgtgaggcatacccagatggaagtagcaaagaaaagagaagagcagcaattgcccaggccttagctggcgaagtcagtgtggtgcctccatctcgtctcatggcattgctgggacaggcactgaagtggcagcagcatcagggattgcttcctcctggtatgaccatagatttgtttcgaggcaaggcagctgtcaaagatgtggaagaagaaaagtttcctacacaactgagcaggcatattaagtttggtcagaaatcacatgtggagtgtgctcgattttctccagatggtcagtatttggtcactgggtctgttgatggattcattgaagtatggaactttactactggaaaaatcagaaaggatcttaagtaccaggcccaagataactttatgatgatggatgatgctgtcctctgcatgtgtttcagcagagatacagaaatgttagcaactggggcccaagatggaaaaatcaaggtgtggaagattcagagtggacaatgtttaaggagatttgagagggcacacagtaagggtgtcacctgtctaagcttttctaaggatagcagtcagatccttagtgcttcttttgaccagacaattagaattcatggtttaaaatctgggaaaaccctgaaggaatttcgtggccattcctcctttgttaacgaagcaacatttacacaagatggacattacattattagtgcatcctctgatggcactgtaaagatctggaatatgaagaccacagaatgttcaaatacctttaaatccctgggcagcaccgcagggacagatattaccgtcaacagtgtgattctacttcctaaaaaccctgagcactttgtggtgtgcaacagatcaaacacggtggtcatcatgaacatgcaggggcagattgtcagaagcttcagttctggtaaaagagaaggtggggactttgtttgctgtgccctctctccccgtggtgaatggatctactgtgtaggggaggactttgtgctctactgtttcagtacagtcactggcaaactggagagaactttgacagtgcacgagaaggatgtgattggtattgcacatcaccctcatcagaacctgattgctacctacagtgaagatggactcctaaagctctggaaaccataattcaacttttctttttaaatcagctcgaaagcatgtacttaaatgaagcatattcatgtaatgtgcttttttttttttttgccagcttttctaagcaaatagattgtctgaattagtcacagaataattttgtgaaaattcatgtttaagtagcaactaccctttctttttttatatatttttaaggtattagtttatcttcttctaactggtgcagtcacttaatgttttcattaatcttcgacctggagagtgaaatactgatatttctagaaaaaaattctactcctctgattatttgaaatgctgaggaaaatgtccctcccatagtaaaacttgtaaataaggaactatatcatattcagtagctgtgttctgttccatctttttttttttttttgagatggagttttgcttgttgcccaggctggagtgcagcggcacgatcttggttcactgcaacctccgcctcccaggttcaagcgattctcttgcctcagcctcccgagtagctggggactacaggtgtgcgacaccatgcctggctaatttttttgtatttttagtagagatggggtttcaccatgttggccaggctggtctcaaactcctgacctcaaaggatccacccgccttggcctcccaaagtgctgggatcacaggcgtgagccaccatgcccggcccatctttttttttttttttttttttaaagatgttaataaactttatacctttctggagactttgttctaaaatgtacataaatgctcatctagttaacatatttacttagaatgtgggaggaggagtcacattattatccctgaatctcaagtacagcagaagtgaattcctgggatagtaggatagactaacatgtaaaaaggccaggtgatgcataggttctcatttcactgccctcagccttcctctccttctgagctgtgccttctcacatgttcagtcaactccagggaatattgtctccatcttctggatagaactagttgcaggatccgttacaagaattcagagttttggcatctcccctttgtatgttgtaggagaaggtttggcattgaaaatgtgctgttgttccaaagaaaaattagcaaaggacttgagatttagaaaagtctcctttgtaatgtgcatcattaccagttatctaaagaaaaacatgtaaaagccaacaaaacccttgaaaatattttgcatatggatgtctgtttcacgtttcaactgaagatgtatagagcacctctgatgatgaggaagataccatgctaggcagtactttcaagaacgtgagttcttatttctgcaggccttttgtgcccccttttaaatgttagcatttattaggtacaaactagtggggaaggtttttttaaaaagttttgcagtcttgtaatttacctttttaaaaaatttattttatttttctgagatggagtcttgctctgttgcccaggctggagtgcagtggtgccatctcagctaactgcaacttccacttcccaggttcaagcgattctcctgccttagcctcccaagtagctgggactacaggcgcatgccagcatgcctggctaatttttgtatttttagtagagcgggggttttgccatgttggccaggctggtcttgaactcctgacctcaggtgatccgcctgccctggcctcccaaagtgctgggattacaggcatgagccactgcgcccagccttgtaatttacctttgatggtgacctgaaatgcagtatgatcctatatgtggcacgtagtaatgttcagtgtttgctgaattaattctgggcagcactaagaaatccctctttcccagtcatattctataacacatttcccatttgccacaaaacctgcagctttttggtccaggtaatgacatttgctgccattttgatgatttaaaaatggtcgtgggagttgaacatagtcatgaattcaggattcctgagcatgtagacagtcatcccagtggaaagacacgttcacttaagagaagtttaagttagaggaaacagtttatgctaaaaaaatttttagaaaagtccttgagaatttttgatttagtcttgacctcatgaagctggtagttatgatgtgcatagtttgtatcaccgtttatgaagatggagaatctagtcagcacgtgttggtttattctaggaatttttagggaacacttctgttgctggcaccaggtgatgaatatggttaaaaaaagactcgtttctgcctaaacatagggaagaagagcaaattaaaaggagtaattaaaactgataaaagctcaagttacctttgtgatgatgaggcgggcagttaacgcgaaagggttgggaaaggcttcctggagggactagggggcggtctaagcacagggaacctaaccggggactccagtgtggcacagcggcaaggtatgtgctgggcaaaatgataggtgtcttgggagaccaggcaaagagagctggattaggagccgttaagtatatatttttcttctttttaaataaaataatgcactgggtgaacatgtaaacgctaagttgaaaatctgcctttcccaggtaacccttgttaatctttctacaacttcatttcgtacaaacctgaaaaacacactgattttgtctttaaatgggcacacgctgcttacactcctcggcgcctagcctttctgaagccccacgcggccgtccctccagcattgaaggctggggcagcccagctcccctccagcgcccttacagccagaccgcggcggggtcgggccgcgcacgcgcagggcggacggccggatctggggcgccgctgctccgggtggtcggaggtaggagtcccatcttgggtccagggccggtagagccccttaccgggggtagggagactgcgcacccgctagagccaactgtcagggcctgcagacgtcgggtgacgtcactgttacaaaattggcggtcacatcgtcttaagggccggtggcagcggctgcgcgaacgggagttggctgccgggaatcagtgctcacttccttctgaattgggcgtgtgcagtcggttcctagggaagtgctctgctgcagccaccagatttaacggatgctgctctctagcacttaacatagaagctaaactacctggcgttaaaattaattccatgagcataaggacatttgtcctatcccctattctgctgttgaattaatgactggaaaacattgcgcggaggtatttgggagtagtatggctttttttttttttttttttttaacagcaaatggtataaatctcaggtacaattcagtatcttcttcaccagttgttttttttcagcatgtattattactaccactaacggcctctgttgagcccttccttgctatgtaagcagccatatttaattctcagaacaatgtaatgagggtgcgcaaatgcacatgaagaaacaggtttccagacgtgaggcacctaactcagtccaacttgcacgaagctcgcattgaaaaccagatgtgactccgaagctaggttttttttctctcttgcctcactctcaatattgctgtcagttcctcctcaatctttaggtttgggcagggacaaagaatacatggattgttcctccacatgctgcaaacacattcacctaagcagagcacaggtagtgagatgagtagagagaactgaattagaggattctggatgtcagtctttgctgtcacttcttttggcttgtgctagaacagtggttcttacaagtgtcacgtgatagacacattctaaggtcctatcccagacctacagaatcagaaattggtggtggggcccagcaagcgtgctcaaatttgagagcaggtagactacagggtagtttccgcatatacaaaaggtgttttaattcttgctgtcagtctcagaagtttcatgctgagataaccaaatttaaatgataaaggtgcaagactgactcttaaaatcacattttttcaaattgccatagcttgctagtgttctcattcactgtgcttttacagcttcattttccactattttaagagaagaaattgctatgaagtgtatgtccaagtgaggaagttccctggtctgaggttgtttaaaacttacaataggccgggcacggtggctcaagcctgtaatcccagcactttgggaggccgaggtgggtggatcacgaggtcaggagttcaagaccaccctggccaacatggtgacaccctgtctctactaaggatacaaaattagccgggcatggtggcacacgcctgtagtcccagctacctaggaggctgaggcaggagaatagctggaacccgggaggcagaggttgcagtgagctgagactgtgccactgcactccagcctgggtgacagagcaagacttggtctcaaaaacaaaaaacaaaaaaaccaaacttggaatagcaagggctgcccattatttaaccttccacggcaattttaacagtggtattctgttccaagtggttaatattaaatccatgtgtcagtgttggtggctttcaaccttggctgcgcataatcattttgatgcttaggctacacccagccgagttatacagaatccctggagggtgggacctgatgagtgttttaatgtttcccgggtaattccaatggtagccaaggttaagaaccagtaccgtacgtacaaaaaagttgagaagctaatttcacgtacagaaaatttgccactgttccaagagcactctcaagcgacataattggcctctactcctattccctacaagtatgaatgggcaggagaagcatcacagagaaagcagagttagtgctggaacttgtatttttgtggatgatgaccttggttaatgttttttcataggctctgtttcataggctttgttttttcataggctctccctcattacattgttctgagaattaaatatggctgcttacatagtaatgaagggttcaacagaggctgttagtggtagtaataatacaagctgaaaaactacacagacaaacctatcagtttctgcctcttcaggatataactattaggttagtgcaaaagtaattgcggtttttgccattaaaagtaatggcacattacttttgcaccaaccgacctaatatgactttcttttagtgttcttaggatttttaattgtaaaacatgtaacaaattttcctaaacaattgtgcaattcagtggcattatttacgatgttacgcaaccactattgtatttccaaaatgtcatcaccctaaacagaagccctgtaacattgtcaattaacttctccttcccttcccctcagcctttggtactgtttctgcctcaatgcatttgtctaagtttagttcatataagtgaaattatacaatacttgtccttttttatctggcttatttcatttagcatgttttaaaggttcatccatgtatcaaacagtaaagtgcttcatatttgggggaagtataaaaag

SEQ ID NO: 182565 - DNA, 786 bp, Homo sapiens
  Payload ID: 15969
  Gene Symbol: SMYD5
  Gene Name: SMYD family member 5
  ENST ID: ENST00000258100
  CDS Start-End: 30-242
aagggtcataaggcggaggcgcgcccaagatggcggcctccatgtgcgacgtgttctccttctgcgtgggcgtggcgggccgcgcgcgggtctccgtggaagtccgtttcgtgagcagcgccaagggaaaggggctgtttgccacacagctcatccggaagggggagaccatcttcgtagaacggcccctggtggctgcacagtttctctggaatgcactttatcgctaccgagggcactagagaaggcagaggagaatgcccagaggctgaccgggaaaccaggccaggttctgcctcacccagagctgtgcactgtgcgcaaagacctccaccagaactgtccccattgccaagtgatgtactgcagtgcagaatgtcggttggcagccactgagcaataccaccaggtcctgtgcccaggcccctcccaggatgaccccttgcatcctctcaataagcttcaggaggcatggaggagtattcactacccacctgagactgcaagcatcatgttgatggctaggatggtggccacagtgaagcaggcgaaggacaaggaccgttggatcagactcttttcccagttttgtaacaaaacagccaatgaagaggaggaaattgtccataaacttctgggagacaaattcaagggccaactggaacttctgcggagactcttcacagaggccctctatgaggaagcagtcagccagtggttcactccagatggattccggtctctctttgctcttgttgggaccaatggccaaggaatcgggaccag

SEQ ID NO: 182566 - DNA, 2593 bp, Homo sapiens
  Payload ID: 15969
  Gene Symbol: SMYD5
  Gene Name: SMYD family member 5
  Uniprot ID: Q6GMV2
  ENST ID: ENST00000389501
  CDS Start-End: 46-1302
aggtcgaggcggggttaagggtcataaggcggaggcgcgcccaagatggcggcctccatgtgcgacgtgttctccttctgcgtgggcgtggcgggccgcgcgcgggtctccgtggaagtccgtttcgtgagcagcgccaagggaaaggggctgtttgccacacagctcatccggaagggggagaccatcttcgtagaacggcccctggtggctgcacagtttctctggaatgcactttatcgctaccgagcctgtgaccactgccttagggcactagagaaggcagaggagaatgcccagaggctgaccgggaaaccaggccaggttctgcctcacccagagctgtgcactgtgcgcaaagacctccaccagaactgtccccattgccaagtgatgtactgcagtgcagaatgtcggttggcagccactgagcaataccaccaggtcctgtgcccaggcccctcccaggatgaccccttgcatcctctcaataagcttcaggaggcatggaggagtattcactacccacctgagactgcaagcatcatgttgatggctaggatggtggccacagtgaagcaggcgaaggacaaggaccgttggatcagactcttttcccagttttgtaacaaaacagccaatgaagaggaggaaattgtccataaacttctgggagacaaattcaagggccaactggaacttctgcggagactcttcacagaggccctctatgaggaagcagtcagccagtggttcactccagatggattccggtctctctttgctcttgttgggaccaatggccaaggaatcgggaccagctccctaagccagtgggtccatgcctgtgacactctggagttgaagcctcaggaccgtgagcagcttgacgccttcattgaccagctatacaaggacatcgaggcagcaactggagagtttcttaactgtgaaggatctggcctctttgtgcttcagagctgctgcaaccacagttgtgtgcccaatgcagagacctcctttccagaaaacaacttccttttgcatgtcactgctctggaggatattaagccaggagaggaaatttgtatcagctacttggactgctgtcagcgggagcgcagccgccacagccgccacaagatcctcagggagaactatctatttgtctgttcctgtcccaaatgcctggcagaggctgatgaacccaatgtgacctcagaagaggaagaggaagaggaggaggaggaggaaggagagccagaagatgcagagctgggggatgagatgactgatgtgtgatgttgccctgcccagaaagggccctgccctagaccctgccagaaaagggggctcttcccccagagaagtggcttggagggaacttcccactcccattgcctgctttccccattccagccctctctgctagagggtaggagagagcctggatctctggccccaacccccaccagacctcatgccctggacactgctgctgagttggctcagactctgcactggcactgagcctttcacaactggcctccccttgaggttcctccactctagggtttgaggggctggaatcagggccagggcctaacagtgtttcttcccctcggccccacggcccatactcaccccttcacctgaggcttctcccctctcaacttgctgttgatttcttttgaggggtaaaagaaagaccgagttcattgaagcagagatgggaggtggtgaggcgtcctcacctccccccaccacagctgtggctggtaaggcaactgcttgaccactggcccagcaagcagaggcgggcaggaggatctgggcatcctgagccccttccctgaggctgtctcctgggaatgctggaccagggggattacttcccccacccacacccccatttggacatctggggaagtggagattaacccctcccccagactcgtgccttgcctctcaggacctggcacagtggctggccttatggagtatggaaaaggcctctgccttcctcaggagggacacatagtgggtcatcaccctttctcacacctgcttcccaatgagcactcagcagcatggctgagacctggggcttgacaggcctgcgctccttagattaggatgctctggtattcctggggccagttaaaatgggtcagtgaggggctctcctggcctcaatctccatctttagggtctccacagactaacattgaagtcttccagaaacctcgaggagctgggctagatacttcgagagtagccctgtcttgtcccctcctacccccagattagcaccacccctctcactcttgggttggatgctatgggaattacaacccatcactcccaatgcctccctttcctggaggagcctgctgcattctcctgctgagggatcccagagagggcaggtgcccaccccacaggccctttcctggaccatggagccaggtgaaacctgtctggccccttacccattgggttcttactccttcacaacggtcagcactcctctcccagcccccctgcccactgttctcaataaaatgtgagtggtgagaggcctctgcaggaa

SEQ ID NO: 182567 - DNA, 660 bp, Homo sapiens
  Payload ID: 15969
  Gene Symbol: SMYD5
  Gene Name: SMYD family member 5
  ENST ID: ENST00000413491
  CDS Start-End: 46-291
aggtcgaggcggggttaagggtcataaggcggaggcgcgcccaagatggcggcctccatgtgcgacgtgttctccttctgcgtgggcgtggcgggccgcgcgcgggtctccgtggaagtccgtttcgtgagcagcgccaagggaaaggggctgtttgccacacagctcatccggaagggggagaccatcttcgtagaacggcccctggtggctgcacagtttctctggaatgcactttatcgctaccgagaatggtgcctggcacatagcagctgctctgtagggctgtgaaagggatagatgtggcctctgctctcaagatattgttgtgtctggctctcaccgtcagcctgtgaccactgccttagggcactagagaaggcagaggagaatgcccagaggctgaccgggaaaccaggccaggttctgcctcacccagagctgtgcactgtgcgcaaagacctccaccagaactgtccccattgccaagtgatgtactgcagtgcagaatgtcggttggcagccactgagcaataccaccaggtcctgtgcccaggcccctcccaggatgaccccttgcatcctctcaataagcttcaggaggcatggaggagtattcactacccacctgagactgcaagcatcatgttgatggctagg

SEQ ID NO: 182568 - DNA, 584 bp, Homo sapiens
  Payload ID: 15969
  Gene Symbol: SMYD5
  Gene Name: SMYD family member 5
  ENST ID: ENST00000443900
  CDS Start-End: 169-584
ctccgtgcgcatttcctcccagcggaattcggccagcccgcgggaggcccttctgtggctgctcggggcggggctagggggctttgctgctgtatccctggaacggtgggcggggatgtgccgggcagagagaactgaggtgtaaaagagggagtcctcacgaacttcatgtgtgagatttggggaaaggggctgtttgccacacagctcatccggaagggggagaccatcttcgtagaacggcccctggtggctgcacagtttctctggaatgcactttatcgctaccgagcctgtgaccactgccttagggcactagagaaggcagaggagaatgcccagaggctgaccgggaaaccaggccaggttctgcctcacccagagctgtgcactgtgcgcaaagacctccaccagaactgtccccattgccaagtgatgtactgcagtgcagaatgtcggttggcagccactgagcaataccaccaggtcctgtgcccaggcccctcccaggatgaccccttgcatcctctcaataagcttcaggaggcatggaggagtattcactacccacctgagactgcaag

SEQ ID NO: 182569 - DNA, 246 bp, Homo sapiens
  Payload ID: 15969
  Gene Symbol: SMYD5
  Gene Name: SMYD family member 5
  ENST ID: ENST00000629411
  CDS Start-End: 1-246
atggcggcctccatgtgcgacgtgttctccttctgcgtgggcgtggcgggccgcgcgcgggtctccgtggaagtccgtttcgtgagcagcgccaagggaaaggggctgtttgccacacagctcatccggaagggggagaccatcttcgtagaacggcccctggtggctgcacagtttctctggaatgcactttatcgctaccgagaatggtgcctggcacatagcagctgctctgtagggctgtga

SEQ ID NO: 182570 - DNA, 1686 bp, Homo sapiens
  Payload ID: 15970
  Gene Symbol: SNAI1
  Gene Name: snail family zinc finger 1
  Uniprot ID: O95863
  ENST ID: ENST00000244050
  CDS Start-End: 62-856
tagcgagtggttcttctgcgctactgctgcgcgaatcggcgaccccagtgcctcgaccactatgccgcgctctttcctcgtcaggaagccctccgaccccaatcggaagcctaactacagcgagctgcaggactctaatccagagtttaccttccagcagccctacgaccaggcccacctgctggcagccatcccacctccggagatcctcaaccccaccgcctcgctgccaatgctcatctgggactctgtcctggcgccccaagcccagccaattgcctgggcctcccttcggctccaggagagtcccagggtggcagagctgacctccctgtcagatgaggacagtgggaaaggctcccagccccccagcccaccctcaccggctccttcgtccttctcctctacttcagtctcttccttggaggccgaggcctatgctgccttcccaggcttgggccaagtgcccaagcagctggcccagctctctgaggccaaggatctccaggctcgaaaggccttcaactgcaaatactgcaacaaggaatacctcagcctgggtgccctcaagatgcacatccgaagccacacgctgccctgcgtctgcggaacctgcgggaaggccttctctaggccctggctgctacaaggccatgtccggacccacactggcgagaagcccttctcctgtccccactgcagccgtgccttcgctgaccgctccaacctgcgggcccacctccagacccactcagatgtcaagaagtaccagtgccaggcgtgtgctcggaccttctcccgaatgtccctgctccacaagcaccaagagtccggctgctcaggatgtccccgctgaccctcgaggctccctcttcctctccatacctgcccctgcctgacagccttccccagctccagcaggaaggaccccacatccttctcactgccatggaattccctcctgagtgccccacttctggccacatcagccccacaggactttgatgaagaccattttctggttctgtgtcctctgcctgggctctggaagaggccttcccatggccatttctgtggagggagggcagctggcccccagccctgggggattcctgagctggcctgtctgcgtgggtttttgtatccagagctgtttggatacagctgctttgagctacaggacaaaggctgacagactcactgggaagctcccaccccactcaggggaccccactcccctcacacacacccccccacaaggaaccctcaggccaccctccacgaggtgtgactaactatgcaataatccacccccaggtgcagccccagggcctgcggaggcggtggcagactagagtctgagatgccccgagcccaggcagctatttcagcctcctgtttggtggggtggcacctgtttcccgggcaatttaacaatgtctgaaaagggactgtgagtaatggctgtcacttgtcgggggcccaagtggggtgctctggtctgaccgatgtgtctcccagaactattctgggggcccgacaggtgggcctgggaggaagatgtttacatttttaaaggtacactggtatttatatttcaaacattttgtatcaaggaaacgttttgtatagttatatgtacagtttattgatattcaataaagcagttaatttatatattaaaaa

SEQ ID NO: 182571 - DNA, 2099 bp, Homo sapiens
  Payload ID: 15971
  Gene Symbol: SNAI2
  Gene Name: snail family zinc finger 2
  Uniprot ID: O43623
  ENST ID: ENST00000020945
  CDS Start-End: 176-982
aaaacgggctcagttcgtaaaggagccgggtgacttcagaggcgccggcccgtccgtctgccgcacctgagcacggcccctgcccgagcctggcccgccgcgatgctgtagggaccgccgtgtcctcccgccggaccgttatccgcgccgggcgcccgccagacccgctggcaagatgccgcgctccttcctggtcaagaagcatttcaacgcctccaaaaagccaaactacagcgaactggacacacatacagtgattatttccccgtatctctatgagagttactccatgcctgtcataccacaaccagagatcctcagctcaggagcatacagccccatcactgtgtggactaccgctgctccattccacgcccagctacccaatggcctctctcctctttccggatactcctcatctttggggcgagtgagtccccctcctccatctgacacctcctccaaggaccacagtggctcagaaagccccattagtgatgaagaggaaagactacagtccaagctttcagacccccatgccattgaagctgaaaagtttcagtgcaatttatgcaataagacctattcaactttttctgggctggccaaacataagcagctgcactgcgatgcccagtctagaaaatctttcagctgtaaatactgtgacaaggaatatgtgagcctgggcgccctgaagatgcatattcggacccacacattaccttgtgtttgcaagatctgcggcaaggcgttttccagaccctggttgcttcaaggacacattagaactcacacgggggagaagcctttttcttgccctcactgcaacagagcatttgcagacaggtcaaatctgagggctcatctgcagacccattctgatgtaaagaaataccagtgcaaaaactgctccaaaaccttctccagaatgtctctcctgcacaaacatgaggaatctggctgctgtgtagcacactgagtgacgcaatcaatgtttactcgaacagaatgcatttcttcactccgaagccaaatgacaaataaagtccaaaggcattttctcctgtgctgaccaaccaaataatatgtatagacacacacacatatgcacacacacacacacacacccacagagagagagctgcaagagcatggaattcatgtgtttaaagataatcctttccatgtgaagtttaaaattactatatatttgctgatggctagattgagagaataaaagacagtaacctttctcttcaaagataaaatgaaaagcacattgcatcttttcttcctaaaaaaatgcaaagatttacattgctgccaaatcatttcaactgaaaagaacagtattgctttgtaatagagtctgtaataggatttcccataggaagagatctgccagacgcgaactcaggtgccttaaaaagtattccaagtttactccattacatgtcggttgtctggttgccattgttgaactaaagcctttttttgattacctgtagtgctttaaagtatatttttaaaagggaggaaaaaaataacaagaacaaaacacaggagaatgtattaaaagtatttttgttttgttttgtttttgccaattaacagtatgtgccttgggggaggagggaaagattagctttgaacattcctggcgcatgctccattgtcttactattttaaaacattttaataatttttgaaaattaattaaagatgggaataagtgcaaaagaggattcttacaaattcattaatgtacttaaactatttcaaatgcataccacaaatgcaataatacaataccccttccaagtgcctttttaaattgtatagttgatgagtcaatgtaaatttgtgtttatttttatatgattgaatgagttctgtatgaaactgagatgttgtctatagctatgtctataaacaacctgaagacttgtgaaatcaatgtttcttttttaaaaaacaattttcaagttttttttacaataaacagttttgatttaaaatctcgtttgtatactattttcagagactttacttgcttcatgattagtaccaaaccactgtacaaagaattgtttgtt

SEQ ID NO: 182572 - DNA, 2204 bp, Homo sapiens
  Payload ID: 15971
  Gene Symbol: SNAI2
  Gene Name: snail family zinc finger 2
  Uniprot ID: O43623
  ENST ID: ENST00000396822
  CDS Start-End: 359-1165
tctggaagccaggcgggcagggcagagaccccggctcctgcgcccctcctagctcccagagagcgtggatcgcgggcggggctcaccgagcgagctgtcccagagggaggagctgaaatctgaacctctcagctgtgattggatctttcttgcaaaagagaggaaaaaaaaaccctcccagccaaaacgggctcagttcgtaaaggagccgggtgacttcagaggcgccggcccgtccgtctgccgcacctgagcacggcccctgcccgagcctggcccgccgcgatgctgtagggaccgccgtgtcctcccgccggaccgttatccgcgccgggcgcccgccagacccgctggcaagatgccgcgctccttcctggtcaagaagcatttcaacgcctccaaaaagccaaactacagcgaactggacacacatacagtgattatttccccgtatctctatgagagttactccatgcctgtcataccacaaccagagatcctcagctcaggagcatacagccccatcactgtgtggactaccgctgctccattccacgcccagctacccaatggcctctctcctctttccggatactcctcatctttggggcgagtgagtccccctcctccatctgacacctcctccaaggaccacagtggctcagaaagccccattagtgatgaagaggaaagactacagtccaagctttcagacccccatgccattgaagctgaaaagtttcagtgcaatttatgcaataagacctattcaactttttctgggctggccaaacataagcagctgcactgcgatgcccagtctagaaaatctttcagctgtaaatactgtgacaaggaatatgtgagcctgggcgccctgaagatgcatattcggacccacacattaccttgtgtttgcaagatctgcggcaaggcgttttccagaccctggttgcttcaaggacacattagaactcacacgggggagaagcctttttcttgccctcactgcaacagagcatttgcagacaggtcaaatctgagggctcatctgcagacccattctgatgtaaagaaataccagtgcaaaaactgctccaaaaccttctccagaatgtctctcctgcacaaacatgaggaatctggctgctgtgtagcacactgagtgacgcaatcaatgtttactcgaacagaatgcatttcttcactccgaagccaaatgacaaataaagtccaaaggcattttctcctgtgctgaccaaccaaataatatgtatagacacacacacatatgcacacacacacacacacacccacagagagagagctgcaagagcatggaattcatgtgtttaaagataatcctttccatgtgaagtttaaaattactatatatttgctgatggctagattgagagaataaaagacagtaacctttctcttcaaagataaaatgaaaagcacattgcatcttttcttcctaaaaaaatgcaaagatttacattgctgccaaatcatttcaactgaaaagaacagtattgctttgtaatagagtctgtaataggatttcccataggaagagatctgccagacgcgaactcaggtgccttaaaaagtattccaagtttactccattacatgtcggttgtctggttgccattgttgaactaaagcctttttttgattacctgtagtgctttaaagtatatttttaaaagggaggaaaaaaataacaagaacaaaacacaggagaatgtattaaaagtatttttgttttgttttgtttttgccaattaacagtatgtgccttgggggaggagggaaagattagctttgaacattcctggcgcatgctccattgtcttactattttaaaacattttaataatttttgaaaattaattaaagatgggaataagtgcaaaagaggattcttacaaattcattaatgtacttaaactatttcaaatgcataccacaaatgcaataatacaataccccttccaagtgcctttttaaattgtatagttgatgagtcaatgtaaatttgtgtttatttttatatgattgaatgagttctgtatgaaactgagatgttgtctatagctatgtctataaacaacctgaagacttgtgaaatcaatgtttcttttttaaaaaacaattttcaagttttttttacaataaacagttttgatttaaaa

SEQ ID NO: 182573 - DNA, 1732 bp, Homo sapiens
  Payload ID: 15972
  Gene Symbol: SNAI3
  Gene Name: snail family zinc finger 3
  Uniprot ID: Q3KNW1
  ENST ID: ENST00000332281
  CDS Start-End: 88-966
cttcaagcgccggcggacgcagcagtccggacccaggcgcgcccctcccgccccagcccaccccggcctgccgcccgggaggggaacatgccgcgctccttcctggtgaaaacgcactccagccacagggtccccaactaccggcggctggagacgcagagagaaatcaatggtgcctgctctgcctgtggggggctggtggtgcccctcctcccccgagacaaggaggccccttctgtgcccggtgaccttccccagccctgggaccgctcctcggccgtcgcctgcatctccctgcccctcctgccacggatcgaggaagctctgggggcctctgggctggacgccttggaagtcagcgaggtcgaccctcgggccagccgggccgccattgtacccctcaaagacagcctgaaccacctcaacctgcccccactgctggtgctgcccacacggtggtccccgaccttgggcccagaccggcacggggctccggaaaaactgcttggggctgagcggatgccccgagccccgggcggctttgagtgcttccactgccacaaaccctaccacacgctggccgggctggccaggcaccggcagctgcactgccacctgcaggtggggcgtgtcttcacctgcaagtactgcgacaaggagtacaccagcctgggtgccctcaagatgcacatccgcactcacacgctgccctgcacctgcaagatctgtggcaaggccttctccaggccctggttactgcagggccatgtccgcacccacacaggggagaagccctatgcctgctcgcactgcagcagggcctttgccgaccgctccaaccttcgggcccatctgcaaacgcactcagacgccaagaagtaccggtgccggcgctgcaccaagaccttctcccgcatgtccctcctggcgcggcatgaggagtctggctgctgcccgggcccctgagaggcacgtggtcggcgcaggtaggagggatggtcctcaccgggagagctggcgtccctcctgcccccagaggagccaggagtctgggagggcggggcctggcctcacacttggtgcgtcctccacatctgcgtccaatcagaaccaaagaagtccagcgggggccactgggccggaggacactcccccaggcatcccaccgcgcggagcccactcagaggagactcctctcccggggaaggctttcatcagaacaagagccatggttccatttcgacacggccaggtctccggggctacccttccaagagtcagagcctcggggaggtggccgccagcatgggccggcactgccgccggatggctggcaaggctgcctagttccattgcagcagaaatgaacagttctgacttatagtgagcaccgccctgtggcccttcctcagtaggcacaactacctctcagccagcccccgccagcctttggtttggggtctgggacgagctgccccatgtcacacgtctatgtgcatgtgcacacacactcaaacatgtacacacacgtgccctccccacctcactagactctccgggagatggggcaggactgggagagcccacgattggtgatttgggtgtgttgggatgaggcggagtgcctgtgggatttgtcccggtcagagcctcagggggctggggtctcagggcactcagcttcccaggcaataacagccgtggggtaataaatggtctctgcacacctgca

SEQ ID NO: 182574 - DNA, 1030 bp, Homo sapiens
  Payload ID: 15973
  Gene Symbol: SNAPIN
  Gene Name: SNAP-associated protein
  Uniprot ID: O95295
  ENST ID: ENST00000368685
  CDS Start-End: 91-501
cgggcgccccctcacggggcggggcagtgcggcgcggctccggttcccggcggccctcgcggcaggtttcgggcttcaggacaattcgtgatggcgggggctggttccgccgctgtatcgggggcagggaccccggtggcggggcccacaggccgcgaccttttcgccgaagggctgctggagttcctgcgacccgctgtgcagcagctcgactctcacgtacacgccgtcagagagagccaggtagagctccgggaacaaattgacaacctagccacagaactgtgccgcataaatgaggatcagaaggtggccctggatcttgacccctatgttaagaagctacttaatgcccggcgacgcgttgtcttggttaacaacattctacagaatgctcaggaacgactgagacggctaaaccacagtgttgccaaggaaacagcccgcaggagagcaatgctggattcgggaatttacccccctggctccccaggcaaataacagatgagcctatggactcagtagcacaagtactgttccccagctgccttgtttcaacagacatgcaaagatcctaggagacagtccccatagaccttcagacattaaaaagggagccgtacagtttgtttgaagcacttcgtcttacccatttatgtaggggccccaggaaacctacacacagccagaatgaggttcccaaaggacttacattaattatggctcttgcttcctttcacaaatgagctgaggcctctacttttttttttaagctgcatacgtgaggcttaccttcttcaggactagttaaccagaggggcttcctttgtatgttacatgcctggttacatgggcctggacagcatgtcctctacctgtgacttctcattttcctgtttacactggggatttggagggggcaggcaaagtcaaagtgaatgacctctgtccacccacttttttattgcactggcttgaatacagtagcagtgttgatagaatcattttattcaataaatacttaaaatga

SEQ ID NO: 182575 - DNA, 5183 bp, Homo sapiens
  Payload ID: 15974
  Gene Symbol: SNRK
  Gene Name: SNF related kinase
  Uniprot ID: Q9NRH2
  ENST ID: ENST00000296088
  CDS Start-End: 305-2602
agctacccggcaccccctccccgcggccggcagcccgctcggtattatgattagcgctgggtgcggggtttcggcggccgggagggagttgtcggcgccgcggccgctgcggacggacgctcgcctgccggctgaggaaaaagaagcaactaacaaaacactgtgataataaggattattcagtatgcagtttgcaggatatccatgacgacattgaaaatgaattttttgtattcaccagatattcttatatgagaagatctattttaaacagtctaaatattttttcttctgttggaccagcatggcaggatttaagcgagggtatgatggaaagattgctggattatatgatctggataaaaccttgggtcgaggccattttgccgtggttaaacttgccaggcatgtctttacgggtgaaaaggtggcagtaaaagttattgacaagacaaaactggacactctagctactggtcatcttttccaggaagtgagatgcatgaaactagtgcagcatcctaacatcgtccgcctttatgaagttattgacacccagaccaaactatatcttattctagaacttggggatggaggagatatgtttgattatataatgaaacatgaggagggtcttaatgaagacttggccaagaagtattttgctcagatagttcatgctatatcttattgccataaactccatgtggttcacagagacttaaaaccagagaatgtagtcttctttgaaaaacaaggtcttgtaaagttgacagactttgggttcagcaacaaatttcaaccagggaagaagctcactacaagctgtggatctcttgcatattccgctccagaaattctgcttggtgatgagtatgatgcacctgcagtagatatttggagtctgggagtgatccttttcatgttggtgtgtgggcagccgccctttcaagaagccaatgacagtgaaacactgacaatgatcatggattgcaaatatacagtaccatcccatgtgtctaaagagtgtaaagacctaatcacacggatgctacagagagatcccaagagaagggcttctttagaagagattgaaaatcatccttggcttcagggagtggacccttcaccagctacaaagtataacattccccttgtgtcatacaaaaatctctcggaagaggagcacaacagcatcattcagcgcatggtgcttggggacatagcggatcgagacgccattgtagaagccctggaaaccaacaggtataaccatatcacagccacatacttcctgctggctgaaaggatcctgagagaaaagcaagagaaagaaatacagaccagatctgcaagcccgagcaatatcaaggcccagtttaggcagtcatggccaaccaaaattgatgtaccccaggaccttgaggatgacctcacggccactcctttgtcccacgcgactgtccctcagtctcctgctcgggctgctgacagtgtcctcaatggccacaggagcaaaggcctgtgtgactcagctaagaaagatgacctccctgagttggctggaccagcactctctacggtgccacccgcaagcttaaaacccacagccagtgggcggaagtgtctgttcagggtggaagaagatgaagaggaagatgaggaggacaagaaacccatgtccctctcaacacaagtggttttgcgccggaagccatctgtaaccaaccgcctgacatccaggaagagtgcgcccgtcctcaaccagatctttgaggaaggggaatctgacgatgagtttgacatggatgagaatctgcctcccaagttgagcaggttaaagatgaatatagcttctccaggtacagttcacaaacgctaccaccggaggaaaagtcagggccggggctccagctgcagtagttcggagaccagtgatgatgattctgaaagccggcggcggctcgataaagatagcgggttcacctactcctggcaccgacgggatagcagcgaggggccccctggcagtgagggggatggcgggggccagagcaagccaagcaatgccagtggaggggtggacaaggccagccccagtgagaacaatgctggtgggggcagtccctccagcggctcgggtggcaaccccaccaatacatcgggtaccacacgccgctgtgccggccccagcaactccatgcagctggcctctcgcagtgctggggagctcgttgagagcctcaaactcatgagcctctgcctcggctcccagcttcatgggagcaccaagtacattattgatccacagaatggcttgtcattttccagtgtgaaagtccaagagaaatctacgtggaaaatgtgcattagctccacagggaatgcagggcaggtccctgcagtgggcggcataaagtttttctctgaccacatggcagataccaccactgaattggaacggataaagagcaagaacctgaaaaataacgtgctgcagctacctctgtgcgaaaagaccatctctgtgaacatccagcggaaccctaaggaggggctgctgtgcgcatccagcccagccagctgttgccatgtcatctgactgtggccccatctggccgctagcacgcttcctgctcagagcagtgaagaccggctcacttcactgttccatttggttttactattttaaagtgggcgttaggagcaattatttattacctttccatttgttcgcctgatgatgtgacaatgcatggtctttgtgcatgctgctagacacttttctttcccagccgaaaagcctattatgtaatttttacattcataattttaatgtggatgatcaggattaaatcaagatatatatctggaacctcttataaatggagcacttagaaatttgttgttctgcacttaacctagagagagaaaaaatgcttttctttgtgaaaaatctgaattcctgtcctgaccttctgtgatgtggaaaccctaggctctgagacacactctctggtgtctgagacagaaccaaagcaataacgttgtgatgcccacaggcctggagccagctagcgaccttgtgccgcccagctgtccatggcccgtgcagagcagaggacagtgagtgtctgcactgagaaccttaaaccacagttgaacatacccacacctgtttgtcttaagctatagtgtaaaaacaaagtttgggctctgaaaatttaactgaaaaagatttccttgtttttgtaataggtgagataaagtacttagatttataaggcagcttcccctgtagtgataaattacaagcagacaatcttattttgtaatgtgatgaagtgatgatgtcttaactctacttagagagtgtatgtctgtctaacagaacaaaaagatgctctgtgtaaattccttcctgtagggcacactgcaggatttccatgtagatagaagaactatagggcctagtacagaaggtgcacacaaatgttggcaaagtcaaaaccccatgaattaaaacctactggaatttggtttttaggagtttggtaattagattatctcttttgttattttcattcagttatatcctttggctcagctagctttgaaattggctgatgaaaaaatatacataaaagggtaaaattcacacatacagcaaacaaaaatgcacaaagcctgcttcgtaacttttttttctggaattgtttttcactttgcctttttctgccaaaacaataatcaaagaactcttgctttaacctattcctgtacaaagactgtttttgaccagataatcatctgttgtggcattctatcttgtaggacactgtatattgcaaattgctgattatggaaggggccagttgctgttttttcatgcagtgccctgggagtcttaaaagcagtgcttagcaacattggtgatagcatgtggctgggacccagggcccttccccactcttcagccccgagtcatgtgtctgaggtgacggactgagacgcatctggtcctgtaattcagagagtgggcacatcaccaaagaactgcattgctgtggtcactgtttcttcaagtacacactgactctgctactttaggataaatatattttactcagaactctgaatttcacagtatacttactaaactaagtaaaaatgatacttaaaatacttattttactttctagacctaggctagatgttttaagctacagctctagttcattgtgatatttataatttgaaagctatgagaatagatgtgtgggtgaagccatagaacatatttgcttgaaattcttgagcagggatcttataaagggccagaaataagatgtgtggttcacatagatagtgagcgtaacatctgtattaaacataggagagaagtttataaagggcattggcaataaactctttgttgcagctgttttccaagcagtgtaaatactttttcctgtgattatgtatagccttggaatggcaccttttaactaacccatatgtgtttggtttcaatggttttttatattcagatgtatatatggtgctcactttaggatcagcagtgttgaccatttatgctgcatagctgtattatagccttattagttgtgtggttgacccttggggtatacaaatgtcagtctgagtggtgtcttactcctttgtttataagtgaatgattgtgcatgttttgtatgtcatagtatgtcgtcacataaaagggagggagcgaaaaaccattacattaagataatattggaccaaactacttacttgctctaaacagttacttgtaccccttaacctgtcttcaaaagttgcatatagttacagtagtgtataaattaaatattgtggaaaaacagtcttgtatttttctgtatgtgtgtatatatatataattatgtacttctggcaattctatctgtatttaaagatgtgacaatcttgacaccaattttaagaatagctgtgagaccgaattaaagataatccctaccaagtgaaaattgatgtgtgttaagagggtacagaattatcaactgatttggtcagttgcttccaatgctggttgatttccctcattgtgtaaacattgacaggtatgtgacaaatgggaaaaaaaatccaaataataaagtgacatattggtgttcagcaat

SEQ ID NO: 182576 - DNA, 2961 bp, Homo sapiens
  Payload ID: 15974
  Gene Symbol: SNRK
  Gene Name: SNF related kinase
  Uniprot ID: Q9NRH2
  ENST ID: ENST00000454177
  CDS Start-End: 383-2680
cacagtgacgcgcagcccgcgcaggcgcagctacccggcaccccctccccgcggccggcagcccgctcggtattatgattagcgctgggtgcggggtttcggcggccgggagggagttgtcggcgccgcggccgctgcggacggacgctcgcctgccggctgagagcctcctgagagtctgctttggcatccccagcatttggcctctgctcaggaaaaagaagcaactaacaaaacactgtgataataaggattattcagtatgcagtttgcaggatatccatgacgacattgaaaatgaattttttgtattcaccagatattcttatatgagaagatctattttaaacagtctaaatattttttcttctgttggaccagcatggcaggatttaagcgagggtatgatggaaagattgctggattatatgatctggataaaaccttgggtcgaggccattttgccgtggttaaacttgccaggcatgtctttacgggtgaaaaggtggcagtaaaagttattgacaagacaaaactggacactctagctactggtcatcttttccaggaagtgagatgcatgaaactagtgcagcatcctaacatcgtccgcctttatgaagttattgacacccagaccaaactatatcttattctagaacttggggatggaggagatatgtttgattatataatgaaacatgaggagggtcttaatgaagacttggccaagaagtattttgctcagatagttcatgctatatcttattgccataaactccatgtggttcacagagacttaaaaccagagaatgtagtcttctttgaaaaacaaggtcttgtaaagttgacagactttgggttcagcaacaaatttcaaccagggaagaagctcactacaagctgtggatctcttgcatattccgctccagaaattctgcttggtgatgagtatgatgcacctgcagtagatatttggagtctgggagtgatccttttcatgttggtgtgtgggcagccgccctttcaagaagccaatgacagtgaaacactgacaatgatcatggattgcaaatatacagtaccatcccatgtgtctaaagagtgtaaagacctaatcacacggatgctacagagagatcccaagagaagggcttctttagaagagattgaaaatcatccttggcttcagggagtggacccttcaccagctacaaagtataacattccccttgtgtcatacaaaaatctctcggaagaggagcacaacagcatcattcagcgcatggtgcttggggacatagcggatcgagacgccattgtagaagccctggaaaccaacaggtataaccatatcacagccacatacttcctgctggctgaaaggatcctgagagaaaagcaagagaaagaaatacagaccagatctgcaagcccgagcaatatcaaggcccagtttaggcagtcatggccaaccaaaattgatgtaccccaggaccttgaggatgacctcacggccactcctttgtcccacgcgactgtccctcagtctcctgctcgggctgctgacagtgtcctcaatggccacaggagcaaaggcctgtgtgactcagctaagaaagatgacctccctgagttggctggaccagcactctctacggtgccacccgcaagcttaaaacccacagccagtgggcggaagtgtctgttcagggtggaagaagatgaagaggaagatgaggaggacaagaaacccatgtccctctcaacacaagtggttttgcgccggaagccatctgtaaccaaccgcctgacatccaggaagagtgcgcccgtcctcaaccagatctttgaggaaggggaatctgacgatgagtttgacatggatgagaatctgcctcccaagttgagcaggttaaagatgaatatagcttctccaggtacagttcacaaacgctaccaccggaggaaaagtcagggccggggctccagctgcagtagttcggagaccagtgatgatgattctgaaagccggcggcggctcgataaagatagcgggttcacctactcctggcaccgacgggatagcagcgaggggccccctggcagtgagggggatggcgggggccagagcaagccaagcaatgccagtggaggggtggacaaggccagccccagtgagaacaatgctggtgggggcagtccctccagcggctcgggtggcaaccccaccaatacatcgggtaccacacgccgctgtgccggccccagcaactccatgcagctggcctctcgcagtgctggggagctcgttgagagcctcaaactcatgagcctctgcctcggctcccagcttcatgggagcaccaagtacattattgatccacagaatggcttgtcattttccagtgtgaaagtccaagagaaatctacgtggaaaatgtgcattagctccacagggaatgcagggcaggtccctgcagtgggcggcataaagtttttctctgaccacatggcagataccaccactgaattggaacggataaagagcaagaacctgaaaaataacgtgctgcagctacctctgtgcgaaaagaccatctctgtgaacatccagcggaaccctaaggaggggctgctgtgcgcatccagcccagccagctgttgccatgtcatctgactgtggccccatctggccgctagcacgcttcctgctcagagcagtgaagaccggctcacttcactgttccatttggttttactattttaaagtgggcgttaggagcaattatttattacctttccatttgttcgcctgatgatgtgacaatgcatggtctttgtgcatgctgctagacacttttctttcccagccgaaaagcctattatgtaatttttacattcataattttaatgtggatgatcaggattaaatcaagatatatatctggaacctcttat

SEQ ID NO: 182577 - DNA, 1995 bp, Homo sapiens
  Payload ID: 15974
  Gene Symbol: SNRK
  Gene Name: SNF related kinase
  ENST ID: ENST00000437827
  CDS Start-End: 120-1799
atgattagcgctgggtgcggggtttcggcggccgggagggagttgtcggcgccgcggccgctgcggacggacgctcgcctgccggctgagatatttggagtctgggagtgatccttttcatgttggtgtgtgggcagccgccctttcaagaagccaatgacagtgaaacactgacaatgatcatggattgcaaatatacagtaccatcccatgtgtctaaagagtgtaaagacctaatcacacggatgctacagagagatcccaagagaagggcttctttagaagagattgaaaatcatccttggcttcagggagtggacccttcaccagctacaaagtataacattccccttgtgtcatacaaaaatctctcggaagaggagcacaacagcatcattcagcgcatggtgcttggggacatagcggatcgagacgccattgtagaagccctggaaaccaacaggtataaccatatcacagccacatacttcctgctggctgaaaggatcctgagagaaaagcaagagaaagaaatacagaccagatctgcaagcccgagcaatatcaaggcccagtttaggcagtcatggccaaccaaaattgatgtaccccaggaccttgaggatgacctcacggccactcctttgtcccacgcgactgtccctcagtctcctgctcgggctgctgacagtgtcctcaatggccacaggagcaaaggcctgtgtgactcagctaagaaagatgacctccctgagttggctggaccagcactctctacggtgccacccgcaagcttaaaacccacagccagtgggcggaagtgtctgttcagggtggaagaagatgaagaggaagatgaggaggacaagaaacccatgtccctctcaacacaagtggttttgcgccggaagccatctgtaaccaaccgcctgacatccaggaagagtgcgcccgtcctcaaccagatctttgaggaaggggaatctgacgatgagtttgacatggatgagaatctgcctcccaagttgagcaggttaaagatgaatatagcttctccaggtacagttcacaaacgctaccaccggaggaaaagtcagggccggggctccagctgcagtagttcggagaccagtgatgatgattctgaaagccggcggcggctcgataaagatagcgggttcacctactcctggcaccgacgggatagcagcgaggggccccctggcagtgagggggatggcgggggccagagcaagccaagcaatgccagtggaggggtggacaaggccagccccagtgagaacaatgctggtgggggcagtccctccagcggctcgggtggcaaccccaccaatacatcgggtaccacacgccgctgtgccggccccagcaactccatgcagctggcctctcgcagtgctggggagctcgttgagagcctcaaactcatgagcctctgcctcggctcccagcttcatgggagcaccaagtacattattgatccacagaatggcttgtcattttccagtgtgaaagtccaagagaaatctacgtggaaaatgtgcattagctccacagggaatgcagggcaggtccctgcagtgggcggcataaagtttttctctgaccacatggcagataccaccactgaattggaacggataaagagcaagaacctgaaaaataacgtgctgcagctacctctgtgcgaaaagaccatctctgtgaacatccagcggaaccctaaggaggggctgctgtgcgcatccagcccagccagctgttgccatgtcatctgactgtggccccatctggccgctagcacgcttcctgctcagagcagtgaagaccggctcacttcactgttccatttggttttactattttaaagtgggcgttaggagcaattatttattacctttccatttgttcgcctgatgatgtgacaatgcatggtctttgtgcatgctgctagacacttttctttcccagccg

SEQ ID NO: 182578 - DNA, 5128 bp, Homo sapiens
  Payload ID: 15974
  Gene Symbol: SNRK
  Gene Name: SNF related kinase
  Uniprot ID: Q9NRH2
  ENST ID: ENST00000429705
  CDS Start-End: 245-2542
gcagctacccggcaccccctccccgcggccggcagcccgctcggtattatgattagcgctgggtgcggggtttcggcggccgggagggagttgtcggcgccgcggccgctgcggacggacgctcgcctgccggctgagatatccatgacgacattgaaaatgaattttttgtattcaccagatattcttatatgagaagatctattttaaacagtctaaatattttttcttctgttggaccagcatggcaggatttaagcgagggtatgatggaaagattgctggattatatgatctggataaaaccttgggtcgaggccattttgccgtggttaaacttgccaggcatgtctttacgggtgaaaaggtggcagtaaaagttattgacaagacaaaactggacactctagctactggtcatcttttccaggaagtgagatgcatgaaactagtgcagcatcctaacatcgtccgcctttatgaagttattgacacccagaccaaactatatcttattctagaacttggggatggaggagatatgtttgattatataatgaaacatgaggagggtcttaatgaagacttggccaagaagtattttgctcagatagttcatgctatatcttattgccataaactccatgtggttcacagagacttaaaaccagagaatgtagtcttctttgaaaaacaaggtcttgtaaagttgacagactttgggttcagcaacaaatttcaaccagggaagaagctcactacaagctgtggatctcttgcatattccgctccagaaattctgcttggtgatgagtatgatgcacctgcagtagatatttggagtctgggagtgatccttttcatgttggtgtgtgggcagccgccctttcaagaagccaatgacagtgaaacactgacaatgatcatggattgcaaatatacagtaccatcccatgtgtctaaagagtgtaaagacctaatcacacggatgctacagagagatcccaagagaagggcttctttagaagagattgaaaatcatccttggcttcagggagtggacccttcaccagctacaaagtataacattccccttgtgtcatacaaaaatctctcggaagaggagcacaacagcatcattcagcgcatggtgcttggggacatagcggatcgagacgccattgtagaagccctggaaaccaacaggtataaccatatcacagccacatacttcctgctggctgaaaggatcctgagagaaaagcaagagaaagaaatacagaccagatctgcaagcccgagcaatatcaaggcccagtttaggcagtcatggccaaccaaaattgatgtaccccaggaccttgaggatgacctcacggccactcctttgtcccacgcgactgtccctcagtctcctgctcgggctgctgacagtgtcctcaatggccacaggagcaaaggcctgtgtgactcagctaagaaagatgacctccctgagttggctggaccagcactctctacggtgccacccgcaagcttaaaacccacagccagtgggcggaagtgtctgttcagggtggaagaagatgaagaggaagatgaggaggacaagaaacccatgtccctctcaacacaagtggttttgcgccggaagccatctgtaaccaaccgcctgacatccaggaagagtgcgcccgtcctcaaccagatctttgaggaaggggaatctgacgatgagtttgacatggatgagaatctgcctcccaagttgagcaggttaaagatgaatatagcttctccaggtacagttcacaaacgctaccaccggaggaaaagtcagggccggggctccagctgcagtagttcggagaccagtgatgatgattctgaaagccggcggcggctcgataaagatagcgggttcacctactcctggcaccgacgggatagcagcgaggggccccctggcagtgagggggatggcgggggccagagcaagccaagcaatgccagtggaggggtggacaaggccagccccagtgagaacaatgctggtgggggcagtccctccagcggctcgggtggcaaccccaccaatacatcgggtaccacacgccgctgtgccggccccagcaactccatgcagctggcctctcgcagtgctggggagctcgttgagagcctcaaactcatgagcctctgcctcggctcccagcttcatgggagcaccaagtacattattgatccacagaatggcttgtcattttccagtgtgaaagtccaagagaaatctacgtggaaaatgtgcattagctccacagggaatgcagggcaggtccctgcagtgggcggcataaagtttttctctgaccacatggcagataccaccactgaattggaacggataaagagcaagaacctgaaaaataacgtgctgcagctacctctgtgcgaaaagaccatctctgtgaacatccagcggaaccctaaggaggggctgctgtgcgcatccagcccagccagctgttgccatgtcatctgactgtggccccatctggccgctagcacgcttcctgctcagagcagtgaagaccggctcacttcactgttccatttggttttactattttaaagtgggcgttaggagcaattatttattacctttccatttgttcgcctgatgatgtgacaatgcatggtctttgtgcatgctgctagacacttttctttcccagccgaaaagcctattatgtaatttttacattcataattttaatgtggatgatcaggattaaatcaagatatatatctggaacctcttataaatggagcacttagaaatttgttgttctgcacttaacctagagagagaaaaaatgcttttctttgtgaaaaatctgaattcctgtcctgaccttctgtgatgtggaaaccctaggctctgagacacactctctggtgtctgagacagaaccaaagcaataacgttgtgatgcccacaggcctggagccagctagcgaccttgtgccgcccagctgtccatggcccgtgcagagcagaggacagtgagtgtctgcactgagaaccttaaaccacagttgaacatacccacacctgtttgtcttaagctatagtgtaaaaacaaagtttgggctctgaaaatttaactgaaaaagatttccttgtttttgtaataggtgagataaagtacttagatttataaggcagcttcccctgtagtgataaattacaagcagacaatcttattttgtaatgtgatgaagtgatgatgtcttaactctacttagagagtgtatgtctgtctaacagaacaaaaagatgctctgtgtaaattccttcctgtagggcacactgcaggatttccatgtagatagaagaactatagggcctagtacagaaggtgcacacaaatgttggcaaagtcaaaaccccatgaattaaaacctactggaatttggtttttaggagtttggtaattagattatctcttttgttattttcattcagttatatcctttggctcagctagctttgaaattggctgatgaaaaaatatacataaaagggtaaaattcacacatacagcaaacaaaaatgcacaaagcctgcttcgtaacttttttttctggaattgtttttcactttgcctttttctgccaaaacaataatcaaagaactcttgctttaacctattcctgtacaaagactgtttttgaccagataatcatctgttgtggcattctatcttgtaggacactgtatattgcaaattgctgattatggaaggggccagttgctgttttttcatgcagtgccctgggagtcttaaaagcagtgcttagcaacattggtgatagcatgtggctgggacccagggcccttccccactcttcagccccgagtcatgtgtctgaggtgacggactgagacgcatctggtcctgtaattcagagagtgggcacatcaccaaagaactgcattgctgtggtcactgtttcttcaagtacacactgactctgctactttaggataaatatattttactcagaactctgaatttcacagtatacttactaaactaagtaaaaatgatacttaaaatacttattttactttctagacctaggctagatgttttaagctacagctctagttcattgtgatatttataatttgaaagctatgagaatagatgtgtgggtgaagccatagaacatatttgcttgaaattcttgagcagggatcttataaagggccagaaataagatgtgtggttcacatagatagtgagcgtaacatctgtattaaacataggagagaagtttataaagggcattggcaataaactctttgttgcagctgttttccaagcagtgtaaatactttttcctgtgattatgtatagccttggaatggcaccttttaactaacccatatgtgtttggtttcaatggttttttatattcagatgtatatatggtgctcactttaggatcagcagtgttgaccatttatgctgcatagctgtattatagccttattagttgtgtggttgacccttggggtatacaaatgtcagtctgagtggtgtcttactcctttgtttataagtgaatgattgtgcatgttttgtatgtcatagtatgtcgtcacataaaagggagggagcgaaaaaccattacattaagataatattggaccaaactacttacttgctctaaacagttacttgtaccccttaacctgtcttcaaaagttgcatatagttacagtagtgtataaattaaatattgtggaaaaacagtcttgtatttttctgtatgtgtgtatatatatataattatgtacttctggcaattctatctgtatttaaagatgtgacaatcttgacaccaattttaagaatagctgtgagaccgaattaaagataatccctaccaagtgaaaattgatgtgtgttaagagggtacagaattatcaactgatttggtcagttgcttccaatgctggttgatttccctcattgtgtaaacattgacaggtatgtgacaaatgggaaaaaaaatccaaataataaagtgacatattggtgttcagcaatataaa

SEQ ID NO: 182579 - DNA, 6649 bp, Homo sapiens
  Payload ID: 15975
  Gene Symbol: SHPRH
  Gene Name: SNF2 histone linker PHD RING helicase, E3 ubiquitin protein ligase
  Uniprot ID: Q149N8
  ENST ID: ENST00000275233
  CDS Start-End: 400-5451
gtctttggcctccgggaccagggagggaggacgctggttgtcctggagcccgggaagctcaagggctgagagggagccgctgcgcgagtcttccccacctcttcccgatcccggactagcgaacttcggaccaccacgtccctccggggataaagtggggtcgtgggaaaggaggctgtgcttctcctcatgcactggggcctgcggtgtttgtctcgagcgtccaacacactaggatccgggagtccgtcgtcacgctccttggcctcgcggtcgcttgtttgctcggcctgctgggagcgatccggcgctgacagccccgctcagactccgggagccgcttgtgggtctttcggaagataactgaagttcacagttaccagccaagaaaacttgaaaatgagcagccgacggaaacgtgctcctccagtgagggtagatgaggaaaagaggcagcagcttcattggaatatgcatgaggacagaaggaatgaacctatcatcataagtgatgatgacgagcagccctgcccaggttcagatacctcttctgctcattatatcattctaagtgatagtctaaaggaagaagtggctcacagagataagaagaggtgttcaaaagtggtgagcttctcaaaaccaattgaaaaagaagagactgttggtattttttcccctttgtctgtaaagttaaatattgtgatttctccctatcattttgataattcctggaaagcatttctaggagaattaactcttcagcttcttcctgcacagagtttaattgaaaatttttccgaaaggagtattacattgatgagttcagagtcaagcaatcagttcctgatttatgttcattcaaaaggtgaagatgtagagaaacaaaaaaaagaaccgatgagtatttgtgacaagggtattctggtggagtcatccttcagtggtgaaatgttagaagatttggggtggctacaaaagaagagaagaataaaactctatcagaaaccagaaggaaatcacattatcaaggttggaatttatcttttggaagctggcctagcaaaactagacttcttgagtgatgcaaattcaagaatgaaaaagttcaatcagctcatgaagaaagtaatggaaaagttacacaattctattattccagatgtgttggaagaggatgaagatgatccggagagtgagccagagggacaagacattgacgagctgtatcactttgtgaaacaaacacatcagcaagaaacgcagtccatccaagtggatgtccagcatcctgcattgatccctgtgttgagaccctaccaaagagaggctgtcaattggatgctacaacaagagtgtttcagaagcagtcctgctactgaaagtgccctgcacttcttatggcgagagattgttacatctgagggtctgaaactctactataatccatatacaggctgcatcattcgtgagtacccaaattctgggccgcagttgcttggtggaattttagcagatgagatgggtcttggaaagacagtggaggttttggctctgattctgacacatactcgacaagatgtcaagcaagatgctctcactcttcccgagggaaaagtggtgaattattttattccgtcacattattttggaggaaaactgaaaaagacagaaatccagaatatcgaatttgaaccaaaagaaaaagttcaatgccctcctacacgtgtgatgatactgacagctgtgaaagaaatgaatggaaaaaaaggagtgtccatcctttccatctataagtatgtcagttctatatatagatacgatgttcaacggaacaggagtcttttgaaacggatgctgaaatgtttaatttttgaaggtctcgtgaaacagatcaaaggccatggtttttctgggacttttacattgggaaagaattacaaggaagaggatatatgtgataaaacaaaaaagcaggcagtagggagtccaaggaaaattcagaaagaaactagaaaatcagggaacaaggacacagattctgaatacttgccatcagacacctctgatgatgatgatgatccttactattattattataagtccaggagaaatcgcagtaaattgaggaaaaagcttgttccatccacaaaaaaaggaaaaagtcaaccatttatcaatcccgattcacaaggtcactgtccagctactagcgactctggaataactgatgttgctatgtctaaaagtacatgtatctctgaattcaaccaagaacatgaaacagaggactgtgctgaatctctaaatcatgctgatagtgatgtaccaccttctaataccatgagtccctttaacacctctgattaccgctttgagtgtatatgtggtgaacttgatcagatagatcgtaagcctcgtgttcaatgcctgaagtgtcacctgtggcaacatgcaaagtgtgtgaattatgatgagaaaaatctgaagatcaagcctttttactgcccccactgccttgttgcaatggaaccagtgtcaacaagagcaactctgatcatctctccaagttccatctgtcaccagtgggtggatgagatcaacaggcatgtgaggtcgtcatctcttcgagtcttggtatatcaaggagtgaagaaagatggctttttacaacctcattttttggcagaacaggatatagttatcattacctatgatgtactgcgttcagaattaaattatgtcgatatcccacatagcaatagtgaggatgggcgtcgcctacggaaccagaagcgctatatggctatcccgagccccctggtagctgtggagtggtggaggatctgccttgatgaagctcagatggttgagtgtcccacagtaaaagctgcagaaatggcccagcgtttgagtgggattaatcgatggtgtatcagtggcactccagtacagagaggattagaggatctttttgggttagtggtctttcttggtattgaaccttactgtgtcaaacactggtgggttcgacttctctatcggccttactgcaagaagaatcctcagcatctctacagctttattgccaagatactgtggaggtctgcaaagaaagatgtgattgaccaaatccaaataccaccacaaaccgaagaaatacactggctccacttttctccagtggaaaggcatttctatcaccgtcagcatgaggtgtgctgccaggatgtggtggtaaaactcaggaagatttctgactgggctctgaagctcagcagcctagacagaaggactgtcacctctatcctgtatccattgctgaggctcagacaggcctgctgtcacccacaggctgttcgtggagagttcttgccactccaaaaaagcaccatgacaatggaagagctgctgacatctttgcagaagaaatgtggaactgaatgtgaagaagcacatcgacagctagtttgtgctctcaatggcttagcaggcattcatattattaaaggtgagtatgccttggcagcagaattgtacagagaagtgttgcgctcctcggaggaacacaaaggaaaactcaaaactgattcacttcaaagacttcatgctacccataacttgatggaattgttgatagccaggcacccagggataccacctaccttgcgtgatggccgacttgaggaagaggccaaacagctgcgagagcactacatgagcaagtgtaatacagaagttgctgaagcccagcaagctttatatcctgtgcagcagaccatccatgagcttcaaagaaagattcattctaattctccttggtggctaaatgtgatccacagagcaatagaatttactattgatgaggagctagttcagcgagtgcgaaatgaaataaccagcaactacaagcaacaaactggcaagctttctatgtcagagaagttccgtgattgcagaggtcttcagttcttacttacaacacaaatggaagagctaaataaatgccagaagctagtaagagaggctgtaaaaaacctggagggacctccatctcgtaatgttattgagtctgcaacagtctgtcacctccgaccagccagacttcctctcaactgctgtgtcttttgtaaagctgatgaattgttcacagagtatgaatcaaagctattttccaacacagtcaaaggccagactgcaatatttgaggagatgatagaagatgaagaaggactggtggatgatcgagcacctaccaccacccggggtctctgggcaataagtgagacagagcgatctatgaaagcaatactatcatttgcaaaatcacataggtttgatgttgaatttgttgatgaaggaagcacttcaatggatctctttgaagcatggaagaaggaatataagttgcttcatgaatattggatggctctgaggaatcgtgtgtctgctgttgatgaacttgcaatggctacagaacgactaagagtgcgtgatcctagggagccaaagcctaatccgcctgttcttcatatcattgaaccacatgaggtagaacaaaaccgaataaaactactaaatgataaagctgttgctacatcacagcttcagaaaaaacttgggcagcttctttacctaactaatttggagaagtctcaagataaaacatcgggaggtgttaatccagaaccttgcccaatctgtgctcgacagctaggaaaacagtgggcggtactgacctgtggtcactgtttctgtaatgaatgcatttctataattattgaacaatacagcgtgggatctcacagaagctccattaagtgtgcaatctgccgccagaccacatctcacaaagaaatctcgtatgtctttacctcagagaaagcaaaccaggaggaggacatccctgtgaagggcagccattctacaaaagtggaagctgtggtcagaactctgatgaaaatacagcttagagatccaggggccaaagcactcgttttctcaacgtggcaagatgtattagatattatttcaaaagctcttactgacaacaacatggaatttgcacaaatcagtcgtgttaagacatttcaggagaacctttcagcatttaaacgtgatccccaaatcaatattttgctgctgcccctgcacacaggttctaatggattaactatcattgaagcaactcatgttctcttggtggagcccatattgaaccctgcccatgagcttcaggccatagggagggtgcaccgaattggacagacaaaacctactattgtacacagattcttaattaaagcaacaatagaagaaagaatgcaggcaatgctgaaaactgctgagagaagtcacacgaactcatcagcaaagcattcagaggcctctgtcttgactgtggctgacctggcagacctatttaccaaagaaactgaagagcttgaatgaactacacttgattcattccatggactttagtgtattaataaactttcatagctgtagagcaaagttacaagttttaaaaacccagtagataacagtaacactgttcctagttgaatgaatttgtttattgttctggttatacagtggcttagtacttattgagtccttttcaatatactgtttccaaaagatctataaagattcttaattttacactcctaataaaacatttattttttgtcccaaatagtatctatatctgatgatgcaagggaattaagagaggtaatgtgtacttttcttatgataagatcactcataaaacagttggaataagaaagtaaactagtctagttttatatgacctggtatattgaacaaacatagatctcagttttggaagggccttcagtatctttagcacatgattcaccaatatcttgttagtaatattttaagtagatggtgaattatattaacccattttttgagtaggcttataccataactttacacctagtaattttgcagtaatacaactccttacaataagttaatgttagacagttatttgtttcttctgcatcttgctactgaaaacaaaaacaatgaaaatattcatatttctattatgtgtaaagtggtgttagtgtaaacagttaactccaaatagattttttaatgtattaatgattaccttaaaattatctgctttccctactcttaatttttcttattgttaaagtttttatatgttgtaagattgatgtatctgtaaatattgcagtttttatgattttgttttattataacatggaaatatggcagggttttttttttaatcattattatactgatgtcttggattctttttctttcccatgttcttgtgtaactagactttttagccagtgatatctgaattcatggtagagttgttatttcactccagttgttcctcccttaagcacgagtctttgaccttttgaacaagagaatgccatgttcacataagcaaatcgttgcaagtgataataacgaagtgtttcttcttctgtgaggaattaatggactttgaaattgctgaataaggagtagcttgttacatcctagccatttgatgtaatacaaatgttcttatttggcttccttttctttgagccttcagagttttaaaggaccctctttgaccctcagg

SEQ ID NO: 182580 - DNA, 5237 bp, Homo sapiens
  Payload ID: 15975
  Gene Symbol: SHPRH
  Gene Name: SNF2 histone linker PHD RING helicase, E3 ubiquitin protein ligase
  ENST ID: ENST00000367503
  CDS Start-End: 300-2282
actcatgaagccagcgcaggagaaagggggcggggtgctctgacgagcgcgttcgccttgaccccacgctacagcgcgcgcccggcagctaggcgctgtggtttctgggtctcccgggggacccctacacgttccggcaaaaagcgctcgtgcccacctcaagcccatgttcggtgggtggcgaatgcgtgcccgtgatctgctgggtctgtagaggagcgcaggcctggtgcaaacagactcaagaggctcggagaaccagcttggagttcacagttaccagccaagaaaacttgaaaatgagcagccgacggaaacgtgctcctccagtgagggtagatgaggaaaagaggcagcagcttcattggaatatgcatgaggacagaaggaatgaacctatcatcataagtgatgatgacgagcagccctgcccaggtgaagatgtagagaaacaaaaaaaagaaccgatgagtatttgtgacaagggtattctggtggagtcatccttcagtggtgaaatgttagaagatttggggtggctacaaaagaagagaagaataaaactctatcagaaaccagaaggaaatcacattatcaaggttggaatttatcttttggaagctggcctagcaaaactagacttcttgagtgatgcaaattcaagaatgaaaaagttcaatcagctcatgaagaaagtaatggaaaagttacacaattctattattccagatgtgttggaagaggatgaagatgatccggagagtgagccagagggacaagacattgacgagctgtatcactttgtgaaacaaacacatcagcaagaaacgcagtccatccaagtggatgtccagcatcctgcattgatccctgtgttgagaccctaccaaagagaggctgtcaattggatgctacaacaagagtgtttcagaagcagtcctgctactgaaagtgccctgcacttcttatggcgagagattgttacatctgagggtctgaaactctactataatccatatacaggctgcatcattcgtgagtacccaaattctgggccgcagttgcttggtggaattttagcagatgagatgggtcttggaaagacagtggaggttttggctctgattctgacacatactcgacaagatgtcaagcaagatgctctcactcttcccgagggaaaagtggtgaattattttattccgtcacattattttggaggaaaactgaaaaagacagaaatccagaatatcgaatttgaaccaaaagaaaaagttcaatgccctcctacacgtgtgatgatactgacagctgtgaaagaaatgaatggaaaaaaaggagtgtccatcctttccatctataagtatgtcagttctatatatagatacgatgttcaacggaacaggagtcttttgaaacggatgctgaaatgtttaatttttgaaggtctcgtgaaacagatcaaaggccatggtttttctgggacttttacattgggaaagaattacaaggaagaggatatatgtgataaaacaaaaaagcaggcagtagggagtccaaggaaaattcagaaagaaactagaaaatcagggaacaaggacacagattctgaatacttgccatcagacacctctgatgatgatgatgatccttactattattattataagtccaggagaaatcgcagtaaattgaggaaaaagcttgttccatccacaaaaaaaggaaaaagtcaaccatttatcaatcccgattcacaaggtcactgtccagctactagcgactctggaataactgatgttgctatgtctaaaagtacatgtatctctgaattcaaccaagaacatgaaacagaggactgtgctgaatctctaaatcatgctgatagtgatgtaccaccttctaataccatgagtccctttaacacctctgattaccgctttgagtgtatatgtggtgaacttgatcagatagatcgtaagcctcgtgttcaatgcctgaagtgtcacctgtggcaacatgcaaagtgtgtgaattatgatgagaaaaatctgaagatcaagcctttttactgcccccactgccttgttgcaatggaaccagtgtcaacaagagcaactctgatcatctctccaagttccatctgtcaccagtgggtggatgagatcaacaggcatgtgaggtcgtcatctcttcgagtcttggtatatcaaggagtgaagaaagatggctttttacaacctcattttggcagaacaggatatagttatcattacctatgatgtactgcgttcagaattaaattatgtcgatatcccacatagcaatagtgaggatgggcgtcgcctacggaaccagaagcgctatatggctatcccgagccccctggtagctgtggagtggtggaggatctgccttgatgaagctcagatggttgagtgtcccacagtaaaagctgcagaaatggcccagcgtttgagtgggattaatcgatggtgtatcagtggcactccagtacagagaggattagaggatctttttgggttagtggtctttcttggtattgaaccttactgtgtcaaacactggtgggttcgacttctctatcggccttactgcaagaagaatcctcagcatctctacagctttattgccaagatactgtggaggtctgcaaagaaagatgtgattgaccaaatccaaataccaccacaaaccgaagaaatacactggctccacttttctccagtggaaaggcatttctatcaccgtcagcatgaggtgtgctgccaggatgtggtggtaaaactcaggaagatttctgactgggctctgaagctcagcagcctagacagaaggactgtcacctctatcctgtatccattgctgaggctcagacaggcctgctgtcacccacaggctgttcgtggagagttcttgccactccaaaaaaggcaccatgacaatggaagagctgctgacatctttgcagaagaaatgtggaactgaatgtgaagaagcacatcgacagctagtttgtgctctcaatggcttagcaggcattcatattattaaaggtagaaggtgagtatgccttggcagcagaattgtacagagaagtgttgcgctcctcggaggaacacaaaggaaaactcaaaactgattcacttcaaagacttcatgctacccataacttgatggaattgttgatagccaggcacccagggataccacctaccttgcgtgatggccgacttgaggaagaggccaaacagctgcgagagcactacatgagcaagtgtaatacagaagttgctgaagcccagcaagctttatatcctgtgcagcagaccatccatgagcttcaaagaaagattcattctaattctccttggtggctaaatgtgatccacagagcaatagaatttactattgatgaggagctagttcagcgagtgcgaaatgaaataaccagcaactacaagcaacaaactggcaagctttctatgtcagagaagttccgtgattgcagaggtcttcagttcttacttacaacacaaatggaagagctaaataaatgccagaagctagtaagagaggctgtaaaaaacctggagggacctccatctcgtaatgttattgagtctgcaacagtctgtcacctccgaccagccagacttcctctcaactgctgtgtcttttgtaaagctgatgaattgttcacagagtatgaatcaaagctattttccaacacagtcaaaggccagactgcaatatttgaggagatgatagaagatgaagaaggactggtggatgatcgagcacctaccaccacccggggtctctgggcaataagtgagacagagcgatctatgaaagcaatactatcatttgcaaaatcacataggtttgatgttgaatttgttgatgaaggaagcacttcaatggatctctttgaagcatggaagaaggaatataagttgcttcatgaatattggatggctctgaggaatcgtgtgtctgctgttgatgaacttgcaatggctacagaacgactaagagtgcgtgatcctagggagccaaagcctaatccgcctgttcttcatatcattgaaccacatgaggtagaacaaaaccgaataaaactactaaatgataaagctgttgctacatcacagcttcagaaaaaacttgggcagcttctttacctaactaatttggagaaggtattgtttctaagacatgctactttttcctatgctgcattatcataaaccactttagtgactcctttcataattaatggtgcaaattgttgtaattagtatttggtgttatatgagtcagaacactacctatgtctctacaatagcttcagagatcacaaaagaatattgtatctatagaaatttattatgcagatgatatagaaggcatgcactcgatagtagagaacaatgtaaatggactgtagttcaaagccttgaatagtaaaagtattaaaacatatctcggtgaaactggcataatgcaatttatacacatgcattcattcatcaatacaaaaatatgttgtaatttgttatttgaaactgaagtgtgtttcgaaagctactaaatcagagtacatggtaataaaggtagacttcaaatattaagtaattcaaaacacatgttctgagttatgatctgagtattatactggacactgatgaattggtgggtcattgattaaatataatttcattttattgcaggaatcatattttgctagttggcagagaaccttctaggggcaagatatagtagtaaatatttggatagggcaagtgaggacaagatatagatttgaattcttctggaaactggtataacatatacttaagtgaatcagtaaatctcagacaaaatgaaaagttagacattcattatagatatagcatggcgactaagaaggtagactttggaactggacagcccaattttgaatcgtgactcaactgttttctagatatgtgactttatttaagttattcacctttcctcgcatcatcagtaaaatgagaatgatgtcaacactactttatagtatagggctgtcttgaggattgtgtgaattaatacatgtaaaatgctagagtagtttctgatctattaagcactttctaggtttttgctgctattaatattattaagatcattattactgttatgattaccaacacttattctgaaag

SEQ ID NO: 182581 - DNA, 7201 bp, Homo sapiens
  Payload ID: 15975
  Gene Symbol: SHPRH
  Gene Name: SNF2 histone linker PHD RING helicase, E3 ubiquitin protein ligase
  Uniprot ID: Q149N8
  ENST ID: ENST00000367505
  CDS Start-End: 266-5317
gtgctctgacgagcgcgttcgccttgaccccacgctacagcgcgcgcccggcagctaggcgctgtggtttctgggtctcccgggggacccctacacgttccggcaaaaagcgctcgtgcccacctcaagcccatgttcggtgggtggcgaatgcgtgcccgtgatctgctgggtctgtagaggagcgcaggcctggtgcaaacagactcaagaggctcggagaaccagcttggagttcacagttaccagccaagaaaacttgaaaatgagcagccgacggaaacgtgctcctccagtgagggtagatgaggaaaagaggcagcagcttcattggaatatgcatgaggacagaaggaatgaacctatcatcataagtgatgatgacgagcagccctgcccaggttcagatacctcttctgctcattatatcattctaagtgatagtctaaaggaagaagtggctcacagagataagaagaggtgttcaaaagtggtgagcttctcaaaaccaattgaaaaagaagagactgttggtattttttcccctttgtctgtaaagttaaatattgtgatttctccctatcattttgataattcctggaaagcatttctaggagaattaactcttcagcttcttcctgcacagagtttaattgaaaatttttccgaaaggagtattacattgatgagttcagagtcaagcaatcagttcctgatttatgttcattcaaaaggtgaagatgtagagaaacaaaaaaaagaaccgatgagtatttgtgacaagggtattctggtggagtcatccttcagtggtgaaatgttagaagatttggggtggctacaaaagaagagaagaataaaactctatcagaaaccagaaggaaatcacattatcaaggttggaatttatcttttggaagctggcctagcaaaactagacttcttgagtgatgcaaattcaagaatgaaaaagttcaatcagctcatgaagaaagtaatggaaaagttacacaattctattattccagatgtgttggaagaggatgaagatgatccggagagtgagccagagggacaagacattgacgagctgtatcactttgtgaaacaaacacatcagcaagaaacgcagtccatccaagtggatgtccagcatcctgcattgatccctgtgttgagaccctaccaaagagaggctgtcaattggatgctacaacaagagtgtttcagaagcagtcctgctactgaaagtgccctgcacttcttatggcgagagattgttacatctgagggtctgaaactctactataatccatatacaggctgcatcattcgtgagtacccaaattctgggccgcagttgcttggtggaattttagcagatgagatgggtcttggaaagacagtggaggttttggctctgattctgacacatactcgacaagatgtcaagcaagatgctctcactcttcccgagggaaaagtggtgaattattttattccgtcacattattttggaggaaaactgaaaaagacagaaatccagaatatcgaatttgaaccaaaagaaaaagttcaatgccctcctacacgtgtgatgatactgacagctgtgaaagaaatgaatggaaaaaaaggagtgtccatcctttccatctataagtatgtcagttctatatatagatacgatgttcaacggaacaggagtcttttgaaacggatgctgaaatgtttaatttttgaaggtctcgtgaaacagatcaaaggccatggtttttctgggacttttacattgggaaagaattacaaggaagaggatatatgtgataaaacaaaaaagcaggcagtagggagtccaaggaaaattcagaaagaaactagaaaatcagggaacaaggacacagattctgaatacttgccatcagacacctctgatgatgatgatgatccttactattattattataagtccaggagaaatcgcagtaaattgaggaaaaagcttgttccatccacaaaaaaaggaaaaagtcaaccatttatcaatcccgattcacaaggtcactgtccagctactagcgactctggaataactgatgttgctatgtctaaaagtacatgtatctctgaattcaaccaagaacatgaaacagaggactgtgctgaatctctaaatcatgctgatagtgatgtaccaccttctaataccatgagtccctttaacacctctgattaccgctttgagtgtatatgtggtgaacttgatcagatagatcgtaagcctcgtgttcaatgcctgaagtgtcacctgtggcaacatgcaaagtgtgtgaattatgatgagaaaaatctgaagatcaagcctttttactgcccccactgccttgttgcaatggaaccagtgtcaacaagagcaactctgatcatctctccaagttccatctgtcaccagtgggtggatgagatcaacaggcatgtgaggtcgtcatctcttcgagtcttggtatatcaaggagtgaagaaagatggctttttacaacctcattttttggcagaacaggatatagttatcattacctatgatgtactgcgttcagaattaaattatgtcgatatcccacatagcaatagtgaggatgggcgtcgcctacggaaccagaagcgctatatggctatcccgagccccctggtagctgtggagtggtggaggatctgccttgatgaagctcagatggttgagtgtcccacagtaaaagctgcagaaatggcccagcgtttgagtgggattaatcgatggtgtatcagtggcactccagtacagagaggattagaggatctttttgggttagtggtctttcttggtattgaaccttactgtgtcaaacactggtgggttcgacttctctatcggccttactgcaagaagaatcctcagcatctctacagctttattgccaagatactgtggaggtctgcaaagaaagatgtgattgaccaaatccaaataccaccacaaaccgaagaaatacactggctccacttttctccagtggaaaggcatttctatcaccgtcagcatgaggtgtgctgccaggatgtggtggtaaaactcaggaagatttctgactgggctctgaagctcagcagcctagacagaaggactgtcacctctatcctgtatccattgctgaggctcagacaggcctgctgtcacccacaggctgttcgtggagagttcttgccactccaaaaaagcaccatgacaatggaagagctgctgacatctttgcagaagaaatgtggaactgaatgtgaagaagcacatcgacagctagtttgtgctctcaatggcttagcaggcattcatattattaaaggtgagtatgccttggcagcagaattgtacagagaagtgttgcgctcctcggaggaacacaaaggaaaactcaaaactgattcacttcaaagacttcatgctacccataacttgatggaattgttgatagccaggcacccagggataccacctaccttgcgtgatggccgacttgaggaagaggccaaacagctgcgagagcactacatgagcaagtgtaatacagaagttgctgaagcccagcaagctttatatcctgtgcagcagaccatccatgagcttcaaagaaagattcattctaattctccttggtggctaaatgtgatccacagagcaatagaatttactattgatgaggagctagttcagcgagtgcgaaatgaaataaccagcaactacaagcaacaaactggcaagctttctatgtcagagaagttccgtgattgcagaggtcttcagttcttacttacaacacaaatggaagagctaaataaatgccagaagctagtaagagaggctgtaaaaaacctggagggacctccatctcgtaatgttattgagtctgcaacagtctgtcacctccgaccagccagacttcctctcaactgctgtgtcttttgtaaagctgatgaattgttcacagagtatgaatcaaagctattttccaacacagtcaaaggccagactgcaatatttgaggagatgatagaagatgaagaaggactggtggatgatcgagcacctaccaccacccggggtctctgggcaataagtgagacagagcgatctatgaaagcaatactatcatttgcaaaatcacataggtttgatgttgaatttgttgatgaaggaagcacttcaatggatctctttgaagcatggaagaaggaatataagttgcttcatgaatattggatggctctgaggaatcgtgtgtctgctgttgatgaacttgcaatggctacagaacgactaagagtgcgtgatcctagggagccaaagcctaatccgcctgttcttcatatcattgaaccacatgaggtagaacaaaaccgaataaaactactaaatgataaagctgttgctacatcacagcttcagaaaaaacttgggcagcttctttacctaactaatttggagaagtctcaagataaaacatcgggaggtgttaatccagaaccttgcccaatctgtgctcgacagctaggaaaacagtgggcggtactgacctgtggtcactgtttctgtaatgaatgcatttctataattattgaacaatacagcgtgggatctcacagaagctccattaagtgtgcaatctgccgccagaccacatctcacaaagaaatctcgtatgtctttacctcagagaaagcaaaccaggaggaggacatccctgtgaagggcagccattctacaaaagtggaagctgtggtcagaactctgatgaaaatacagcttagagatccaggggccaaagcactcgttttctcaacgtggcaagatgtattagatattatttcaaaagctcttactgacaacaacatggaatttgcacaaatcagtcgtgttaagacatttcaggagaacctttcagcatttaaacgtgatccccaaatcaatattttgctgctgcccctgcacacaggttctaatggattaactatcattgaagcaactcatgttctcttggtggagcccatattgaaccctgcccatgagcttcaggccatagggagggtgcaccgaattggacagacaaaacctactattgtacacagattcttaattaaagcaacaatagaagaaagaatgcaggcaatgctgaaaactgctgagagaagtcacacgaactcatcagcaaagcattcagaggcctctgtcttgactgtggctgacctggcagacctatttaccaaagaaactgaagagcttgaatgaactacacttgattcattccatggactttagtgtattaataaactttcatagctgtagagcaaagttacaagttttaaaaacccagtagataacagtaacactgttcctagttgaatgaatttgtttattgttctggttatacagtggcttagtacttattgagtccttttcaatatactgtttccaaaagatctataaagattcttaattttacactcctaataaaacatttattttttgtcccaaatagtatctatatctgatgatgcaagggaattaagagaggtaatgtgtacttttcttatgataagatcactcataaaacagttggaataagaaagtaaactagtctagttttatatgacctggtatattgaacaaacatagatctcagttttggaagggccttcagtatctttagcacatgattcaccaatatcttgttagtaatattttaagtagatggtgaattatattaacccattttttgagtaggcttataccataactttacacctagtaattttgcagtaatacaactccttacaataagttaatgttagacagttatttgtttcttctgcatcttgctactgaaaacaaaaacaatgaaaatattcatatttctattatgtgtaaagtggtgttagtgtaaacagttaactccaaatagattttttaatgtattaatgattaccttaaaattatctgctttccctactcttaatttttcttattgttaaagtttttatatgttgtaagattgatgtatctgtaaatattgcagtttttatgattttgttttattataacatggaaatatggcagggttttttttttaatcattattatactgatgtcttggattctttttctttcccatgttcttgtgtaactagactttttagccagtgatatctgaattcatggtagagttgttatttcactccagttgttcctcccttaagcacgagtctttgaccttttgaacaagagaatgccatgttcacataagcaaatcgttgcaagtgataataacgaagtgtttcttcttctgtgaggaattaatggactttgaaattgctgaataaggagtagcttgttacatcctagccatttgatgtaatacaaatgttcttatttggcttccttttctttgagccttcagagttttaaaggaccctctttgaccctcaggacttattagctcccagttagctgcctggaaaactcatagaaccattccctagatcccatttgtccgagaggctttggtgcttagttaaggtgcattttcttactctaggtttatagagtgatgtaattcaactgaagaaaacacacacatgcttttggtgcttattcttcagttaaaaggaggtatccattgattcttttatatgaaattaaatcaaactgttatttttatagctcttcacatattaaaaagagctttcatgtacatttacgtgtttaatttacccaacaatcttgtgaagttgatataattaatatctttactgttttaaaggtagagaactgaagttcagatatattgaaactttcttaggacatgtagcaagtaaacagtggagcccaggtcccctgactccatatcttacattcttttactaataacatgtcatgctgagattcagaaggcccatgcttataatttaaaaatgagactatttcagtatttctttgtgtttgttttctactattcctttctgagctatgttttagagaaaacaatttgatatgcttcaattttgtaaaatcaaattacatatatataaaaaaacctatctgtattagacaaaaactgtttttatttatttctgtaagatatccattaaataaatattttagtggaaatgaaaa

SEQ ID NO: 182582 - DNA, 468 bp, Homo sapiens
  Payload ID: 15975
  Gene Symbol: SHPRH
  Gene Name: SNF2 histone linker PHD RING helicase, E3 ubiquitin protein ligase
  ENST ID: ENST00000417762
  CDS Start-End: 1-390
attttgctgctgcccctgcacacaggttctaatggattaactatcattgaagcaactcatgttctcttggtggagcccatattgaaccctgcccatgagcttcaggccatagggagggtgcaccgaattggacagacaaaacctactattgtacacagattcttaattaaagcaacaatagaagaaagaatgcaggcaatgctgaaaactgctgagagaaggttttttgaggaacaggcgttattttgttttcatgacatcaccccattctcccacccctggtccctgacaactgccattctacagttgagagatttggtgatttgtgagttgttttttatttactttaaaaattttttgatttgttttttatcatctttttcaatttagagatgttttgcacaagtaaaaattatggggcttattcagtaatacatgtctgtaaggaataaacattaagaaacccaa

SEQ ID NO: 182583 - DNA, 11660 bp, Homo sapiens
  Payload ID: 15975
  Gene Symbol: SHPRH
  Gene Name: SNF2 histone linker PHD RING helicase, E3 ubiquitin protein ligase
  ENST ID: ENST00000433355
  CDS Start-End: 1-1350
tggaatatgcatgaggacagaaggaatgaacctatcatcataagtgatgatgacgagcagccctgcccaggttcagatacctcttctgctcattatatcattctaagtgatagtctaaaggaagaagtggctcacagagataagaagaggtgttcaaaagtggtgagcttctcaaaaccaattgaaaaagaagagactgttggtattttttcccctttgtctgtaaagttaaatattgtgatttctccctatcattttgataattcctggaaagcatttctaggagaattaactcttcagcttcttcctgcacagagtttaattgaaaatttttccgaaaggagtattacattgatgagttcagagtcaagcaatcagttcctgatttatgttcattcaaaaggtgaagatgtagagaaacaaaaaaaagaaccgatgagtatttgtgacaagggtattctggtggagtcatccttcagtggtgaaatgttagaagatttggggtggctacaaaagaagagaagaataaaactctatcagaaaccagaaggaaatcacattatcaaggttggaatttatcttttggaagctggcctagcaaaactagacttcttgagtgatgcaaattcaagaatgaaaaagttcaatcagctcatgaagaaagtaatggaaaagttacacaattctattattccagatgtgttggaagaggatgaagatgatccggagagtgagccagagggacaagacattgacgagctgtatcactttgtgaaacaaacacatcagcaagaaacgcagtccatccaagtggatgtccagcatcctgcattgatccctgtgttgagaccctaccaaagagaggctgtcaattggatgctacaacaagagtgtttcagaagcagtcctgctactgaaagtgccctgcacttcttatggcgagagattgttacatctgagggtctgaaactctactataatccatatacaggctgcatcattcgtgagtacccaaattctgggccgcagttgcttggtggaattttagcagatgagatgggtcttggaaagacagtggaggttttggctctgattctgacacatactcgacaagatgtcaagcaagatgctctcactcttcccgagggaaaagtggtgaattattttattccgtcacattattttggaggaaaactgaaaaagacagaaatccagaatatcgaatttgaaccaaaagaaaaagttcaatgccctccatatccttttacatttagctacacgtgtgatgatactgacagctgtgaaagaaatgaatggaaaaaaaggagtgtccatcctttccatctataagtatgtcagttctatatatagatacgatgttcaacggaacaggagtcttttgaaacggatgctgaaatgtttaatttttgaaggtctcgtgaaacagatcaaaggccatggtttttctgggacttttacattgggaaagaattacaaggaagaggatatatgtgataaaacaaaaaagcaggcagtagggagtccaaggaaaattcagaaagaaactagaaaatcagggaacaaggacacagattctgaatacttgccatcagacacctctgatgatgatgatgatccttactattattattataagtccaggagaaatcgcagtaaattgaggaaaaagcttgttccatccacaaaaaaaggaaaaagtcaaccatttatcaatcccgattcacaaggtcactgtccagctactagcgactctggaataactgatgttgctatgtctaaaagtacatgtatctctgaattcaaccaagaacatgaaacagaggactgtgctgaatctctaaatcatgctgatagtgatgtaccaccttctaataccatgagtccctttaacacctctgattaccgctttgagtgtatatgtggtgaacttgatcagatagatcgtaagcctcgtgttcaatgcctgaagtgtcacctgtggcaacatgcaaagtgtgtgaattatgatgagaaaaatctgaagatcaagcctttttactgcccccactgccttgttgcaatggaaccagtgtcaacaagagcaactctgatcatctctccaagttccatctgtcaccagtgggtggatgagatcaacaggcatgtgaggtcgtcatctcttcgagtcttggtatatcaaggagtgaagaaagatggctttttacaacctcattttttggcagaacaggatatagttatcattacctatgatgtactgcgttcagaattaaattatgtcgatatcccacatagcaatagtgaggatgggcgtcgcctacggaaccagaagcgctatatggctatcccgagccccctggtagctgtggagtggtggaggatctgccttgatgaagctcagatggttgagtgtcccacagtaaaagctgcagaaatggcccagcgtttgagtgggattaatcgatggtgtatcagtggcactccagtacagagaggattagaggatctttttgggttagtggtctttcttggtattgaaccttactgtgtcaaacactggtgggttcgacttctctatcggccttactgcaagaagaatcctcagcatctctacagctttattgccaagatactgtggaggtctgcaaagaaagatgtgattgaccaaatccaaataccaccacaaaccgaagaaatacactggctccacttttctccagtggaaaggcatttctatcaccgtcagcatgaggtgtgctgccaggatgtggtggtaaaactcaggaagatttctgactgggctctgaagctcagcagcctagacagaaggactgtcacctctatcctgtatccattgctgaggctcagacaggcctgctgtcacccacaggctgttcgtggagagttcttgccactccaaaaaagcaccatgacaatggaagagctgctgacatctttgcagaagaaatgtggaactgaatgtgaagaagcacatcgacagctagtttgtgctctcaatggcttagcaggcattcatattattaaaggtgagtatgccttggcagcagaattgtacagagaagtgttgcgctcctcggaggaacacaaaggaaaactcaaaactgattcacttcaaagacttcatgctacccataacttgatggaattgttgatagccaggcacccagggataccacctaccttgcgtgatggccgacttgaggaagaggccaaacagctgcgagagcactacatgagcaagtgtaatacagaagttgctgaagcccagcaagctttatatcctgtgcagcagaccatccatgagcttcaaagaaagattcattctaattctccttggtggctaaatgtgatccacagagcaatagaatttactattgatgaggagctagttcagcgagtgcgaaatgaaataaccagcaactacaagcaacaaactggcaagctttctatgtcagagaagttccgtgattgcagaggtcttcagttcttacttacaacacaaatggaagagctaaataaatgccagaagctagtaagagaggctgtaaaaaacctggagggacctccatctcgtaatgttattgagtctgcaacagtctgtcacctccgaccagccagacttcctctcaactgctgtgtcttttgtaaagctgatgaattgttcacagagtatgaatcaaagctattttccaacacagtcaaaggccagactgcaatatttgaggagatgatagaagatgaagaaggactggtggatgatcgagcacctaccaccacccggggtctctgggcaataagtgagacagagcgatctatgaaagcaatactatcatttgcaaaatcacataggtttgatgttgaatttgttgatgaaggaagcacttcaatggatctctttgaagcatggaagaaggaatataagttgcttcatgaatattggatggctctgaggaatcgtgtgtctgctgttgatgaacttgcaatggctacagaacgactaagagtgcgtgatcctagggagccaaagcctaatccgcctgttcttcatatcattgaaccacatgaggtagaacaaaaccgaataaaactactaaatgataaagctgttgctacatcacagcttcagaaaaaacttgggcagcttctttacctaactaatttggagaagtctcaagataaaacatcgggaggtgttaatccagaaccttgcccaatctgtgctcgacagctaggaaaacagtgggcggtactgacctgtggtcactgtttctgtaatgaatgcatttctataattattgaacaatacagcgtgggatctcacagaagctccattaagtgtgcaatctgccgccagaccacatctcacaaagaaatctcgtatgtctttacctcagagaaagcaaaccaggaggaggacatccctgtgaaggtaaagtaggtcaggaacacatagaagcataggtaaggcaatataatataggaagcagtatctgattaagaaagcatgaacatcagaacaagcttgacagtgaataggtagacgccactgttgtctgtagatacactgcctgaaagcctcagcttaaccatgtaatttttaattgtaggaggaacacagaacacttattcaaacatggttagcgatagtcatgtacactgtgactaaaatgtaacatcttaaaattacagtttcctatcctctataatatttctatccaccacaagtagacagaggtctggttacattagagatttatttaaagaaagagttttcctcattcttttacacatccctgaatgtaaggaaaaaaggatgtgtctaactaaacagaaggataaaataaattggctaatgaagacagctacaagaaagagggtaatgtgctttttaaacagcatagattgatattccaggataaagccaaattttggctttattttcctaatttttttccatgcttcattcagaattttaagaaaattactataatgtgatatccagactggatctgtaattggatttactgcttttaaggggtatttaataaaaagccaagactattttgctctttcttttccttaaatatgcttttttaatattttttttctaaccaaacttgaacaaaggacacatcggtatctaaatttagtagcaaatgtgggctttaaggaatagagaatgagaattagagaatgatggggttgactcttaagcaagatgaagtattctttattaattccttctgagtttttgatactcctcacttttaagtaatgtgttttttaagtagaatcagctacaagttgaaattcactaccagtagttaagcagttattagggtacccttctcccaagaaaactgtagctgcattaaagaacttttaattgctcttttttcactgttatttgagtaaaacctgaaaatatcagttatattgctctttagtctgttgggataaacagaattccacagttagaataagcattcatccattcattccacacatatatattggacacgtactagcacacaggcagtgtgctaggcctcatagacacagcatacacataaataaaacagatatggttactacttttgtggagattggtgaaggagtttgagttggggcaggaagcacagatgttaataaataatgtgttataattgtgataagcactacaaaagaacaaagctggaggcatcatgctacctgatttcaaactatactacaaggctacagtaaccaaaacagaatggtaccaaaacagacatataggcgaatggagcagaacagagacctcagaaataataccacacatctacaactgatctttgacagacccgacaaaaacaaacaatggggaaaggatcctattgggtaaatggggctggaaaaactggctagccatatgcagaaaactgaaaccggaccccttccttacaccttacacaaaaattaactcaagatagattaaagacttaaatgtaaaacccaaaaccctaaaaatccgagaagaaaacctaggcagtaccattcaggacgtaggcatggacaaagacttcatgacaaaaatgccaaaagcaattgcaacaaaagccaaaattgacaaagggaatctaattaaagagcttctgcagagcaaaagaaattatcgtcggtaaacaggcatcctacagaacgggagaaaatttttgcaatcaacccatctgacagaggtctaatatccagaatttacaaggaatgtgaacatatttataagaaaaaaacaaccccatcaaaaattggacaaaggacatgaacagacacttctcaaaagaagatatttacgtggccaacaaacatgaaaaaaagttcatcactgatcatcggagaaatgcaaatcagaaccacaatgagataccatctcacaccagtcagaatggcgattattaaaaagtcaacaaacaatagatgctggcaaggctgtgaagaaataggaacgtttttacactgttggtaggaatataaattagtgcaaccattgtggaagacagtatggcgattcctcaaggatctagaaacagaaatcccataggacccagcaatcccattactgcatatatacccaaaggaatataaatcattctgctataaagacatatacacacaaatgtttactgcagcactatttacaataacaaatatatggaaccaatccaaatgcccatcaatgatagactagataaagaaaatatagtacatatgcaccatgtaatactatgcatccataaaaaggaatgagatcatgtcctttgcagggacatggatgaagctggaagccatcatcctcagcaaactaacacaggaacaaaaaaccaccacatgttctcactcgtaagtgggagttgaacactgagaacacatggacacaaagaagggaacaacacacacaccagggcttgttggggcaggggagtaaggagagggaactaagagggcagataaataggtgcagcaaactaccatggcacatggatacctgtgtaacaagcctgcatattctgtacatgtatcctgtttttttgttttgttttgttttgttttgttttttaaggagaaaaaggaaaaaaagtctctgagggaatgacagttaagcaggtatctaaaggatgaatgatgaattagtcagcctgaggagagaataggttggctcccagacagagaaaaagaaaaccagaagagagccagtgcatggaaaagcctaagacaaggactcaaatggatctgagtggctgaagtgtagaaagcaaggagaaagcagttgaataagcctggagacctaactaggggaccagatgttgaagggccacctgaacatttgagaattttatttttatttaaggagaaagccattaaatattataagcagggatgtatcatgatcaaatttggatttcaaaaagatctctcttgtgtggaaaacagatgatgaggaacagaatagagcagaagaaatttggagagagcagcttaggaggctacagcaggagtaatggtggctttgatttggctgatggcggtagaaatggagagaagtgggtatattctagacatgtttagaataaagttagagaatgttggcagcattagtgaaggaaatttcatagatcacccctggtttctgatgtgaataagcaggtgggtaatggtatagctaatgatacaagatatttggaagaggaatacatttagacatatcatatttaaggtgcctaagacatccaagtagaactatccagaaaagtgttgatatgtggagctggagatacaaaattcggagtcactaatagaaaagtttgcttcagattgagtcctatgaagtccataactttaaaagattgaatcaagttgggagggctggaaaatgagaaggagcaactagggacaggcaatccaggcaggtacgctggcaacaaagaccacagggaagctctgcttcggtgaggagacagtagtgctgaaggtggatcaactacaatgtggactaatttgtctaatgaggtcactgatgactttagaaggagctcttttaatacaaatgtagaggcagaaagcagattgggagggattgcgggatgagcaggaagtcaacaagtagaaaaaatgcccaactgtttcataaacttaactgtgagatagaatcagaattgtaaccagaacctatgaaaacagaaagacatcacttttttgttgttgttctgtttaagacaaaagattcttgagcatgtttagtctccagtgaaaaaaggatagactgaagatataggagaaaggataatttgtaatacaagtttcttgaaaagaaggagaatgttgatgtatagaaagtagagtttcattgaagtcaaataacaggtataaattgggctattgagcacaaaagatataagcataggtgttcttatctgagaatgggagatcatagtcattccagagaggacaggcctgccagatgtgactgtagaagtaggtgactcaagtgaggtggagaagaaaagatgctagaagatgaaacagtgagacctgaattttggatgagctgtccaagcagacagtatgtaatatctagagttgaggtatagagtaaattaggcaccaaagttctttagtgaatgtagggtagggttcaataaattatagcaaagggtagagttgggataactgggcttcagggggctcaaaaaatggaagttgttacacaaatgagaactaatgctctgaaacctgcatttgtggaccagcactcaaatgcaacagtcaaatccttcactcaaaagggctgctgagagaccagtatgcttagaagatagccaggttctaattaaagcagggaagtgaagagcagtatttctacaagaggtagaaaatatgaaacaatttgtttcataaaatacgggttccagggggcgccagtgaaaggtccaggagtgaaaggagaaaaattagagggtaaacaagcaggaaggaagtgcaggacagtatgggaataacagaacaggcaaggatacgtgatgagagcatcatgacctaaggatcatctagtcctgttccctctctgtgaatcccctgaatacattttacagtcagccctgtgtatctgtggatatagccaaccatagatcaaaaatacttggaaaaagaaaaattccatgaagttctaaagagcagaacttgaatttgcagcatgctgagtttacattgaatccacgcaaatgcaatgatgtgtagggattatatgaggtaatctagagatgatttaaagtatacaggaggatgtgtgtatgttatatgcaaatatgacatcattttatataagggccttgagcatcctgggattttggtatccacaggggttttggaagcagtcagtccctcacagatactgagggaggactatatttttaaagcaaataccaaagagttattgaaggaagaagtaggtgacttatggtgcagccctgaggcatttgacagttattctttatcctgcctgcacttaggagctatgctgcttcccagtccctctctccctttcttcccactcctatagtttctcctttcctttccataaagatagtctttcttagcccttccttttttctcttctttctcttcctctggccacagcatctcaagggccacagatggcctttgtggctaagaagaggtggctcacccttaggtgacagcatgcatcacagtacaaggaactggcataagaaagaactgctgtgtcaggttttgcgcagagaggttaaggaagtgattgctctagctactggtaaacagcacagcctctacgaaactgagtcattgagcccatcaaatccaaacacctgttcattttatggcagctttcctagacacccaggatagagattggcacagttacatgtgctgtgctgttggagcagggatatcggtatataaatactgtttattgtgctctcacttctcgctgtctttcatgagtattgattaacacgtgaattaactgaagcatcttttaaaaaaaattaagtttatagaatttactaaagataatttccctttttatcatagatgcacatgtaattacatttccttttcttaaacataagactattgtaccattgtgcgggcaaattttatccctcctcgacgttgtcacactgcttcacgccatgtttaggttggctcttcactgctttttctgttaccatttgtgtctgccacatttgccttgtgcttcctgtctcttcttctgacttctgtcacatttctggcctgctgtctgtcacttcctccttgaaacatcagcttattgtattctgagacttcacccctctcttgtgactctttgaaacttccacataaatgatcatattgcctattttggattagtatgtaaataaagatggctttgtgtaaataattaaggcattattttcaaattttagaaactactagttccaattatttctaaacctagtttttttctttatattactgttgattatcaaatcgttgttctttaacaagcaatactgacaagtaattttttatttaattgaaatgtttatattatctgaaatataaaatttatttctgaaatgattatttcactgtatttatgtcaagattctcagacatagcaaaccatatatcgtacagaatgcttaatcatatagcttttttgtggataaaagatatttggaaagcataaaactattatttattagtagtagacatttttaagtagtatttcttggaaataagagattttacaatgtaaggaatgctgttgattgaccatagatataaaatgaatactgggatcacaaatgtcctgttcggtggatgcacttaagttgaagaccatttcttccctagcaacagtgtgatggtattcctaaatgacctttggaacctactgggcatctcacaaagtaaacaaaattccccttgcaagttctgacaactgccaggcattttggatggtgaagtaggcctcctggcagaacatatggcccacatgtcttgttccctgtgtcttacatttggctaggttttatacaaagcattttgccagtggaaaccctgaccctatatactggtcaagagtcttagataataagaaatttctgtccgggagaaaatagatacagccactacatagatatagtgacagcaatacagtacccttcccacccaccacatgctacacaattgctttttttgtcaaacttttaagtatgtgaccatcaactggcctgctttttaaaataaatatttttgttcaggctctgtctccataaactttgactcattagacctgggatgtggtccagaaatctgcatttttagcaagcatatctcttgataatagagatatcttatacagcctttttgtagagaaaaaaactctgtatctctacattccaactcacagagaagcctagccatactatgtgtagaattctacatgtggaattctattctgttttttttttatttgaatttttgttcatttaatttaaagatcatttgtgacatctgtctcacacttttaaaatataattaaaataaacatctgagtg

SEQ ID NO: 182584 - DNA, 6994 bp, Homo sapiens
  Payload ID: 15975
  Gene Symbol: SHPRH
  Gene Name: SNF2 histone linker PHD RING helicase, E3 ubiquitin protein ligase
  Uniprot ID: Q149N8
  ENST ID: ENST00000438092
  CDS Start-End: 400-5379
gtctttggcctccgggaccagggagggaggacgctggttgtcctggagcccgggaagctcaagggctgagagggagccgctgcgcgagtcttccccacctcttcccgatcccggactagcgaacttcggaccaccacgtccctccggggataaagtggggtcgtgggaaaggaggctgtgcttctcctcatgcactggggcctgcggtgtttgtctcgagcgtccaacacactaggatccgggagtccgtcgtcacgctccttggcctcgcggtcgcttgtttgctcggcctgctgggagcgatccggcgctgacagccccgctcagactccgggagccgcttgtgggtctttcggaagataactgaagttcacagttaccagccaagaaaacttgaaaatgagcagccgacggaaacgtgctcctccagtgagggtagatgaggaaaagaggcagcagcttcattggaatatgcatgaggacagaaggaatgaacctatcatcataagtgatgatgacgagcagccctgcccaggttcagatacctcttctgctcattatatcattctaagtgatagtctaaaggaagaagtggctcacagagataagaagaggtgttcaaaagtggtgagcttctcaaaaccaattgaaaaagaagagactgttggtattttttcccctttgtctgtaaagttaaatattgtgatttctccctatcattttgataattcctggaaagcatttctaggagaattaactcttcagcttcttcctgcacagagtttaattgaaaatttttccgaaaggagtattacattgatgagttcagagtcaagcaatcagttcctgatttatgttcattcaaaaggtgaagatgtagagaaacaaaaaaaagaaccgatgagtatttgtgacaagggtattctggtggagtcatccttcagtggtgaaatgttagaagatttggggtggctacaaaagaagagaagaataaaactctatcagaaaccagaaggaaatcacattatcaaggttggaatttatcttttggaagctggcctagcaaaactagacttcttgagtgatgcaaattcaagaatgaaaaagttcaatcagctcatgaagaaagtaatggaaaagttacacaattctattattccagatgtgttggaagaggatgaagatgatccggagagtgagccagagggacaagacattgacgagctgtatcactttgtgaaacaaacacatcagcaagaaacgcagtccatccaagtggatgtccagcatcctgcattgatccctgtgttgagaccctaccaaagagaggctgtcaattggatgctacaacaagagtgtttcagaagcagtcctgctactgaaagtgccctgcacttcttatggcgagagattgttacatctgagggtctgaaactctactataatccatatacaggctgcatcattcgtgagtacccaaattctgggccgcagttgcttggtggaattttagcagatgagatgggtcttggaaagacagtggaggttttggctctgattctgacacatactcgacaagatgtcaagcaagatgctctcactcttcccgagggaaaagtggtgaattattttattccgtcacattattttggaggaaaactgaaaaagacagaaatccagaatatcgaatttgaaccaaaagaaaaagttcaatgccctcctacacgtgtgatgatactgacagctgtgaaagaaatgaatggaaaaaaaggagtgtccatcctttccatctataagtatgtcagttctatatatagatacgatgttcaacggaacaggagtcttttgaaacggatgctgaaatgtttaatttttgaaggtctcgtgaaacagatcaaaggccatggtttttctgggacttttacattgggaaagaattacaaggaagaggatatatgtgataaaacaaaaaagcaggcagtagggagtccaaggaaaattcagaaagaaactagaaaatcagggaacaaggacacagattctgaatacttgccatcagacacctctgatgatgatgatgatccttactattattattataagtccaggagaaatcgcagtaaattgaggaaaaagcttgttccatccacaaaaaaaggaaaaagtcaaccatttatcaatcccgattcacaaggtcactgtccagctactagcgactctggaataactgatgttgctatgtctaaaagtacatgtatctctgaattcaaccaagaacatgaaacagaggactgtgctgaatctctaaatcatgctgatagtgatgtaccaccttctaataccatgagtccctttaacacctctgattaccgctttgagtgtatatgtggtgaacttgatcagatagatcgtaagcctcgtgttcaatgcctgaagtgtcacctgtggcaacatgcaaagtgtgtgaattatgatgagaaaaatctgaagatcaagcctttttactgcccccactgccttgttgcaatggaaccagtgtcaacaagagcaactctgatcatctctccaagttccatctgtcaccagtgggtggatgagatcaacaggcatgtgaggtcgtcatctcttcgagtcttggtatatcaaggagtgaagaaagatggctttttacaacctcattttttggcagaacaggatatagttatcattacctatgatgtactgcgttcagaattaaattatgtcgatatcccacatagcaatagtgaggatgggcgtcgcctacggaaccagaagcgctatatggctatcccgagccccctggtagctgtggagtggtggaggatctgccttgatgaagctcagatggttgagtgtcccacagtaaaagctgcagaaatggcccagcgtttgagtgggattaatcgatggtgtatcagtggcactccagtacagagaggattagaggatctttttgggttagtggtctttcttggtattgaaccttactgtgtcaaacactggtgggttcgacttctctatcggccttactgcaagaagaatcctcagcatctctacagctttattgccaagatactgtggaggtctgcaaagaaagatgtgattgaccaaatccaaataccaccacaaaccgaagaaatacactggctccacttttctccagtggaaaggcatttctatcaccgtcagcatgaggtgtgctgccaggatgtggtggtaaaactcaggaagatttctgactgggctctgaagctcagcagcctagacagaaggactgtcacctctatcctgtatccattgctgaggctcagacaggcctgctgtcacccacaggctgttcgtggagagttcttgccactccaaaaaagttttgaacagtctaccttttcttttagcaccatgacaatggaagagctgctgacatctttgcagaagaaatgtggaactgaatgtgaagaagcacatcgacagctagtttgtgctctcaatggcttagcaggcattcatattattaaaggtgagtatgccttggcagcagaattgtacagagaagtgttgcgctcctcggaggaacacaaaggaaaactcaaaactgattcacttcaaagacttcatgctacccataacttgatggaattgttgatagccaggcacccagggataccacctaccttgcgtgatggccgacttgaggaagaggccaaacagctgcgagagcactacatgagcaagtgtaatacagaagttgctgaagcccagcaagctttatatcctgtgcagcagaccatccatgagcttcaaagaaagattcattctaattctccttggtggctaaatgtgatccacagagcaatagaatttactattgatgaggagctagttcagcgagtgcgaaatgaaataaccagcaactacaagcaacaaactggcaagctttctatgtcagagaaaggtcttcagttcttacttacaacacaaatggaagagctaaataaatgccagaagctagtaagagaggctgtaaaaaacctggagggacctccatctcgtaatgttattgagtctgcaacagtctgtcacctccgaccagccagacttcctctcaactgctgtgtcttttgtaaagctgatgaattgttcacagagtatgaatcaaagctattttccaacacagtcaaaggccagactgcaatatttgaggagatgatagaagatgaagaaggactggtggatgatcgagcacctaccaccacccggggtctctgggcaataagtgagacagagcgatctatgaaagcaatactatcatttgcaaaatcacataggtttgatgttgaatttgttgatgaaggaagcacttcaatggatctctttgaagcatggaagaaggaatataagttgcttcatgaatattggatggctctgaggaatcgtgtgtctgctgttgatgaacttgcaatggctacagaacgactaagagtgcgtgatcctagggagccaaagcctaatccgcctgttcttcatatcattgaaccacatgaggtagaacaaaaccgaataaaactactaaatgataaagctgttgctacatcacagcttcagaaaaaacttgggcagcttctttacctaactaatttggagaagtctcaagataaaacatcgggaggtgttaatccagaaccttgcccaatctgtgctcgacagctaggaaaacagtgggcggtactgacctgtggtcactgtttctgtaatgaatgcatttctataattattgaacaatacagcgtgggatctcacagaagctccattaagtgtgcaatctgccgccagaccacatctcacaaagaaatctcgtatgtctttacctcagagaaagcaaaccaggaggaggacatccctgtgaagggcagccattctacaaaagtggaagctgtggtcagaactctgatgaaaatacagcttagagatccaggggccaaagcactcgttttctcaacgtggcaagatgtattagatattatttcaaaagctcttactgacaacaacatggaatttgcacaaatcagtcgtgttaagacatttcaggagaacctttcagcatttaaacgtgatccccaaatcaatattttgctgctgcccctgcacacaggttctaatggattaactatcattgaagcaactcatgttctcttggtggagcccatattgaaccctgcccatgagcttcaggccatagggagggtgcaccgaattggacagacaaaacctactattgtacacagattcttaattaaagcaacaatagaagaaagaatgcaggcaatgctgaaaactgctgagagaagtatctatatctgatgatgcaagggaattaagagaggtaatgtgtacttttcttatgataagatcactcataaaacagttggaataagaaagtaaactagtctagttttatatgacctggtatattgaacaaacatagatctcagttttggaagggccttcagtatctttagcacatgattcaccaatatcttgttagtaatattttaagtagatggtgaattatattaacccattttttgagtaggcttataccataactttacacctagtaattttgcagtaatacaactccttacaataagttaatgttagacagttatttgtttcttctgcatcttgctactgaaaacaaaaacaatgaaaatattcatatttctattatgtgtaaagtggtgttagtgtaaacagttaactccaaatagattttttaatgtattaatgattaccttaaaattatctgctttccctactcttaatttttcttattgttaaagtttttatatgttgtaagattgatgtatctgtaaatattgcagtttttatgattttgttttattataacatggaaatatggcagggttttttttttaatcattattatactgatgtcttggattctttttctttcccatgttcttgtgtaactagactttttagccagtgatatctgaattcatggtagagttgttatttcactccagttgttcctcccttaagcacgagtctttgaccttttgaacaagagaatgccatgttcacataagcaaatcgttgcaagtgataataacgaagtgtttcttcttctgtgaggaattaatggactttgaaattgctgaataaggagtagcttgttacatcctagccatttgatgtaatacaaatgttcttatttggcttccttttctttgagccttcagagttttaaaggaccctctttgaccctcaggacttattagctcccagttagctgcctggaaaactcatagaaccattccctagatcccatttgtccgagaggctttggtgcttagttaaggtgcattttcttactctaggtttatagagtgatgtaattcaactgaagaaaacacacacatgcttttggtgcttattcttcagttaaaaggaggtatccattgattcttttatatgaaattaaatcaaactgttatttttatagctcttcacatattaaaaagagctttcatgtacatttacgtgtttaatttacccaacaatcttgtgaagttgatataattaatatctttactgttttaaaggtagagaactgaagttcagatatattgaaactttcttaggacatgtagcaagtaaacagtggagcccaggtcccctgactccatatcttacattcttttactaataacatgtcatgctgagattcagaaggcccatgcttataatttaaaaatgagactatttcagtatttctttgtgtttgttttctactattcctttctgagctatgttttagagaaaacaatttgatatgcttcaattttgtaaaatcaaattacatatatataaaaaaacctatctgtattagacaaaaactgtttttatttatttctgtaagatatccattaaataaatattttagtggaaa

SEQ ID NO: 182585 - DNA, 927 bp, Homo sapiens
  Payload ID: 15975
  Gene Symbol: SHPRH
  Gene Name: SNF2 histone linker PHD RING helicase, E3 ubiquitin protein ligase
  ENST ID: ENST00000521977
  CDS Start-End: 1-292
gaaaccagaaggaaatcacattatcaaggttggaatttatcttttggaagctggcctagcaaaactagacttcttgagtgatgcaaattcaagaatgaaaaagttcaatcagctcatgaagaaagtaatggaaaagttacacaattctattattccagacgttgcatctttggtcaggactgcagattcagagttgtctgccattggtcaccttgggagagtgtggatggcttggtgcagctcatcaacactactggaaaaacagcccaaattctccaagttctgctcatgatgtgttggaagaggatgaagatgatccggagagtgagccagagggacaagacattgacgagctgtatcactttgtgaaacaaacacatcagcaagaaacgcagtccatccaagtggatgtccagcatcctgcattgatccctgtgttgagaccctaccaaagagaggctgtcaattggatgctacaacaagagtgtttcagaagcagtcctgctactgaaagtgccctgcacttcttatggcgagagattgttacatctgagggtctgaaactctactataatccatatacaggctgcatcattcgtgagtacccaaattctgggccgcagttgcttggtggaattttagcagatgagatgggtcttggaaagacagtggaggttttggctctgattctgacacatactcgacaagatgtcaagcaagatgctctcactcttcccgagggaaaagtggtgaattattttattccgtcacattattttggaggaaaactgaaaaagacagaaatccagaatatcgaatttgaaccaaaagaaaaagttcaatgccctcctacacgtgtgatgatactgacagctgtgaaagaaatgaatggaaaaaaaggagtgtccatcctttccatctataagt

SEQ ID NO: 182586 - DNA, 5245 bp, Homo sapiens
  Payload ID: 15975
  Gene Symbol: SHPRH
  Gene Name: SNF2 histone linker PHD RING helicase, E3 ubiquitin protein ligase
  Uniprot ID: Q149N8
  ENST ID: ENST00000519632
  CDS Start-End: 300-3089
actcatgaagccagcgcaggagaaagggggcggggtgctctgacgagcgcgttcgccttgaccccacgctacagcgcgcgcccggcagctaggcgctgtggtttctgggtctcccgggggacccctacacgttccggcaaaaagcgctcgtgcccacctcaagcccatgttcggtgggtggcgaatgcgtgcccgtgatctgctgggtctgtagaggagcgcaggcctggtgcaaacagactcaagaggctcggagaaccagcttggagttcacagttaccagccaagaaaacttgaaaatgagcagccgacggaaacgtgctcctccagtgagggtagatgaggaaaagaggcagcagcttcattggaatatgcatgaggacagaaggaatgaacctatcatcataagtgatgatgacgagcagccctgcccaggtgaagatgtagagaaacaaaaaaaagaaccgatgagtatttgtgacaagggtattctggtggagtcatccttcagtggtgaaatgttagaagatttggggtggctacaaaagaagagaagaataaaactctatcagaaaccagaaggaaatcacattatcaaggttggaatttatcttttggaagctggcctagcaaaactagacttcttgagtgatgcaaattcaagaatgaaaaagttcaatcagctcatgaagaaagtaatggaaaagttacacaattctattattccagatgtgttggaagaggatgaagatgatccggagagtgagccagagggacaagacattgacgagctgtatcactttgtgaaacaaacacatcagcaagaaacgcagtccatccaagtggatgtccagcatcctgcattgatccctgtgttgagaccctaccaaagagaggctgtcaattggatgctacaacaagagtgtttcagaagcagtcctgctactgaaagtgccctgcacttcttatggcgagagattgttacatctgagggtctgaaactctactataatccatatacaggctgcatcattcgtgagtacccaaattctgggccgcagttgcttggtggaattttagcagatgagatgggtcttggaaagacagtggaggttttggctctgattctgacacatactcgacaagatgtcaagcaagatgctctcactcttcccgagggaaaagtggtgaattattttattccgtcacattattttggaggaaaactgaaaaagacagaaatccagaatatcgaatttgaaccaaaagaaaaagttcaatgccctcctacacgtgtgatgatactgacagctgtgaaagaaatgaatggaaaaaaaggagtgtccatcctttccatctataagtatgtcagttctatatatagatacgatgttcaacggaacaggagtcttttgaaacggatgctgaaatgtttaatttttgaaggtctcgtgaaacagatcaaaggccatggtttttctgggacttttacattgggaaagaattacaaggaagaggatatatgtgataaaacaaaaaagcaggcagtagggagtccaaggaaaattcagaaagaaactagaaaatcagggaacaaggacacagattctgaatacttgccatcagacacctctgatgatgatgatgatccttactattattattataagtccaggagaaatcgcagtaaattgaggaaaaagcttgttccatccacaaaaaaaggaaaaagtcaaccatttatcaatcccgattcacaaggtcactgtccagctactagcgactctggaataactgatgttgctatgtctaaaagtacatgtatctctgaattcaaccaagaacatgaaacagaggactgtgctgaatctctaaatcatgctgatagtgatgtaccaccttctaataccatgagtccctttaacacctctgattaccgctttgagtgtatatgtggtgaacttgatcagatagatcgtaagcctcgtgttcaatgcctgaagtgtcacctgtggcaacatgcaaagtgtgtgaattatgatgagaaaaatctgaagatcaagcctttttactgcccccactgccttgttgcaatggaaccagtgtcaacaagagcaactctgatcatctctccaagttccatctgtcaccagtgggtggatgagatcaacaggcatgtgaggtcgtcatctcttcgagtcttggtatatcaaggagtgaagaaagatggctttttacaacctcattttttggcagaacaggatatagttatcattacctatgatgtactgcgttcagaattaaattatgtcgatatcccacatagcaatagtgaggatgggcgtcgcctacggaaccagaagcgctatatggctatcccgagccccctggtagctgtggagtggtggaggatctgccttgatgaagctcagatggttgagtgtcccacagtaaaagctgcagaaatggcccagcgtttgagtgggattaatcgatggtgtatcagtggcactccagtacagagaggattagaggatctttttgggttagtggtctttcttggtattgaaccttactgtgtcaaacactggtgggttcgacttctctatcggccttactgcaagaagaatcctcagcatctctacagctttattgccaagatactgtggaggtctgcaaagaaagatgtgattgaccaaatccaaataccaccacaaaccgaagaaatacactggctccacttttctccagtggaaaggcatttctatcaccgtcagcatgaggtgtgctgccaggatgtggtggtaaaactcaggaagatttctgactgggctctgaagctcagcagcctagacagaaggactgtcacctctatcctgtatccattgctgaggctcagacaggcctgctgtcacccacaggctgttcgtggagagttcttgccactccaaaaaagcaccatgacaatggaagagctgctgacatctttgcagaagaaatgtggaactgaatgtgaagaagcacatcgacagctagtttgtgctctcaatggcttagcaggcattcatattattaaaggtagaaggtgagtatgccttggcagcagaattgtacagagaagtgttgcgctcctcggaggaacacaaaggaaaactcaaaactgattcacttcaaagacttcatgctacccataacttgatggaattgttgatagccaggcacccagggataccacctaccttgcgtgatggccgacttgaggaagaggccaaacagctgcgagagcactacatgagcaagtgtaatacagaagttgctgaagcccagcaagctttatatcctgtgcagcagaccatccatgagcttcaaagaaagattcattctaattctccttggtggctaaatgtgatccacagagcaatagaatttactattgatgaggagctagttcagcgagtgcgaaatgaaataaccagcaactacaagcaacaaactggcaagctttctatgtcagagaagttccgtgattgcagaggtcttcagttcttacttacaacacaaatggaagagctaaataaatgccagaagctagtaagagaggctgtaaaaaacctggagggacctccatctcgtaatgttattgagtctgcaacagtctgtcacctccgaccagccagacttcctctcaactgctgtgtcttttgtaaagctgatgaattgttcacagagtatgaatcaaagctattttccaacacagtcaaaggccagactgcaatatttgaggagatgatagaagatgaagaaggactggtggatgatcgagcacctaccaccacccggggtctctgggcaataagtgagacagagcgatctatgaaagcaatactatcatttgcaaaatcacataggtttgatgttgaatttgttgatgaaggaagcacttcaatggatctctttgaagcatggaagaaggaatataagttgcttcatgaatattggatggctctgaggaatcgtgtgtctgctgttgatgaacttgcaatggctacagaacgactaagagtgcgtgatcctagggagccaaagcctaatccgcctgttcttcatatcattgaaccacatgaggtagaacaaaaccgaataaaactactaaatgataaagctgttgctacatcacagcttcagaaaaaacttgggcagcttctttacctaactaatttggagaaggtattgtttctaagacatgctactttttcctatgctgcattatcataaaccactttagtgactcctttcataattaatggtgcaaattgttgtaattagtatttggtgttatatgagtcagaacactacctatgtctctacaatagcttcagagatcacaaaagaatattgtatctatagaaatttattatgcagatgatatagaaggcatgcactcgatagtagagaacaatgtaaatggactgtagttcaaagccttgaatagtaaaagtattaaaacatatctcggtgaaactggcataatgcaatttatacacatgcattcattcatcaatacaaaaatatgttgtaatttgttatttgaaactgaagtgtgtttcgaaagctactaaatcagagtacatggtaataaaggtagacttcaaatattaagtaattcaaaacacatgttctgagttatgatctgagtattatactggacactgatgaattggtgggtcattgattaaatataatttcattttattgcaggaatcatattttgctagttggcagagaaccttctaggggcaagatatagtagtaaatatttggatagggcaagtgaggacaagatatagatttgaattcttctggaaactggtataacatatacttaagtgaatcagtaaatctcagacaaaatgaaaagttagacattcattatagatatagcatggcgactaagaaggtagactttggaactggacagcccaattttgaatcgtgactcaactgttttctagatatgtgactttatttaagttattcacctttcctcgcatcatcagtaaaatgagaatgatgtcaacactactttatagtatagggctgtcttgaggattgtgtgaattaatacatgtaaaatgctagagtagtttctgatctattaagcactttctaggtttttgctgctattaatattattaagatcattattactgttatgattaccaacacttattctgaaagataaaaa

SEQ ID NO: 182587 - DNA, 7338 bp, Homo sapiens
  Payload ID: 15975
  Gene Symbol: SHPRH
  Gene Name: SNF2 histone linker PHD RING helicase, E3 ubiquitin protein ligase
  ENST ID: ENST00000629427
  CDS Start-End: 400-5463
gtctttggcctccgggaccagggagggaggacgctggttgtcctggagcccgggaagctcaagggctgagagggagccgctgcgcgagtcttccccacctcttcccgatcccggactagcgaacttcggaccaccacgtccctccggggataaagtggggtcgtgggaaaggaggctgtgcttctcctcatgcactggggcctgcggtgtttgtctcgagcgtccaacacactaggatccgggagtccgtcgtcacgctccttggcctcgcggtcgcttgtttgctcggcctgctgggagcgatccggcgctgacagccccgctcagactccgggagccgcttgtgggtctttcggaagataactgaagttcacagttaccagccaagaaaacttgaaaatgagcagccgacggaaacgtgctcctccagtgagggtagatgaggaaaagaggcagcagcttcattggaatatgcatgaggacagaaggaatgaacctatcatcataagtgatgatgacgagcagccctgcccaggttcagatacctcttctgctcattatatcattctaagtgatagtctaaaggaagaagtggctcacagagataagaagaggtgttcaaaagtggtgagcttctcaaaaccaattgaaaaagaagagactgttggtattttttcccctttgtctgtaaagttaaatattgtgatttctccctatcattttgataattcctggaaagcatttctaggagaattaactcttcagcttcttcctgcacagagtttaattgaaaatttttccgaaaggagtattacattgatgagttcagagtcaagcaatcagttcctgatttatgttcattcaaaaggtgaagatgtagagaaacaaaaaaaagaaccgatgagtatttgtgacaagggtattctggtggagtcatccttcagtggtgaaatgttagaagatttggggtggctacaaaagaagagaagaataaaactctatcagaaaccagaaggaaatcacattatcaaggttggaatttatcttttggaagctggcctagcaaaactagacttcttgagtgatgcaaattcaagaatgaaaaagttcaatcagctcatgaagaaagtaatggaaaagttacacaattctattattccagatgtgttggaagaggatgaagatgatccggagagtgagccagagggacaagacattgacgagctgtatcactttgtgaaacaaacacatcagcaagaaacgcagtccatccaagtggatgtccagcatcctgcattgatccctgtgttgagaccctaccaaagagaggctgtcaattggatgctacaacaagagtgtttcagaagcagtcctgctactgaaagtgccctgcacttcttatggcgagagattgttacatctgagggtctgaaactctactataatccatatacaggctgcatcattcgtgagtacccaaattctgggccgcagttgcttggtggaattttagcagatgagatgggtcttggaaagacagtggaggttttggctctgattctgacacatactcgacaagatgtcaagcaagatgctctcactcttcccgagggaaaagtggtgaattattttattccgtcacattattttggaggaaaactgaaaaagacagaaatccagaatatcgaatttgaaccaaaagaaaaagttcaatgccctcctacacgtgtgatgatactgacagctgtgaaagaaatgaatggaaaaaaaggagtgtccatcctttccatctataagtatgtcagttctatatatagatacgatgttcaacggaacaggagtcttttgaaacggatgctgaaatgtttaatttttgaaggtctcgtgaaacagatcaaaggccatggtttttctgggacttttacattgggaaagaattacaaggaagaggatatatgtgataaaacaaaaaagcaggcagtagggagtccaaggaaaattcagaaagaaactagaaaatcagggaacaaggacacagattctgaatacttgccatcagacacctctgatgatgatgatgatccttactattattattataagtccaggagaaatcgcagtaaattgaggaaaaagcttgttccatccacaaaaaaaggaaaaagtcaaccatttatcaatcccgattcacaaggtcactgtccagctactagcgactctggaataactgatgttgctatgtctaaaagtacatgtatctctgaattcaaccaagaacatgaaacagaggactgtgctgaatctctaaatcatgctgatagtgatgtaccaccttctaataccatgagtccctttaacacctctgattaccgctttgagtgtatatgtggtgaacttgatcagatagatcgtaagcctcgtgttcaatgcctgaagtgtcacctgtggcaacatgcaaagtgtgtgaattatgatgagaaaaatctgaagatcaagcctttttactgcccccactgccttgttgcaatggaaccagtgtcaacaagagcaactctgatcatctctccaagttccatctgtcaccagtgggtggatgagatcaacaggcatgtgaggtcgtcatctcttcgagtcttggtatatcaaggagtgaagaaagatggctttttacaacctcattttttggcagaacaggatatagttatcattacctatgatgtactgcgttcagaattaaattatgtcgatatcccacatagcaatagtgaggatgggcgtcgcctacggaaccagaagcgctatatggctatcccgagccccctggtagctgtggagtggtggaggatctgccttgatgaagctcagatggttgagtgtcccacagtaaaagctgcagaaatggcccagcgtttgagtgggattaatcgatggtgtatcagtggcactccagtacagagaggattagaggatctttttgggttagtggtctttcttggtattgaaccttactgtgtcaaacactggtgggttcgacttctctatcggccttactgcaagaagaatcctcagcatctctacagctttattgccaagatactgtggaggtctgcaaagaaagatgtgattgaccaaatccaaataccaccacaaaccgaagaaatacactggctccacttttctccagtggaaaggcatttctatcaccgtcagcatgaggtgtgctgccaggatgtggtggtaaaactcaggaagatttctgactgggctctgaagctcagcagcctagacagaaggactgtcacctctatcctgtatccattgctgaggctcagacaggcctgctgtcacccacaggctgttcgtggagagttcttgccactccaaaaaagttttgaacagtctaccttttcttttagcaccatgacaatggaagagctgctgacatctttgcagaagaaatgtggaactgaatgtgaagaagcacatcgacagctagtttgtgctctcaatggcttagcaggcattcatattattaaaggtgagtatgccttggcagcagaattgtacagagaagtgttgcgctcctcggaggaacacaaaggaaaactcaaaactgattcacttcaaagacttcatgctacccataacttgatggaattgttgatagccaggcacccagggataccacctaccttgcgtgatggccgacttgaggaagaggccaaacagctgcgagagcactacatgagcaagtgtaatacagaagttgctgaagcccagcaagctttatatcctgtgcagcagaccatccatgagcttcaaagaaagattcattctaattctccttggtggctaaatgtgatccacagagcaatagaatttactattgatgaggagctagttcagcgagtgcgaaatgaaataaccagcaactacaagcaacaaactggcaagctttctatgtcagagaaaggtcttcagttcttacttacaacacaaatggaagagctaaataaatgccagaagctagtaagagaggctgtaaaaaacctggagggacctccatctcgtaatgttattgagtctgcaacagtctgtcacctccgaccagccagacttcctctcaactgctgtgtcttttgtaaagctgatgaattgttcacagagtatgaatcaaagctattttccaacacagtcaaaggccagactgcaatatttgaggagatgatagaagatgaagaaggactggtggatgatcgagcacctaccaccacccggggtctctgggcaataagtgagacagagcgatctatgaaagcaatactatcatttgcaaaatcacataggtttgatgttgaatttgttgatgaaggaagcacttcaatggatctctttgaagcatggaagaaggaatataagttgcttcatgaatattggatggctctgaggaatcgtgtgtctgctgttgatgaacttgcaatggctacagaacgactaagagtgcgtgatcctagggagccaaagcctaatccgcctgttcttcatatcattgaaccacatgaggtagaacaaaaccgaataaaactactaaatgataaagctgttgctacatcacagcttcagaaaaaacttgggcagcttctttacctaactaatttggagaagtctcaagataaaacatcgggaggtgttaatccagaaccttgcccaatctgtgctcgacagctaggaaaacagtgggcggtactgacctgtggtcactgtttctgtaatgaatgcatttctataattattgaacaatacagcgtgggatctcacagaagctccattaagtgtgcaatctgccgccagaccacatctcacaaagaaatctcgtatgtctttacctcagagaaagcaaaccaggaggaggacatccctgtgaagggcagccattctacaaaagtggaagctgtggtcagaactctgatgaaaatacagcttagagatccaggggccaaagcactcgttttctcaacgtggcaagatgtattagatattatttcaaaagctcttactgacaacaacatggaatttgcacaaatcagtcgtgttaagacatttcaggagaacctttcagcatttaaacgtgatccccaaatcaatattttgctgctgcccctgcacacaggttctaatggattaactatcattgaagcaactcatgttctcttggtggagcccatattgaaccctgcccatgagcttcaggccatagggagggtgcaccgaattggacagacaaaacctactattgtacacagattcttaattaaagcaacaatagaagaaagaatgcaggcaatgctgaaaactgctgagagaagtcacacgaactcatcagcaaagcattcagaggcctctgtcttgactgtggctgacctggcagacctatttaccaaagaaactgaagagcttgaatgaactacacttgattcattccatggactttagtgtattaataaactttcatagctgtagagcaaagttacaagttttaaaaacccagtagataacagtaacactgttcctagttgaatgaatttgtttattgttctggttatacagtggcttagtacttattgagtccttttcaatatactgtttccaaaagatctataaagattcttaattttacactcctaataaaacatttattttttgtcccaaatagtatctatatctgatgatgcaagggaattaagagaggtaatgtgtacttttcttatgataagatcactcataaaacagttggaataagaaagtaaactagtctagttttatatgacctggtatattgaacaaacatagatctcagttttggaagggccttcagtatctttagcacatgattcaccaatatcttgttagtaatattttaagtagatggtgaattatattaacccattttttgagtaggcttataccataactttacacctagtaattttgcagtaatacaactccttacaataagttaatgttagacagttatttgtttcttctgcatcttgctactgaaaacaaaaacaatgaaaatattcatatttctattatgtgtaaagtggtgttagtgtaaacagttaactccaaatagattttttaatgtattaatgattaccttaaaattatctgctttccctactcttaatttttcttattgttaaagtttttatatgttgtaagattgatgtatctgtaaatattgcagtttttatgattttgttttattataacatggaaatatggcagggttttttttttaatcattattatactgatgtcttggattctttttctttcccatgttcttgtgtaactagactttttagccagtgatatctgaattcatggtagagttgttatttcactccagttgttcctcccttaagcacgagtctttgaccttttgaacaagagaatgccatgttcacataagcaaatcgttgcaagtgataataacgaagtgtttcttcttctgtgaggaattaatggactttgaaattgctgaataaggagtagcttgttacatcctagccatttgatgtaatacaaatgttcttatttggcttccttttctttgagccttcagagttttaaaggaccctctttgaccctcaggacttattagctcccagttagctgcctggaaaactcatagaaccattccctagatcccatttgtccgagaggctttggtgcttagttaaggtgcattttcttactctaggtttatagagtgatgtaattcaactgaagaaaacacacacatgcttttggtgcttattcttcagttaaaaggaggtatccattgattcttttatatgaaattaaatcaaactgttatttttatagctcttcacatattaaaaagagctttcatgtacatttacgtgtttaatttacccaacaatcttgtgaagttgatataattaatatctttactgttttaaaggtagagaactgaagttcagatatattgaaactttcttaggacatgtagcaagtaaacagtggagcccaggtcccctgactccatatcttacattcttttactaataacatgtcatgctgagattcagaaggcccatgcttataatttaaaaatgagactatttcagtatttctttgtgtttgttttctactattcctttctgagctatgttttagagaaaacaatttgatatgcttcaattttgtaaaatcaaattacatatatataaaaaaacctatctgtattagacaaaaactgtttttatttatttctgtaagatatccattaaataaatattttagtgg

SEQ ID NO: 182588 - DNA, 11754 bp, Homo sapiens
  Payload ID: 15976
  Gene Symbol: SRCAP
  Gene Name: Snf2-related CREBBP activator protein
  Uniprot ID: Q6ZRS2
  ENST ID: ENST00000262518
  CDS Start-End: 386-10078
aacttgggcagaggtcaggggtcacgcgaggtcagtccgtcgggagggctagggagatggtcacgaaacctgaagtcaagagttaaggcttgttggcttctggtgtgattcccttcagtacggcggcaccgtggaagtgcagactttcacagggggtgtggtctcagctcacacaggtgctccagaggctggtggacctgagcggaggctgggacgccctggtgggccccgggccctggaaggcgggtcccggtggccggtggcccagaatgaggccagctcccagcatgccctgcagccggacgccagcccctcggccagcagtactggtgataacaacccagtcattcttcaggcatccaagggggagcctgggagtgggaccatgcagagcagcccctcccctgctcaccctcagctcccagtcctacagacacagatggtgtcggacggcatgacaggcagcaatcctgtgtcccctgcctcatccagttccccagcctctagtggggcaggcggcatctccccgcagcacatagctcaagattcctcactggatggacctccaggccccccagatggtgccacagtgcccctggaggggttcagcttatcccaggctgctgacctggctaacaagggcccgaagtgggagaagagccatgccgaaattgcagaacaggccaagcatgaggccgagatcgagactcggattgctgagctgcggaaggagggtttctggtcactgaagaggctgcctaaggtgccagagccccctcgccccaaaggtcactgggactatttgtgcgaagagatgcagtggctctctgctgactttgctcaggagcgccgttggaaacggggtgtggcccggaaggtggtgcgcatggtgatccggcaccacgaggagcagcggcagaaagaggaacgggcccggagggaggagcaggccaagctgcgtcgaattgcttccaccatggccaaggatgtcaggcagttctggagcaatgtggagaaggtggtgcaattcaagcaacagtcccggcttgaggaaaagcgcaaaaaagccctggacctgcatttggacttcattgtggggcaaactgaaaagtactcggaccttctgtctcagagcctcaaccagccattaacctccagcaaagcaggctcttccccttgcctcggctcttcctcagctgcctccagtcctccaccccctgcttctcgcctggatgatgaagatggggactttcaaccccaagaggatgaggaagaggatgatgaggaaacgattgaagttgaagaacaacaggaaggcaatgatgcagaggcccagaggcgtgagattgagctgcttcgccgtgagggagaattgccactggaagagctgctccgttcccttccccctcagctgttggaagggccttccagcccctctcaaaccccctcatctcatgatagtgacacccgagatgggcctgaagaaggtgctgaagaagagccccctcaggtgttggagataaagcccccaccctctgctgtcacacagcgcaacaaacagccttggcatccagatgaagatgatgaagagtttactgccaacgaagaggaagcggaggatgaagaggatactatagcagctgaggaacagttggaaggggaggtggatcatgccatggagctgagcgagttggctcgagaaggtgagctttccatggaggagctattgcagcagtatgcaggagcctatgccccaggctctgggagcagtgaagatgaggatgaagatgaggttgatgctaatagctctgactgtgaaccagaggggcccgtggaagcggaagagcctcctcaggaggatagtagcagtcagtcagactctgtggaggaccggagtgaggatgaggaagatgaacattcagaggaggaagaaacaagtggaagttcagcatcagaggaatctgagtctgaagagtctgaggatgcccaatcacagagccaagcagatgaagaggaggaagatgatgattttggggtggagtacttgcttgccagggatgaagagcagagtgaggcagatgcaggcagtgggcctcctactccagggcccactactctaggtccaaagaaagaaattactgacattgctgcagcagctgaaagtctccagcccaagggttacacgctggccacgacccaggtaaagacgcccattcccctgcttctgcggggccagctccgggagtaccagcacattgggctagactggctggttaccatgtatgagaagaagcttaatggcattcttgctgatgagatggggcttgggaagaccatccagaccatctctctgcttgcccacttggcttgtgagaaaggtaactggggtccccatttaatcattgttcccaccagcgtgatgttgaactgggagatggagttgaaacggtggtgccccagctttaaaatcctcacttactatggagcccagaaagagaggaagctcaagcggcagggctggaccaagcccaatgcctttcatgtgtgtatcacatcttacaagctggtgctgcaggaccaccaggccttccgtcgcaagaactggcgctatctcattctggatgaggcgcagaacatcaagaacttcaagtcacagcgctggcagtcactcctcaacttcaacagccagagacgcctgctcctgacaggaactcccttgcagaacagcctcatggagctgtggtccttgatgcactttttgatgccccatgtcttccagtctcatcgcgagttcaaggagtggttctctaatcccctaactggcatgattgagggcagccaagagtataatgaaggtctagtcaaacgcctccacaaggttttgaggccttttttactgcgccgagttaaggtggatgttgagaagcagatgcccaaaaagtacgagcatgttatccgctgcaggctctccaagcgtcaacgctgtctctatgatgacttcatggcacagaccacaactaaggagacactagccacaggccatttcatgagcgtcatcaacattttgatgcagctgagaaaagtttgcaatcatccaaatctgttcgaccctcgaccggttacctcccctttcatcaccccaggcatctgcttcagcaccgcctctctggtgctaagggccacggatgtccatcccctccagcggatagacatgggtcgatttgaccttattggcctggaaggtcgtgtctctcgatatgaggcagacacatttctgccccggcaccgcctctctcgccgggtactgttagaagtggctactgctcctgaccccccaccccggcccaagccagtcaagatgaaggtcaacaggatgctgcagccagtacctaagcaagaaggccggacagtggtggtggtgaacaacccacgggcgcccctgggccctgtcccagttcgacctcctccaggtcctgagctctcagcccagcccacccctggcccagtcccccaagtgctgccagcatcactgatggtttcagcctcacctgccgggcccccgcttattcctgcatctcggcctcctggccctgtcctcttgcctccactgcagcccaacagtggttctctcccccaggtgttgccatcccccctgggggtcctgagtgggacctcacggcctcccacgccaaccttgtccctaaagccaacaccacctgccccagttcgcctgagcccagccccacctccaggctcctctagcctgttgaagcccctgacagtgccaccaggctacaccttccctcctgctgctgccaccaccacttctaccaccacggcaactgctaccaccacagcagtgccagctccgactcctgcaccacagcgcctcattctatctcccgatatgcaggctcgcctgccctcaggcgaagtggtcagcatcgggcagttagcctcactggcacaacgtccagtggctaatgcagggggaagcaaacctctcaccttccaaatccagggcaacaagctgactttgactggtgcccaggtgcgccagcttgctgtggggcagccccgcccgctgcaaaggaatgtggtgcacctcgtgtcagcaggggggcagcaccatctcatcagccagcctgcccatgtggccctcatccaggccgtggccccgacccctggccctacccctgtctctgtgctgccttcttcgacccccagcaccacccctgcccctactggcctcagccttccgcttgctgctaaccaggtgccaccaaccatggtgaataatacaggcgtggtgaagattgtagtgagacaagcccctcgggatggactgactcctgttcctccattggccccagcaccccggcctccgagctctgggcttccagctgtgttgaatccacgccccacgttaacccctggccggctacccacacctactctgggtactgctcgagcccccatgcccacacccactctggtgaggcctcttctcaagctggtccacagtccttcacctgaagtcagtgcttcagcccccggagctgcccccttgaccatctcttctcctctccacgtgccatcctccctccctgggccagcctcttctccaatgccaattcccaactcctctccccttgctagtcctgtgtcctctacagtctcagttccattgtcatcttcactccccatctctgtccccaccacacttcctgccccagcctcggctccactcaccatccccatctcagcccccttgactgtttctgcttcgggcccagctctgttgaccagtgtgactccaccattggcacctgttgtcccagcggctcctggacctccctccttggcaccatctggtgcttccccgtcagcatcagccttgactctaggtttggccacagctccatccctgtcttcatctcagacacctggtcaccctctgttgttggctcccacctcttcacatgttccagggttgaactcaaccgtggccccagcatgctcacctgtcctggtgccagcttcggctctggccagtccttttccgtcagcaccaaatccagctccagctcaggcttcccttctggctccagcatcttctgcatctcaggctctagccacccctctggctcctatggcggctccacagacagcaattctggctccttctccagctcctcctctggctcctcttccggtcctggcaccatcgccaggtgctgctcctgtcctggcttcatcacagactccggttccagttatggctccatcgtctactccaggaacctctttagcctcagcttcaccggtaccagctccaacccctgtgttggctccatcatcaactcaaactatgctaccagccccggttccgtcacctctcccgagcccggcttctacgcagacactggccctagccccagctttagcacccactcttggaggctcatctccatctcagacactctctttgggaacggggaacccccagggaccctttccaactcagacattgtcattaactccagcatcatccctggtaccaactccagcccagacactgtctttggcaccaggaccaccactgggtccaactcagacgctgtctctggctccagcaccccctctggctccagcttctccagtgggcccagccccagctcacacgctgactttggctccagcatcgtcatctgcttcactcctggccccagcttcagtgcagacactgaccttgagccctgccccagttcctaccctgggcccggccgcagctcagaccttggcgctggccccagcctccacacagtccccagcttcccaggcatcttcccttgtggtttcggcatctggtgccgctcccttgcctgtcaccatggtatcccggctgcctgtttccaaggatgagcctgacacactgacattgcgctctggtccccccagccctccctccactgctacctcgtttggtggcccccggcctcgacgccagccccccccaccacctcgttcccctttttatctggactccctggaggaaaagcggaagcggcagcggtctgaacgcctggaacggattttccaacttagtgaggctcatggggccctggcacctgtgtatgggactgaagtcctggatttctgtaccctgccccaacctgttgccagccccatcggccctcgttctcctggccccagccaccccaccttttggacttataccgaggctgcccaccgggctgtactgtttccccagcagcgactagaccagctgtcagaaatcattgagaggttcatctttgtcatgcctcctgtggaggcacctcccccttccctgcatgcctgccacccacctccttggctggccccacgtcaggcagccttccaggagcaattggcctctgagctctggccccgggctcgtcctttgcaccgtattgtgtgtaacatgcgcacccagttccctgacttaagactcatccagtatgattgcggaaagttgcagacgttggcagtgctgttgcggcagctcaaggcagagggccaccgagtgctcatcttcacccagatgacccgaatgctggatgtattggagcagtttctcacctaccatggccatctctacctgcgcctggatggatctactagagttgaacagagacaggccttgatggaacggttcaatgcagacaaacgcatattctgcttcatcctttcaactcggagtgggggtgtgggcgtgaacctgacaggagcagacactgttgttttttatgacagcgactggaatcccaccatggatgctcaggcccaggaccgctgtcaccgaattggccagacccgggatgtccacatatataggcttatcagtgaacggacagtggaggagaacatcctaaaaaaggcaaatcagaagagaatgttgggggacatggccattgagggaggcaacttcaccacagcctatttcaaacagcagaccatccgagagctgtttgatatgcccctggaggaaccttctagctcatccgtgccctctgcccctgaagaggaggaagagactgtggccagcaagcagactcatattctggagcaggcattgtgtcgggcagaagatgaagaggatatccgtgcagccacccaggccaaggctgaacaggtggctgagcttgcagaatttaatgagaacgatgggtttcctgctggtgagggagaggaagctggccggcctggggctgaggatgaggagatgtcccgggctgagcaggaaattgctgccctcgtagaacagctgacccccattgagcgctatgccatgaaattcctggaggcctcactggaggaggtgagccgagaggagctcaaacaggcagaagagcaagtggaagctgcccgcaaagacctggaccaagccaaggaggaggtgttccgcctaccccaagaggaggaggaggggccgggggctggggatgagagttcctgtgggactggtggaggcacccaccggcgcagtaaaaaggccaaagcccctgagaggccggggactcgtgtcagtgagcgtcttcgtggagcccgggctgagactcaaggggcaaaccacactcctgtcatatccgcccatcaaactcgcagcaccaccacaccaccccgctgcagtcctgccagggagcgagttcccaggccagcacctaggcctcgacccactccagcttcagctccggctgcaattcctgcccttgttcctgtcccagtttctgccccagtacccatttcagccccaaatccaataaccattctccctgtccatatcttgccttctcctccccctccttcacagattcctccttgttcttctcctgcctgcacccctcctcctgcctgtacccctccaccagctcatacaccgcctccagcccaaacctgtcttgtaactccttcctctcctctcttgcttggtccaccttctgtgcccatctctgcctcagtcactaatctccccttgggcttgaggcctgaggcagagctgtgtgcccaggcattggcatctccagagtccctggagctggcttctgtggccagttcagaaacctcctcactttctcttgtgccccctaaagatctgttgccagttgctgtggagatcctgcctgtgtcagagaagaacctttctctcaccccttctgcacccagcctgaccttggaggctggcagcatccccaatggtcaagagcaggaggcaccagattctgctgaggggaccacccttacagtgctgcctgaaggtgaggagttgcccctgtgtgtgagtgagagcaatggcctggagctcccaccctcagcagcatctgatgagccacttcaggagccactggaggctgacaggacctcggaagagctgacagaggccaagaccccaacctccagcccagagaagccacaggaactcgttacagctgaggttgcagctccatccacctcatcttcagccacttcctcgcctgagggtccttcacctgcccgacctcctcggcgtcgcaccagtgctgatgtggaaattaggggtcaagggactggtcggccaggacaaccaccaggccccaaagtgcttcgaaagctgccaggacggctggtaactgtggtagaggaaaaggaactggtgcggcggcggcggcagcagcggggagctgccagcaccctagtgcctggggtctctgagactagtgccagcccgggaagcccgtctgtccgcagcatgtcagggccagaatcctcccctcccattggtgggccctgtgaagctgctccttcatcctcactgcccactccaccccagcagcccttcattgctcgccgtcacattgagctgggggtgactggtggtggcagccccgagaatggagacggagcactgctcgccatcaccccacctgctgtgaaacgtcggagggggaggccccccaagaagaacaggtctccagcagatgctgggagaggtgtggatgaggcaccctcatccaccttgaagggaaaaaccaatggggctgacccagtccctgggcctgagaccctaattgttgcagatcctgtcctggaaccacagcttattcctgggccccagcctcttggaccccagccagttcacagacccaatcccctcctgtcacctgtggagaaaagaaggcgaggacgaccccctaaagcacgagatttgcccatccctgggaccatttcctctgcaggggatggcaactccgaaagtcggacacagccacccccacacccatcacccctaaccccactcccaccactgctagtttgtcccactgctactgttgccaacactgtcaccactgtcaccatttcaacgtccccacccaaacggaagaggggccgacctcccaagaatcctccatcacctcggcccagccagctccccgtcttggaccgtgacagcacttctgttctcgagagctgtggattggggaggcgacggcaaccccagggccaaggggagagtgagggtagttcctctgatgaggatggaagccgccccctcacccgcctggcccgccttcggcttgaagcagaaggaatgcgaggacggaagagtggagggtccatggtggtggctgtaattcaggatgacctggacttagcagatagcgggccaggcgggttggaattgacaccacctgtggtctcactaaccccaaaactgcgctcgacccggctgcgtccagggtctctagtccccccactagagactgagaagttgcctcgcaaacgagcaggggccccagttggtgggagtcctgggctggcaaagcggggccgcctacagcccccaagtcccctggggcctgagggttcagtagaggagtctgaggctgaagcctcaggtgaggaggaggaaggggatgggaccccacgccgacgtcctggcccccgccggcttgttgggaccaccaaccaaggggaccagcgcatcctgcgcagcagcgcccctccctccctggctggccctgctgttagtcacagaggccgcaaggccaagacgtgagtgggctgcccctccacctaggctttccaccgtggccactccctccatgaccaggcctgactctgttaaccactacttgaagtcttgagggggaaagcctccagggagacataggggccttctcccttcttcccaccaaagtagggggtaggcaactggttgtcatggaaatggggatcatcacagtccccttccccttcaccccacgtggctgggcagtgttaagggtggcaagatagtctctgtccccacccccttgtacttgattccccagctgtctttcacacagccccccacccttaggggaagggggaggggcttctctacaatgaggtttttttcttttttttttttttttaagaagaaaaaataataaacttagtttctgtatgagcatccgcgtaaggaggcttctgattttctggtctggtggagggttgggtgggaacttgggcatcgtttttctcctccctcttgttcttgcaaagatcctagcacctgatctctagcccaggactatatgttccaggcagaaatctacccaagaagagggaagattggtgaatttgatgtggtagggtgcctttccccagtcagtttgaagtcacagatatccttttcctctcatttcttttccctcggttcctagacgttcctcggagctctttgatgcctcagacctttcccttttatccctcttgctcaggtgcttcctttcacaactttttccagagggcaggcgtcctagctccagttgctccatcccttgggccctcccctgctcttcatctagccaaactggtttgagtcagccacaccccttcccagctccctgggctcttcacgtggtggctggccactcaaccccacccctgggcttggcttggagccctgagtcagctccatcaccacccaagccaaaccaaagctgaggcaggagccgaaactcagagtccttcaaggcctatagccaggtaagagccctgttcatttttacattctctgttcactccctgggccctccttgtgtcctcctgttgactctgtgcttacctcatctgagttatttctttgtatctacttccctgcagcttcttggcacacatcattctttgctctctacttgtctcgcccctttcacctttcctatccttcgttacttgggttcagggagccaaggtggtttcattttgtctgggttgtaggggaatggttggagataagggtagaaaggtggtttgatgccagggcctagaggacctgagaagtagggagacaagaaatgattaagtagggcatcattttgcaggtttctgtgtggtaatgaggtcatttagactcagtgtactagtctgattgtgttatgtggcctgggttaaattggagagaggaggtggcagggaggcagcatagcagaggaagccctgacttagggaagtaaagtctttctgatgtttggttttagtggtaataaagggcttacttgggtacattttccttacctttctccattcccataactgttttcatgtaaaatggctgctttgcttgaaacgggttgcagtacctagggtcctgctctctgacatctataatactcagggggcagcctcttgggaatttgggggaattgtagagtcctttgaaatacagattaaaataacagattcatagca

SEQ ID NO: 182589 - DNA, 9126 bp, Homo sapiens
  Payload ID: 15976
  Gene Symbol: SRCAP
  Gene Name: Snf2-related CREBBP activator protein
  ENST ID: ENST00000395059
  CDS Start-End: 211-9126
ccagagccccctcgccccaaaggtcactgggactatttgtgcgaagagatgcagtggctctctgctgactttgctcaggagcgccgttggaaacggggtgtggcccggaaggtggtgcgcatggtgatccggcaccacgaggagcagcggcagaaagaggaacgggcccggagggaggagcaggccaagctgcgtcgaattgcttccaccatggccaaggatgtcaggcagttctggagcaatgtggagaaggtggtgcaattcaagcaacagtcccggcttgaggaaaagcgcaaaaaagccctggacctgcatttggacttcattgtggggcaaactgaaaagtactcggaccttctgtctcagagcctcaaccagccattaacctccagcaaagcaggctcttccccttgcctcggctcttcctcagctgcctccagtcctccaccccctgcttctcgcctggatgatgaagatggggactttcaaccccaagaggatgaggaagaggatgatgaggaaacgattgaagttgaagaacaacaggaaggcaatgatgcagaggcccagaggcgtgagattgagctgcttcgccgtgagggagaattgccactggaagagctgctccgttcccttccccctcagctgttggaagggccttccagcccctctcaaaccccctcatctcatgatagtgacacccgagatgggcctgaagaaggtgctgaagaagagccccctcaggtgttggagataaagcccccaccctctgctgtcacacagcgcaacaaacagccttggcatccagatgaagatgatgaagagtttactgccaacgaagaggaagcggaggatgaagaggatactatagcagctgaggaacagttggaaggggaggtggatcatgccatggagctgagcgagttggctcgagaaggtgagctttccatggaggagctattgcagcagtatgcaggagcctatgccccaggctctgggagcagtgaagatgaggatgaagatgaggttgatgctaatagctctgactgtgaaccagaggggcccgtggaagcggaagagcctcctcaggaggatagtagcagtcagtcagactctgtggaggaccggagtgaggatgaggaagatgaacattcagaggaggaagaaacaagtggaagttcagcatcagaggaatctgagtctgaagagtctgaggatgcccaatcacagagccaagcagatgaagaggaggaagatgatgattttggggtggagtacttgcttgccagggatgaagagcagagtgaggcagatgcaggcagtgggcctcctactccagggcccactactctaggtccaaagaaagaaattactgacattgctgcagcagctgaaagtctccagcccaagggttacacgctggccacgacccaggtaaagacgcccattcccctgcttctgcggggccagctccgggagtaccagcacattgggctagactggctggttaccatgtatgagaagaagcttaatggcattcttgctgatgagatggggcttgggaagaccatccagaccatctctctgcttgcccacttggcttgtgagaaaggtaactggggtccccatttaatcattgttcccaccagcgtgatgttgaactgggagatggagttgaaacggtggtgccccagctttaaaatcctcacttactatggagcccagaaagagaggaagctcaagcggcagggctggaccaagcccaatgcctttcatgtgtgtatcacatcttacaagctggtgctgcaggaccaccaggccttccgtcgcaagaactggcgctatctcattctggatgaggcgcagaacatcaagaacttcaagtcacagcgctggcagtcactcctcaacttcaacagccagagacgcctgctcctgacaggaactcccttgcagaacagcctcatggagctgtggtccttgatgcactttttgatgccccatgtcttccagtctcatcgcgagttcaaggagtggttctctaatcccctaactggcatgattgagggcagccaagagtataatgaaggtctagtcaaacgcctccacaaggttttgaggccttttttactgcgccgagttaaggtggatgttgagaagcagatgcccaaaaagtacgagcatgttatccgctgcaggctctccaagcgtcaacgctgtctctatgatgacttcatggcacagaccacaactaaggagacactagccacaggccatttcatgagcgtcatcaacattttgatgcagctgagaaaagtttgcaatcatccaaatctgttcgaccctcgaccggttacctcccctttcatcaccccaggcatctgcttcagcaccgcctctctggtgctaagggccacggatgtccatcccctccagcggatagacatgggtcgatttgaccttattggcctggaaggtcgtgtctctcgatatgaggcagacacatttctgccccggcaccgcctctctcgccgggtactgttagaagtggctactgctcctgaccccccaccccggcccaagccagtcaagatgaaggtcaacaggatgctgcagccagtacctaagcaagaaggccggacagtggtggtggtgaacaacccacgggcgcccctgggccctgtcccagttcgacctcctccaggtcctgagctctcagcccagcccacccctggcccagtcccccaagtgctgccagcatcactgatggtttcagcctcacctgccgggcccccgcttattcctgcatctcggcctcctggccctgtcctcttgcctccactgcagcccaacagtggttctctcccccaggtgttgccatcccccctgggggtcctgagtgggacctcacggcctcccacgccaaccttgtccctaaagccaacaccacctgccccagttcgcctgagcccagccccacctccaggctcctctagcctgttgaagcccctgacagtgccaccaggctacaccttccctcctgctgctgccaccaccacttctaccaccacggcaactgctaccaccacagcagtgccagctccgactcctgcaccacagcgcctcattctatctcccgatatgcaggctcgcctgccctcaggcgaagtggtcagcatcgggcagttagcctcactggcacaacgtccagtggctaatgcagggggaagcaaacctctcaccttccaaatccagggcaacaagctgactttgactggtgcccaggtgcgccagcttgctgtggggcagccccgcccgctgcaaatgccaccaaccatggtgaataatacaggcgtggtgaagattgtagtgagacaagcccctcgggatggactgactcctgttcctccattggccccagcaccccggcctccgagctctgggcttccagctgtgttgaatccacgccccacgttaacccctggccggctacccacacctactctgggtactgctcgagcccccatgcccacacccactctggtgaggcctcttctcaagctggtccacagtccttcacctgaagtcagtgcttcagcccccggagctgcccccttgaccatctcttctcctctccacgtgccatcctccctccctgggccagcctcttctccaatgccaattcccaactcctctccccttgctagtcctgtgtcctctacagtctcagttccattgtcatcttcactccccatctctgtccccaccacacttcctgccccagcctcggctccactcaccatccccatctcagcccccttgactgtttctgcttcgggcccagctctgttgaccagtgtgactccaccattggcacctgttgtcccagcggctcctggacctccctccttggcaccatctggtgcttccccgtcagcatcagccttgactctaggtttggccacagctccatccctgtcttcatctcagacacctggtcaccctctgttgttggctcccacctcttcacatgttccagggttgaactcaaccgtggccccagcatgctcacctgtcctggtgccagcttcggctctggccagtccttttccgtcagcaccaaatccagctccagctcaggcttcccttctggctccagcatcttctgcatctcaggctctagccacccctctggctcctatggcggctccacagacagcaattctggctccttctccagctcctcctctggctcctcttccggtcctggcaccatcgccaggtgctgctcctgtcctggcttcatcacagactccggttccagttatggctccatcgtctactccaggaacctctttagcctcagcttcaccggtaccagctccaacccctgtgttggctccatcatcaactcaaactatgctaccagccccggttccgtcacctctcccgagcccggcttctacgcagacactggccctagccccagctttagcacccactcttggaggctcatctccatctcagacactctctttgggaacggggaacccccagggaccctttccaactcagacattgtcattaactccagcatcatccctggtaccaactccagcccagacactgtctttggcaccaggaccaccactgggtccaactcagacgctgtctctggctccagcaccccctctggctccagcttctccagtgggcccagccccagctcacacgctgactttggctccagcatcgtcatctgcttcactcctggccccagcttcagtgcagacactgaccttgagccctgccccagttcctaccctgggcccggccgcagctcagaccttggcgctggccccagcctccacacagtccccagcttcccaggcatcttcccttgtggtttcggcatctggtgccgctcccttgcctgtcaccatggtatcccggctgcctgtttccaaggatgagcctgacacactgacattgcgctctggtccccccagccctccctccactgctacctcgtttggtggcccccggcctcgacgccagccccccccaccacctcgttcccctttttatctggactccctggaggaaaagcggaagcggcagcggtctgaacgcctggaacggattttccaacttagtgaggctcatggggccctggcacctgtgtatgggactgaagtcctggatttctgtaccctgccccaacctgttgccagccccatcggccctcgttctcctggccccagccaccccaccttttggacttataccgaggctgcccaccgggctgtactgtttccccagcagcgactagaccagctgtcagaaatcattgagaggttcatctttgtcatgcctcctgtggaggcacctcccccttccctgcatgcctgccacccacctccttggctggccccacgtcaggcagccttccaggagcaattggcctctgagctctggccccgggctcgtcctttgcaccgtattgtgtgtaacatgcgcacccagttccctgacttaagactcatccagtatgattgcggaaagttgcagacgttggcagtgctgttgcggcagctcaaggcagagggccaccgagtgctcatcttcacccagatgacccgaatgctggatgtattggagcagtttctcacctaccatggccatctctacctgcgcctggatggatctactagagttgaacagagacaggccttgatggaacggttcaatgcagacaaacgcatattctgcttcatcctttcaactcggagtgggggtgtgggcgtgaacctgacaggagcagacactgttgttttttatgacagcgactggaatcccaccatggatgctcaggcccaggaccgctgtcaccgaattggccagacccgggatgtccacatatataggcttatcagtgaacggacagtggaggagaacatcctaaaaaaggcaaatcagaagagaatgttgggggacatggccattgagggaggcaacttcaccacagcctatttcaaacagcagaccatccgagagctgtttgatatgcccctggaggaaccttctagctcatccgtgccctctgcccctgaagaggaggaagagactgtggccagcaagcagactcatattctggagcaggcattgtgtcgggcagaagatgaagaggatatccgtgcagccacccaggccaaggctgaacaggtggctgagcttgcagaatttaatgagaacgatgggtttcctgctggtgagggagaggaagctggccggcctggggctgaggatgaggagatgtcccgggctgagcaggaaattgctgccctcgtagaacagctgacccccattgagcgctatgccatgaaattcctggaggcctcactggaggaggtgagccgagaggagctcaaacaggcagaagagcaagtggaagctgcccgcaaagacctggaccaagccaaggaggaggtgttccgcctaccccaagaggaggaggaggggccgggggctggggatgagagttcctgtgggactggtggaggcacccaccggcgcagtaaaaaggccaaagcccctgagaggccggggactcgtgtcagtgagcgtcttcgtggagcccgggctgagactcaaggggcaaaccacactcctgtcatatccgcccatcaaactcgcagcaccaccacaccaccccgctgcagtcctgccagggagcgagttcccaggccagcacctaggcctcgacccactccagcttcagctccggctgcaattcctgcccttgttcctgtcccagtttctgccccagtacccatttcagccccaaatccaataaccattctccctgtccatatcttgccttctcctccccctccttcacagattcctccttgttcttctcctgcctgcacccctcctcctgcctgtacccctccaccagctcatacaccgcctccagcccaaacctgtcttgtaactccttcctctcctctcttgcttggtccaccttctgtgcccatctctgcctcagtcactaatctccccttgggcttgaggcctgaggcagagctgtgtgcccaggcattggcatctccagagtccctggagctggcttctgtggccagttcagaaacctcctcactttctcttgtgccccctaaagatctgttgccagttgctgtggagatcctgcctgtgtcagagaagaacctttctctcaccccttctgcacccagcctgaccttggaggctggcagcatccccaatggtcaagagcaggaggcaccagattctgctgaggggaccacccttacagtgctgcctgaaggtgaggagttgcccctgtgtgtgagtgagagcaatggcctggagctcccaccctcagcagcatctgatgagccacttcaggagccactggaggctgacaggacctcggaagagctgacagaggccaagaccccaacctccagcccagagaagccacaggaactcgttacagctgaggttgcagctccatccacctcatcttcagccacttcctcgcctgagggtccttcacctgcccgacctcctcggcgtcgcaccagtgctgatgtggaaattaggggtcaagggactggtcggccaggacaaccaccaggccccaaagtgcttcgaaagctgccaggacggctggtaactgtggtagaggaaaaggaactggtgcggcggcggcggcagcagcggggagctgccagcaccctagtgcctggggtctctgagactagtgccagcccgggaagcccgtctgtccgcagcatgtcagggccagaatcctcccctcccattggtgggccctgtgaagctgctccttcatcctcactgcccactccaccccagcagcccttcattgctcgccgtcacattgagctgggggtgactggtggtggcagccccgagaatggagacggagcactgctcgccatcaccccacctgctgtgaaacgtcggagggggaggccccccaagaagaacaggtctccagcagatgctgggagaggtgtggatgaggcaccctcatccaccttgaagggaaaaaccaatggggctgacccagtccctgggcctgagaccctaattgttgcagatcctgtcctggaaccacagcttattcctgggccccagcctcttggaccccagccagttcacagacccaatcccctcctgtcacctgtggagaaaagaaggcgaggacgaccccctaaagcacgagatttgcccatccctgggaccatttcctctgcaggggatggcaactccgaaagtcggacacagccacccccacacccatcacccctaaccccactcccaccactgctagtttgtcccactgctactgttgccaacactgtcaccactgtcaccatttcaacgtccccacccaaacggaagaggggccgacctcccaagaatcctccatcacctcggcccagccagctccccgtcttggaccgtgacagcacttctgttctcgagagctgtggattggggaggcgacggcaaccccagggccaaggggagagtgagggtagttcctctgatgaggatggaagccgccccctcacccgcctggcccgccttcggcttgaagcagaaggaatgcgaggacggaagagtggagggtccatggtggtggctgtaattcaggatgacctggacttagcagatagcgggccaggcgggttggaattgacaccacctgtggtctcactaaccccaaaactgcgctcgacccggctgcgtccagggtctctagtccccccactagagactgagaagttgcctcgcaaacgagcaggggccccagttggtgggagtcctgggctggcaaagcggggccgcctacagcccccaagtcccctggggcctgagggttcagtagaggagtctgaggctgaagcctcaggtgaggaggaggaaggggatgggaccccacgccgacgtcctggcccccgccggcttgttgggaccaccaaccaaggggaccagcgcatcctgcgcagcagcgcccctccctccctggctggccctgctgttagtcacagaggccgcaaggccaagacgtga

SEQ ID NO: 182590 - DNA, 836 bp, Homo sapiens
  Payload ID: 15976
  Gene Symbol: SRCAP
  Gene Name: Snf2-related CREBBP activator protein
  ENST ID: ENST00000411466
  CDS Start-End: 537-836
gcggccgagacggcggcggccattttggtgaggcctcgggagcggcagcggcggttcgctgggagtagcgtctgccctttttcccacccaccgtccgcatctgtgtgctgcgcgaagaggcagtggaggcaaggcggtggcagtagccgcagtctccaggggagtttaaaggccgcgaaggcggtggccaagagggggccctcccccctcctaggcgggagggggggtggtgcgcacgcccccgaggacgcaggtgtgattcccttcagtacggcggcaccgtggaagtgcagactttcacagggggtgtggtctcagctcacacaggtgctccagaggctggtggacctgagcggaggctgggacgccctggtgggccccgggccctggaaggcgggtcccggtggccggtggcccagaatgaggccagctcccagcatgccctgcagccggacgccagcccctcggccagcagtactggtgataacaacccagtcattcttcaggcatccaagggggagcctgggagtgggaccatgcagagcagcccctcccctgctcaccctcagctcccagtcctacagacacagatggtgtcggacggcatgacaggcagcaatcctgtgtcccctgcctcatccagttccccagcctctagtggggcaggcggcatctccccgcagcacatagctcaagattcctcactggatggacctccaggccccccagatggtgccacagtgcccctggaggggttcagcttatcccaggctgctgacctggctaacaagggcccgaagtgggagaagagccatgccgaaattgcagaacaggcc

SEQ ID NO: 182591 - DNA, 5937 bp, Homo sapiens
  Payload ID: 15976
  Gene Symbol: SRCAP
  Gene Name: Snf2-related CREBBP activator protein
  ENST ID: ENST00000483083
  CDS Start-End: 1-4832
aaacgattgaagttgaagaacaacaggaaggcaatgatgcagaggcccagaggcgtgagattgagctgcttcgccgtgagggagaattgccactggaagagctgctccgttcccttccccctcagctgttggaagggccttccagcccctctcaaaccccctcatctcatgatagtgacacccgagatgggcctgaagaaggtgctgaagaagagccccctcaggtgttggagataaagcccccaccctctgctgtcacacagcgcaacaaacagccttggcatccagatgaagatgatgaagagtttactgccaacgaagaggaagcggaggatgaagaggatactatagcagctgaggaacagttggaaggggaggtggatcatgccatggagctgagcgagttggctcgagaaggtgagctttccatggaggagctattgcagcagtatgcaggagcctatgccccaggctctgggagcagtgaagatgaggatgaagatgaggttgatgctaatagctctgactgtgaaccagaggggcccgtggaagcggaagagcctcctcaggaggatagtagcagtcagtcagactctgtggaggaccggagtgaggatgaggaagatgaacattcagaggaggaagaaacaagtggaagttcagcatcagaggaatctgagtctgaagagtctgaggatgcccaatcacagagccaagcagatgaagaggaggaagatgatgattttggggtggagtacttgcttgccagggatgaagagcagagtgaggcagatgcaggcagtgggcctcctactccagggcccactactctaggtccaaagaaagaaattactgacattgctgcagcagctgaaagtctccagcccaagggttacacgctggccacgacccaggtaaagacgcccattcccctgcttctgcggggccagctccgggagtaccagcacattgggctagactggctggttaccatgtatgagaagaagcttaatggcattcttgctgatgagatggggcttgggaagaccatccagaccatctctctgcttgcccacttggcttgtgagaaaggtaactggggtccccatttaatcattgttcccaccagcgtgatgttgaactgggagatggagttgaaacggtggtgccccagctttaaaatcctcacttactatggagcccagaaagagaggaagctcaagcggcagggctggaccaagcccaatgcctttcatgtgtgtatcacatcttacaagctggtgctgcaggaccaccaggccttccgtcgcaagaactggcgctatctcattctggatgaggcgcagaacatcaagaacttcaagtcacagcgctggcagtcactcctcaacttcaacagccagagacgcctgctcctgacaggaactcccttgcagaacagcctcatggagctgtggtccttgatgcactttttgatgccccatgtcttccagtctcatcgcgagttcaaggagtggttctctaatcccctaactggcatgattgagggcagccaagagtataatgaaggtctagtcaaacgcctccacaaggttttgaggccttttttactgcgccgagttaaggtggatgttgagaagcagatgcccaaaaagtacgagcatgttatccgctgcaggctctccaagcgtcaacgctgtctctatgatgacttcatggcacagaccacaactaaggagacactagccacaggccatttcatgagcgtcatcaacattttgatgcagctgagaaaagtttgcaatcatccaaatctgttcgaccctcgaccggttacctcccctttcatcaccccaggcatctgcttcagcaccgcctctctggtgctaagggccacggatgtccatcccctccagcggatagacatgggtcgatttgaccttattggcctggaaggtcgtgtctctcgatatgaggcagacacatttctgccccggcaccgcctctctcgccgggtactgttagaagtggctactgctcctgaccccccaccccggcccaagccagtcaagatgaaggtcaacaggatgctgcagccagtacctaagcaagaaggccggacagtggtggtggtgaacaacccacgggcgcccctgggccctgtcccagttcgacctcctccaggtcctgagctctcagcccagcccacccctggcccagtcccccaagtgctgccagcatcactgatggtttcagcctcacctgccgggcccccgcttattcctgcatctcggcctcctggccctgtcctcttgcctccactgcagcccaacagtggttctctcccccaggtgttgccatcccccctgggggtcctgagtgggacctcacggcctcccacgccaaccttgtccctaaagccaacaccacctgccccagttcgcctgagcccagccccacctccaggctcctctagcctgttgaagcccctgacagtgccaccaggctacaccttccctcctgctgctgccaccaccacttctaccaccacggcaactgctaccaccacagcagtgccagctccgactcctgcaccacagcgcctcattctatctcccgatatgcaggctcgcctgccctcaggcgaagtggtcagcatcgggcagttagcctcactggcacaacgtccagtggctaatgcagggggaagcaaacctctcaccttccaaatccagggcaacaagctgactttgactggtgcccaggtgcgccagcttgctgtggggcagccccgcccgctgcaaaggaatgtggtgcacctcgtgtcagcaggggggcagcaccatctcatcagccagcctgcccatgtggccctcatccaggccgtggccccgacccctggccctacccctgtctctgtgctgccttcttcgacccccagcaccacccctgcccctactggcctcagccttccgcttgctgctaaccaggtgccaccaaccatggtgaataatacaggcgtggtgaagattgtagtgagacaagcccctcgggatggactgactcctgttcctccattggccccagcaccccggcctccgagctctgggcttccagctgtgttgaatccacgccccacgttaacccctggccggctacccacacctactctgggtactgctcgagcccccatgcccacacccactctggtgaggcctcttctcaagctggtccacagtccttcacctgaagtcagtgcttcagcccccggagctgcccccttgaccatctcttctcctctccacgtgccatcctccctccctgggccagcctcttctccaatgccaattcccaactcctctccccttgctagtcctgtgtcctctacagtctcagttccattgtcatcttcactccccatctctgtccccaccacacttcctgccccagcctcggctccactcaccatccccatctcagcccccttgactgtttctgcttcgggcccagctctgttgaccagtgtgactccaccattggcacctgttgtcccagcggctcctggacctccctccttggcaccatctggtgcttccccgtcagcatcagccttgactctaggtttggccacagctccatccctgtcttcatctcagacacctggtcaccctctgttgttggctcccacctcttcacatgttccagggttgaactcaaccgtggccccagcatgctcacctgtcctggtgccagcttcggctctggccagtccttttccgtcagcaccaaatccagctccagctcaggcttcccttctggctccagcatcttctgcatctcaggctctagccacccctctggctcctatggcggctccacagacagcaattctggctccttctccagctcctcctctggctcctcttccggtcctggcaccatcgccaggtgctgctcctgtcctggcttcatcacagactccggttccagttatggctccatcgtctactccaggaacctctttagcctcagcttcaccggtaccagctccaacccctgtgttggctccatcatcaactcaaactatgctaccagccccggttccgtcacctctcccgagcccggcttctacgcagacactggccctagccccagctttagcacccactcttggaggctcatctccatctcagacactctctttgggaacggggaacccccagggaccctttccaactcagacattgtcattaactccagcatcatccctggtaccaactccagcccagacactgtctttggcaccaggaccaccactgggtccaactcagacgctgtctctggctccagcaccccctctggctccagcttctccagtgggcccagccccagctcacacgctgactttggctccagcatcgtcatctgcttcactcctggccccagcttcagtgcagacactgaccttgagccctgccccagttcctaccctgggcccggccgcagctcagaccttggcgctggccccagcctccacacagtccccagcttcccaggcatcttcccttgtggtttcggcatctggtgccgctcccttgcctgtcaccatggtatcccggctgcctgtttccaaggatgagcctgacacactgacattgcgctctggtccccccagccctccctccactgctacctcgtttggtggcccccggcctcgacgccagccccccccaccacctcgttcccctttttatctggtaagttttacttcctcaagagggaacaggaagttgagtttctttggagtgttggtagggtggatggaacagtgatgtcacatttaacctggtgaattacaaagcttaatgttatggaccaagtacttgagtgacatttggacaagtcccttctcttccctgggcgtgtacctcatgatccgcctgcctcagcctcctgaagtgttaggattacaggggtgagccaccacgcccggcctcttttcccgttttttaacccgcacggtaataaatgggcagtaaaaggaactcttctctgtcccttttatgatttccggtagctgtttctttcctgtactatgtatataggcccatgtctgtgtagtacttgagttaaactcacagttcagcttaagtaaaccagaactaaggagaaggaaggtccagtgggtccctccacgccctctggcttttccccactgtaatcagagctgctgcttagtctttgcttcatgcctactcccccaccttccaccagtgccattgactccacctttggtttttacctgaccagccgctaggttggtcctggctggttggaagtagagagtagagggattgctctgcaagtagataatagcctcttgccacttggttttttttggtaacagtttgtgctataaatcatataccattcgatttacccatttaaactgtacaatagtttttggttttttttttaaatacagatgggggtctcccactcttgaccaggctggtctcgaattcctggcctcaagtgatcctcccatctcggcctcccaaaatgctgggattataggtgtgagccaccatgcctggccctaaactgtacaataggtttttaatatatttatagggttgtacaatcatcaacacaatcaacttagaacctttccgtggccccaaaaagaaacgctgcacctgttagccagcattccccaatccctccgtccctcctagtcttgaatgactaccatcctacttttttatttctctagttttgcctatggagtcataatgtataatgtgtggtccattgtgactggcatcttctacttagattaatgttctttgaattttattgtgttatagcgtatatcagtacttcatttgtttttatgttgaataataatgtatgaataccacattttatccttga

SEQ ID NO: 182592 - DNA, 951 bp, Homo sapiens
  Payload ID: 15977
  Gene Symbol: SNF8
  Gene Name: SNF8, ESCRT-II complex subunit
  Uniprot ID: Q96H20
  ENST ID: ENST00000290330
  CDS Start-End: 77-850
gggagccggcggcggagtccgggacgtggagacccggggtcccggcagccgggcggcccgcgggcccagggtggggatgcaccgccgcggggtgggagctggcgccatcgccaagaagaaacttgcagaggccaagtataaggagcgagggacggtcttggctgaggaccagctagcccagatgtcaaagcagttggacatgttcaagaccaacctggaggaatttgccagcaaacacaagcaggagatccggaagaatcctgagttccgtgtgcagttccaggacatgtgtgcaaccattggcgtggatccgctggcctctggaaaaggattttggtctgagatgctgggcgtgggggacttctattacgaactaggtgtccaaattatcgaagtgtgcctggcgctgaagcatcggaatggaggtctgataactttggaggaactacatcaacaggtgttgaagggaaggggcaagttcgcccaggatgtcagtcaagatgacctgatcagagccatcaagaaactaaaggcacttggcactggcttcggcatcatccctgtgggcggcacttacctcattcagtctgttccagctgagctcaatatggatcacaccgtggtgctgcagctggcagagaatggctacgtgactgtcagtgagatcaaagccagtcttaaatgggagaccgagcgagcgcggcaagtgctggaacacctgctgaaggaagggttggcgtggctggacttacaggccccaggggaggcccactactggctgccagctctcttcactgacctctactcccaggagattacagctgaggaggccagagaagccctcccctgactgcatgtggaagggcacacagcagcaggcagggaggaggcggaggtggcaaataaacctgggcaattttgtttatacaaaaaatagaaaaaaagttccaa

SEQ ID NO: 182593 - DNA, 2319 bp, Homo sapiens
  Payload ID: 15977
  Gene Symbol: SNF8
  Gene Name: SNF8, ESCRT-II complex subunit
  Uniprot ID: Q96H20
  ENST ID: ENST00000502492
  CDS Start-End: 384-1160
atttgatgacctccaggcagtggagaggcagtcgaggaagaccagggccccaggcgcctacgtgggtggaatgcacaaggttggccttggctgccggggctccatgtcccagcactagccaaggagggcctcagccgcgcttgaatactcgtgctttcctcgccgcgaggctttgcgaatcttggccactagctaaaggcggggtcgccgggccggtaggaactggagacactcagcctcgcggcaggaaatgcggctcgtggcttccggcgcgtgcagatgacgcgcggctcgggcttccgccttggggagccggcggcggagtccgggacgtggagacccggggtcccggcagccgggcggcccgcgggcccagggtggggatgcaccgccgcggggtgggagctggcgccatcgccaagaagaaacttgcagaggccaagtataaggagcgagggacggtcttggctgaggaccagctagcccagatgtcaaagcagttggacatgttcaagaccaacctggaggaatttgccagcaaacacaagcaggagatccggaagaatcctgagttccgtgtgcagttccaggacatgtgtgcaaccattggcgtggatccgctggcctctggaaaaggattttggtctgagatgctgggcgtgggggacttctattacgaactaggtgtccaaattatcgaagtgtgcctggcgctgaagcatcggaatggaggtctgataactttggaggaactacatcaacaggtgttgaagggaaggggcaagttcgcccaggatgtcagtcaagatgacctgatcagagccatcaagaaactaaaggcacttggcactggcttcggcatcatccctgtgggcggcacttacctcattcagtctgttccagctgagctcaatatggatcacaccgtggtgctgcagctggcagagaagaatggctacgtgactgtcagtgagatcaaagccagtcttaaatgggagaccgagcgagcgcggcaagtgctggaacacctgctgaaggaagggttggcgtggctggacttacaggccccaggggaggcccactactggctgccagctctcttcactgacctctactcccaggagattacagctgaggaggccagagaagccctcccctgactgcatgtggaagggcacacagcagcaggcagggaggaggcggaggtggcaaataaacctgggcaattttgtttatacaaaaaatagaaaaaaagttccaagtttttctttcttccctcattcttttatttttgaaaagtgccttcacgttgcatttttattggaggaaaacctcgctcgttcagtaagcataatctgattaacacagagaacggcaagcacatataaaatgatttttgtaggtcatctgcaagttcatggaagagctgggcctagaatgtgggttgtttcctggcctgtctagtctttgtagctgtgagacatagattacagcctatgctaattcaaaccttttaaataaaatgttccttatctcaaactagctggtcctaatggaccagtaaataatattcactttcagtctcttctggcttcctctgtagaggctctaggttatgacagagttagctgtgagtatgaaggaaatagaagtcaatgtccaatcgtggctaaattggaggaaagaaaacaatggaatctgaggggaatcaaacaatagttagggaatgttctattttcttaaattccctactagctttctcaccctcctgtagtgattgccaggtccctctagcctcagtagtgggaaagggagtcatttactgaacacctaccctgtgccattttacatacagctcacttaaatttcaccaagtaggcagccttcaacatcacaggtgattcaatcaaagtaatttgccaggggccgccagcttcagccgagctaaagctggtgcctaggcctattaacccgagcccatgccttcatgtatcactgcatagtacagaatggcagcacatactgtgtgtagacatttttctacacacgtggtcagccaagagtaaaagcctctgcatcagaaagcaagaatctcctatagcaagtagaagtggtgatgagggaagaggccagagttgtttaaggctcccaaagtccttatggtctaaaggctaagatcctaaaagtgctagtttagtactggaaatctgaaaactcaatggtttttccatactgagacccttcctttagcaggatatagcctgggcccatctcttcctctgcctatccttgtaggacatgctcactccaagctctgga

SEQ ID NO: 182594 - DNA, 1051 bp, Homo sapiens
  Payload ID: 15977
  Gene Symbol: SNF8
  Gene Name: SNF8, ESCRT-II complex subunit
  ENST ID: ENST00000510558
  CDS Start-End: 73-576
gccggcggcggagtccgggacgtggagacccggggtcccggcagccgggcggcccgcgggcccagggtggggatgcaccgccgcggggtgggagctggcgccatcgccaagaagaaacttgcagaggccaagtataaggagcgagggacggtcttggctgaggaccagctagcccagatgtcaaagcagttggacatgttcaagaccaacctggaggaatttgccagcaaacacaagcaggagatccggaagaatcctgagttccgtgtgcagttccaggacatgtgtgcaaccattggcgtggatccgctggcctctggaaaaggattttggtctgagatgctgggcgtgggggacttctattacgaactaggtgtccaaattatcgaagtgtgcctggcgctgaagcatcggaatggaggtctgataactttggaggaactacatcaacaggtgttgaagggaaggggcaagttcgcccaggatgtcagtcagctggagcgcagtggtacaatctcggctcactgcaacctccgcctcctgggttcaaatgattcttctgcctcagcctcctgagtagctgggattacagagatgacctgatcagagccatcaagaaactaaaggcacttggcactggcttcggcatcatccctgtgggcggcacttacctcattcagtctgttccagctgagctcaatatggatcacaccgtggtgctgcagctggcagagaagaatggctacgtgactgtcagtgagatcaaagccagtcttaaatgggagaccgagcgagcgcggcaagtgctggaacacctgctgaaggaagggttggcgtggctggacttacaggccccaggggaggcccactactggctgccagctctcttcactgacctctactcccaggagattacagctgaggaggccagagaagccctcccctgactgcatgtggaagggcacacagcagcaggcagggaggaggcggaggtggcaaataaacctgggcaattttgtttatacaaaaaatagaaaaaaagttccaagtt

SEQ ID NO: 182595 - DNA, 560 bp, Homo sapiens
  Payload ID: 15977
  Gene Symbol: SNF8
  Gene Name: SNF8, ESCRT-II complex subunit
  ENST ID: ENST00000509995
  CDS Start-End: 1-245
tgcaccgccgcggggtgggagctggcgccatcgccaagaagaaacttgcagaggccaagtataaggagcgagggacggtcttggctgaggaccagctagcccagatgtcaaagcagttggacatgttcaagaccaacctggaggaatttgccagcaaacacaagcaggagatccggaagaatcctgagttccgtgtgcagttccaggacatgtgtgcaaccattggcgtggatccgctggcctaagaatggctacgtgactgtcagtgagatcaaagccagtcttaaatgggagaccgagcgagcgcggcaagtgctggaacacctgctgaaggaagggttggcgtggctggacttacaggccccaggggaggcccactactggctgccagctctcttcactgacctctactcccaggagattacagctgaggaggccagagaagccctcccctgactgcatgtggaagggcacacagcagcaggcagggaggaggcggaggtggcaaataaacctgggcaattttgtttatacaaaaaatagaaaaaaagttccaagtt

SEQ ID NO: 182596 - DNA, 742 bp, Homo sapiens
  Payload ID: 15977
  Gene Symbol: SNF8
  Gene Name: SNF8, ESCRT-II complex subunit
  ENST ID: ENST00000507302
  CDS Start-End: 14-325
gcccagggtggggatgcaccgccgcggggtgggagctggcgccatcgccaagaagaaacttgcagaggccaagtataaggagcgagggacggtcttggctgaggaccagctagcccagatgtcaaagcagttggacatgttcaagaccaacctggaggaatttgccagcaaacacaagcaggagatccggaagaatcctgagttccgtgtgcagttccaggacatgtgtgcaaccattggcgtggatccgctggcctcaggagttaccctggaaaaggattttggtctgagatgctgggcgtgggggacttctattacgaactaggtgtccaaattatcgaagtgtgcctggcgctgaagcatcggaatggagtctacaggcctctaaggacttgagagacatcttagctgtttcatgcagttgaatccatggcaagtctccatggccaagggtctgataactttggaggaactacatcaacaggtgttgaagggaaggggcaagttcgcccaggatgtcagtcaagatgacctgatcagagccatcaagaaactaaaggcacttggcactggcttcggcatcatccctgtgggcggcacttacctcattcagtctgttccagctgagctcaatatggatcacaccgtggtgctgcagctggcagagaagaatggctacgtgactgtcagtgagatcaaagccagtcttaaatgggagaccgagcgagcgcggcaagtgctg

SEQ ID NO: 182597 - DNA, 775 bp, Homo sapiens
  Payload ID: 15977
  Gene Symbol: SNF8
  Gene Name: SNF8, ESCRT-II complex subunit
  ENST ID: ENST00000514929
  CDS Start-End: 98-523
gcggctcgggcttccgccttggggagccggcggcggagtccgggacgtggagacccggggtcccggcagccgggcggcccgcgggcccagggtggggatgcaccgccgcggggtgggagctggcgccatcgccaagaagaaacttgcagaggccaagtataaggagcgagggacggtcttggctgaggaccagctagcccagatgtcaaagcagttggacatgttcaagaccaacctggaggaatttgccagcaaacacaagcaggagatccggaagaatcctgagttccgtgtgcagttccaggacatgtgtgcaaccattggcgtggatccgctggcctctggaaaaggattttggtctgagatgctgggcgtgggggacttctattacgaactaggtgtccaaattatcgaagtgtgcctggcgctgaagcatcggaatggaggtctgataactttggaggaactacatcaacaggtgttgaagggaaggggcaagttcgcccaggatgtcagtcagtaggtcttgtcttccaatcccttggagtacagaaagagagatgacctgatcagagccatcaagaaactaaaggcacttggcactggcttcggcatcatccctgtgggcggcacttacctcattcagtctgttccagctgagctcaatatggatcacaccgtggtgctgcagctggcagagaagaatggctacgtgactgtcagtgagatcaaagccagtcttaaatgggagaccgagcgagcgcggcaagtgctg

SEQ ID NO: 182598 - DNA, 700 bp, Homo sapiens
  Payload ID: 15977
  Gene Symbol: SNF8
  Gene Name: SNF8, ESCRT-II complex subunit
  ENST ID: ENST00000576353
  CDS Start-End: 92-253
cgggcttccgccttggggagccggcggcggagtccgggacgtggagacccggggtcccggcagccgggcggcccgcgggcccagggtggggatgcaccgccgcggggtgggagctggcgccatcgccaagaagaaacttgcagaggccaagtataaggagcgagggacggtcttggctgaggaccagctagcccagctggaaaaggattttggtctgagatgctgggcgtgggggacttctattacgaactaggtgtccaaattatcgaagtgtgcctggcgctgaagcatcggaatggaggtctgataactttggaggaactacatcaacaggtgttgaagggaaggggcaagttcgcccaggatgtcagtcaagatgacctgatcagagccatcaagaaactaaaggcacttggcactggcttcggcatcatccctgtgggcggcacttacctcattcagtctgttccagctgagctcaatatggatcacaccgtggtgctgcagctggcagagaagaatggctacgtgactgtcagtgagatcaaagccagtcttaaatgggagaccgagcgagcgcggcaagtgctggaacacctgctgaaggaagggttggcgtggctggacttacaggccccaggggaggcccactactggctgccagctctcttcactgacctctactcccaggagattacag

SEQ ID NO: 182599 - DNA, 583 bp, Homo sapiens
  Payload ID: 15977
  Gene Symbol: SNF8
  Gene Name: SNF8, ESCRT-II complex subunit
  ENST ID: ENST00000573795
  CDS Start-End: 78-188
ggggagccggcggcggagtccgggacgtggagacccggggtcccggcagccgggcggcccgcgggcccagggtggggatgcaccgccgcggggtgggagctggcgccatcgccaagaagaaacttgcagaggccaagtataaggagcgagggacggtcttggctgaggaccagctagcccagagatgacctgatcagagccatcaagaaactaaaggcacttggcactggcttcggcatcatccctgtgggcggcacttacctcattcagtctgttccagctgagctcaatatggatcacaccgtggtgctgcagctggcagagaagaatggctacgtgactgtcagtgagatcaaagccagtcttaaatgggagaccgagcgagcgcggcaagtgctggaacacctgctgaaggaagggttggcgtggctggacttacaggccccaggggaggcccactactggctgccagctctcttcactgacctctactcccaggagattacagctgaggaggccagagaagccctcccctgactgcatgtggaagggcacacagcagcaggcagggaggaggcggagg

SEQ ID NO: 182600 - DNA, 677 bp, Homo sapiens
  Payload ID: 15977
  Gene Symbol: SNF8
  Gene Name: SNF8, ESCRT-II complex subunit
  ENST ID: ENST00000509989
  CDS Start-End: 1-49
cgaagtgtgcctggcgctgaagcatcggaatggaggtgagggtggctaggtcctgtgaactggactctggacttctctgagagggagaaaaccgtaaaagattatcgtttccatcctgcagtctacaggcctctaaggacttgagagacatcttagctgtttcatgcagttgaatccatggcaagtctccatggccaagggtctgataactttggaggaactacatcaacaggtgttgaagggaaggggcaagttcgcccaggatgtcagtcaagatgacctgatcagagccatcaagaaactaaaggcacttggcactggcttcggcatcatccctgtgggcggcacttacctcattcagtctgttccagctgagctcaatatggatcacaccgtggtgctgcagctggcagagaagaatggctacgtgactgtcagtgagatcaaagccagtcttaaatgggagaccgagcgagcgcggcaagtgctggaacacctgctgaaggaagggttggcgtggctggacttacaggccccaggggaggcccactactggctgccagctctcttcactgacctctactcccaggagattacagctgaggaggccagagaagccctcccctgactgcatgtggaagggcacacagcagcaggcagggaggaggcggaggtgg

SEQ ID NO: 182601 - DNA, 331 bp, Homo sapiens
  Payload ID: 15978
  Gene Symbol: SNURF
  Gene Name: SNRPN upstream reading frame
  Uniprot ID: Q9Y675
  ENST ID: ENST00000338327
  CDS Start-End: 36-251
ctgacgcatctgtctgaggagcggtcagtgacgcgatggagcgggcaagggatcgcttacacctgagacgaactacagaacagcacgtaccagaggtggaagtccaagtcaaacgcagaaggactgcctcactgagcaaccaagagtgtcagttgtacccgaggcgttctcagcagcagcaagtacctgtggtggatttccaggctgaactgaggcaggcattcttagctgagacaccaagaggtggttaaagccatattggagtagcgaggaatctgattccaagcaaaaaccagacaatgtaataaaaatattattcataatttttcaa

SEQ ID NO: 182602 - DNA, 650 bp, Homo sapiens
  Payload ID: 15978
  Gene Symbol: SNURF
  Gene Name: SNRPN upstream reading frame
  Uniprot ID: Q9Y675
  ENST ID: ENST00000577949
  CDS Start-End: 64-279
cgcagagtggagcggccgccggagatgcctgacgcatctgtctgaggagcggtcagtgacgcgatggagcgggcaagggatcgcttacacctgagacgaactacagaacagcacgtaccagaggtggaagtccaagtcaaacgcagaaggactgcctcactgagcaaccaagagtgtcagttgtacccgaggcgttctcagcagcagcaagtacctgtggtggatttccaggctgaactgaggcaggcattcttagctgagacaccaagaggtggttaaagccatattggagtagcgaggaatctgattccaagcaaaaaccaggttagagctaatgcagcaatgatcaagaataaagaatcattaaagaatggggtgttgggggttctcttaattatcagtgacacattaatttttttccttagagcttcatacaataaacacattgcagaaagttttagaaagttttgcaggaccttaaattttctgccctgacactttcgtcatgtttctgtattccagttattgtagcgcatgcttttcaggtagttttcttttgcgttttttttaattatataaaaatatttcactataaatggctcttgaataccctgttactgaatgtttataatttccttttgtgggaggtg

SEQ ID NO: 182603 - DNA, 796 bp, Homo sapiens
  Payload ID: 15978
  Gene Symbol: SNURF
  Gene Name: SNRPN upstream reading frame
  Uniprot ID: Q9Y675
  ENST ID: ENST00000580062
  CDS Start-End: 46-261
ccggagatgcctgacgcatctgtctgaggagcggtcagtgacgcgatggagcgggcaagggatcgcttacacctgagacgaactacagaacagcacgtaccagaggtggaagtccaagtcaaacgcagaaggactgcctcactgagcaaccaagagtgtcagttgtacccgaggcgttctcagcagcagcaagtacctgtggtggatttccaggctgaactgaggcaggcattcttagctgagacaccaagaggtggttaaagccatattggagtagcgaggaatctgattccaagcaaaaaccagactgttggcaagagtagcaagatgctgcagcacattgactatagaatgagatgtatcctgcaagatggccgaatcttcattggcacctttaaggcttttgacaagcatatgaatttgatcctctgtgattgtgatgagttcagaaagatcaagccaaagaatgcgaagcaaccagagcgtgaagaaaagcgggttttgggtctggtgttgctgcgtggggagaacttggtatccatgactgtggaggggccaccccccaaagatactggcattgctcgggtaccacttgctggagctgctggaggccctggggttggtagggcagctggtagaggagtaccagctggtgtgccaattccccaggcccctgctggattggcaggccctgtccgaggagttgggggaccatcccagcaggtaatgactccacagggaagaggcactgtagcagctgctgctgttgctgcgactgccagtattgctggagccc

SEQ ID NO: 182604 - DNA, 1325 bp, Homo sapiens
  Payload ID: 15979
  Gene Symbol:
  Gene Name: SNRPN upstream reading frame protein [Source:UniProtKB/Swiss-Prot
  Acc:Q9Y675]
  Uniprot ID: Q9Y675
  ENST ID: ENST00000551312
  CDS Start-End: 16-231
gcggtcagtgacgcgatggagcgggcaagggatcgcttacacctgagacgaactacagaacagcacgtaccagaggtggaagtccaagtcaaacgcagaaggactgcctcactgagcaaccaagagtgtcagttgtacccgaggcgttctcagcagcagcaagtacctgtggtggatttccaggctgaactgaggcaggcattcttagctgagacaccaagaggtggttaaagccatattggagtagcgaggaatctgattccaagcaaaaaccaggtggtaatcactcaaggaaaaggaattatcagagtaacaatagttcctgttactgacttgatatggtctctgccagaatagcttctcagattaatggccactctcaggggaagcatttctccttgcattggtttgctggtatggatggcccttagattttggcatgagtgattatgcagcctatttgaagaaaacctgttttcaggacctttttaattaaatatggcctgttacatgagttaaagtgtcatacgataccattttttgaccacttagttgatgcctctgaaaggaagagagaatcagatcgctaaaatttgatgtgtcgtcagtgtggatcctactcagtagtgtcacaacgaggctgaaaatcatattaagtgcttttaggacagaaacgtaaactgctcaggtaaaataaccttataaagagaaataagcatatattgcagaggccttggctaggttcatgatgacacaggaccttgtctgaacataatgatttcaaaatttgagcttaaaaatgacactctgaaatccagtcagtgtgcctcactagacttttcgatttcaagattttctgcagaaaatgttttgaaaactttgaatacttaaaaatggcaggtgtagtattgcactttgctagttgctcagatacccttttttatttgtatagatattctgagttcctttttttttctacatgttgtacgttgtcgaaagctaaaaggaaacttatccttggatcacggaaggcagaggcatttggtgagatggaaacaaggatgtgtaaaaatgagacgaccacctctcggattaaaaaaaaaaagtgccagagttctagggttctaagtgatgtccaggaaggaggaggaataatatttatggagcatatattatggaacacagcaatcaggatgagtgaaaaattgatttgcagctgacctgcaaatggaatcatcaggaacatccctttctcatggagtcccttaatttacaagttaactgcaaacataggagatgatagttccaagaaggaacattttatc

SEQ ID NO: 182605 - DNA, 669 bp, Homo sapiens
  Payload ID: 15979
  Gene Symbol:
  Gene Name: SNRPN upstream reading frame protein [Source:UniProtKB/Swiss-Prot
  Acc:Q9Y675]
  ENST ID: ENST00000557230
  CDS Start-End: 16-129
gcggtcagtgacgcgatggagcgggcaagggatcgcttacacctgagacgaactacagaacagcacgtaccagaggtggaagtccaagtcaaacgcagaaggactgcctcactgagcaaccaagagtaatgactccacagggaagaggcactgtagcagctgctgctgttgctgcgactgccagtattgctggagccccaacacagtacccaccaggacggggcactccgcccccacccgtcggcagagcaaccccacctccaggcattatggctcctccacctggtatgagaccacccatgggcccaccaattgggcttccccctgctcgagggacgccaataggcatgccgcctccgggaatgagaccccctccaccaggcattagaggggaagcatttctccttgcattggtttgctggtatggatggcccttagattttggcatgagtgattatgcagcctatttgaagaaaacctgttttcaggacctttttaattaaatatggcctgttacatgagttaaaggcaatcaggatgagtgaaaaattgatttgcagctgacctgcaaatggaatcatcaggaacatccctttctcatggagtcccttaatttacaagttaactgcaaacataggagatgatagttccaagaaggaacattttatc

SEQ ID NO: 182606 - DNA, 1630 bp, Homo sapiens
  Payload ID: 15980
  Gene Symbol: SNU13
  Gene Name: SNU13 homolog, small nuclear ribonucleoprotein (U4/U6.U5)
  Uniprot ID: P55769
  ENST ID: ENST00000215956
  CDS Start-End: 265-651
gagaactcctccatccttcacctaattcttcctagttgtcctgggaccaagacaaattcgcctaagataaggagttacgtagaagacagggcgtcctggtgtacgggctggccctggacgtcacttccgctggcggcagtggcgtcacttcctgctcttgggggcggggcatccgtgtccttgcggtgctgggcagcagaccgtccaaaccgacacgcgtggtatcctcgcggtgtccggcaagagactaccaagacagacgctatgactgaggctgatgtgaatccaaaggcctatccccttgccgatgcccacctcaccaagaagctactggacctcgttcagcagtcatgtaactataagcagcttcggaaaggagccaatgaggccaccaaaaccctcaacaggggcatctctgagttcatcgtgatggctgcagacgccgagccactggagatcattctgcacctgccgctgctgtgtgaagacaagaatgtgccctacgtgtttgtgcgctccaagcaggccctggggagagcctgtggggtctccaggcctgtcatcgcctgttctgtcaccatcaaagaaggctcgcagctgaaacagcagatccaatccattcagcagtccattgaaaggctcttagtctaaacctgtggcctctgccacgtgctccctgccagcttcccccctgaggttgtgtatcatattatctgtgttagcatgtagtattttcagctactctctattgttataaaatgtagtactaaatctggtttctggatttttgtgttgtttttgttctgttttacagggttgctatcccccttcctttcctccctccctctgccatccttcatccttttatcctccctttttggaacaagtgttcagagcagacagaagcagggtggtggcaccgttgaaaggcagaaagagccaggagaaagctgatggagccaggacagagatctggttccagctttcagccactagcttcctgttgtgtgcggggtgtggtggaattaaacagcattcattgtgtgtccctgtgcctggcacacagaatcattcatacgtgttcaagtgatcaaggggtttcatttgctcttgggggattaggtatcatttggggaggaagcatgtgttctgtgaggttgttcggctatgtccaagtgtcgtttactaatgtacccctgctgtttgcttttggtaatgtgatgttgatgttctccccctacccacaaccatgcccttgagggtagcagggcagcagcataccaaagagatgtgctgcaggactccggaggcagcctgggtgggtgagccatggggcagttgacctgggtcttgaaagagtcgggagtgacaagctcagagagcatgaactgatgctggcatgaaggattccaggaagatcatggagacctggctggtagctgtaacagagatggtggagtccaaggaaacagcctgtctctggtgaatgggactttctttggtggacacttggcaccagctctgagagcccttcccctgtgtcctgccaccatgtgggtcagatgtactctctgtcacatgaggagagtgctagttcatgtgttctccattcttgtgagcatcctaataa

SEQ ID NO: 182607 - DNA, 1503 bp, Homo sapiens
  Payload ID: 15980
  Gene Symbol: SNU13
  Gene Name: SNU13 homolog, small nuclear ribonucleoprotein (U4/U6.U5)
  Uniprot ID: P55769
  ENST ID: ENST00000355257
  CDS Start-End: 114-500
gccgcgcggggccatttccgctgctgcttctgtgagtttttccggtgcacgcgagtgcttctgaaacgtcagctgcgctcccctaggagtgctgagcccgcggaaccgcagccatgactgaggctgatgtgaatccaaaggcctatccccttgccgatgcccacctcaccaagaagctactggacctcgttcagcagtcatgtaactataagcagcttcggaaaggagccaatgaggccaccaaaaccctcaacaggggcatctctgagttcatcgtgatggctgcagacgccgagccactggagatcattctgcacctgccgctgctgtgtgaagacaagaatgtgccctacgtgtttgtgcgctccaagcaggccctggggagagcctgtggggtctccaggcctgtcatcgcctgttctgtcaccatcaaagaaggctcgcagctgaaacagcagatccaatccattcagcagtccattgaaaggctcttagtctaaacctgtggcctctgccacgtgctccctgccagcttcccccctgaggttgtgtatcatattatctgtgttagcatgtagtattttcagctactctctattgttataaaatgtagtactaaatctggtttctggatttttgtgttgtttttgttctgttttacagggttgctatcccccttcctttcctccctccctctgccatccttcatccttttatcctccctttttggaacaagtgttcagagcagacagaagcagggtggtggcaccgttgaaaggcagaaagagccaggagaaagctgatggagccaggacagagatctggttccagctttcagccactagcttcctgttgtgtgcggggtgtggtggaattaaacagcattcattgtgtgtccctgtgcctggcacacagaatcattcatacgtgttcaagtgatcaaggggtttcatttgctcttgggggattaggtatcatttggggaggaagcatgtgttctgtgaggttgttcggctatgtccaagtgtcgtttactaatgtacccctgctgtttgcttttggtaatgtgatgttgatgttctccccctacccacaaccatgcccttgagggtagcagggcagcagcataccaaagagatgtgctgcaggactccggaggcagcctgggtgggtgagccatggggcagttgacctgggtcttgaaagagtcgggagtgacaagctcagagagcatgaactgatgctggcatgaaggattccaggaagatcatggagacctggctggtagctgtaacagagatggtggagtccaaggaaacagcctgtctctggtgaatgggactttctttggtggacacttggcaccagctctgagagcccttcccctgtgtcctgccaccatgtgggtcagatgtactctctgtcacatgaggagagtgctagttcatgtgttctccattcttgtgagcatcctaataaatctgttccattttgatgacagaa

SEQ ID NO: 182608 - DNA, 1670 bp, Homo sapiens
  Payload ID: 15980
  Gene Symbol: SNU13
  Gene Name: SNU13 homolog, small nuclear ribonucleoprotein (U4/U6.U5)
  Uniprot ID: P55769
  ENST ID: ENST00000401959
  CDS Start-End: 318-704
tctgtgagtttttccggtgcacgcgagtgcttctgaaacgtcagctgcgctcccctaggagtgctgagcccgcggaaccgcagccatgttgtcctgggaccaagacaaattcgcctaagataaggagttacgtagaagacagggcgtcctggtgtacgggctggccctggacgtcacttccgctggcggcagtggcgtcacttcctgctcttgggggcggggcatccgtgtccttgcggtgctgggcagcagaccgtccaaaccgacacgcgtggtatcctcgcggtgtccggcaagagactaccaagacagacgctatgactgaggctgatgtgaatccaaaggcctatccccttgccgatgcccacctcaccaagaagctactggacctcgttcagcagtcatgtaactataagcagcttcggaaaggagccaatgaggccaccaaaaccctcaacaggggcatctctgagttcatcgtgatggctgcagacgccgagccactggagatcattctgcacctgccgctgctgtgtgaagacaagaatgtgccctacgtgtttgtgcgctccaagcaggccctggggagagcctgtggggtctccaggcctgtcatcgcctgttctgtcaccatcaaagaaggctcgcagctgaaacagcagatccaatccattcagcagtccattgaaaggctcttagtctaaacctgtggcctctgccacgtgctccctgccagcttcccccctgaggttgtgtatcatattatctgtgttagcatgtagtattttcagctactctctattgttataaaatgtagtactaaatctggtttctggatttttgtgttgtttttgttctgttttacagggttgctatcccccttcctttcctccctccctctgccatccttcatccttttatcctccctttttggaacaagtgttcagagcagacagaagcagggtggtggcaccgttgaaaggcagaaagagccaggagaaagctgatggagccaggacagagatctggttccagctttcagccactagcttcctgttgtgtgcggggtgtggtggaattaaacagcattcattgtgtgtccctgtgcctggcacacagaatcattcatacgtgttcaagtgatcaaggggtttcatttgctcttgggggattaggtatcatttggggaggaagcatgtgttctgtgaggttgttcggctatgtccaagtgtcgtttactaatgtacccctgctgtttgcttttggtaatgtgatgttgatgttctccccctacccacaaccatgcccttgagggtagcagggcagcagcataccaaagagatgtgctgcaggactccggaggcagcctgggtgggtgagccatggggcagttgacctgggtcttgaaagagtcgggagtgacaagctcagagagcatgaactgatgctggcatgaaggattccaggaagatcatggagacctggctggtagctgtaacagagatggtggagtccaaggaaacagcctgtctctggtgaatgggactttctttggtggacacttggcaccagctctgagagcccttcccctgtgtcctgccaccatgtgggtcagatgtactctctgtcacatgaggagagtgctagttcatgtgttctccattcttgtg

SEQ ID NO: 182609 - DNA, 462 bp, Homo sapiens
  Payload ID: 15980
  Gene Symbol: SNU13
  Gene Name: SNU13 homolog, small nuclear ribonucleoprotein (U4/U6.U5)
  ENST ID: ENST00000402458
  CDS Start-End: 56-454
aaagggggctgatgccccagcctcaactctgaccctggtgccaggcctggttagcatgctcttggtgcagactgaggctgatgtgaatccaaaggcctatccccttgccgatgcccacctcaccaagaagctactggacctcgttcagcagtcatgtaactataagcagcttcggaaaggagccaatgaggccaccaaaaccctcaacaggggcatctctgagttcatcgtgatggctgcagacgccgagccactggagatcattctgcacctgccgctgctgtgtgaagacaagaatgtgccctacgtgtttgtgcgctccaagcaggccctggggagagcctgtggggtctccaggcctgtcatcgcctgttctgtcaccatcaaagaaggctcgcagctgaaacagcagatccaatccattcagcagtccattgaaaggctcttagtctaaacctgtgg

SEQ ID NO: 182610 - DNA, 1513 bp, Homo sapiens
  Payload ID: 15981
  Gene Symbol: SNUPN
  Gene Name: snurportin 1
  Uniprot ID: O95149
  ENST ID: ENST00000308588
  CDS Start-End: 156-1238
agggaggagccggaaactcagggcgcgaggcctgtgggcccagcggtgaggcagcagctgggggcggggggagggcggacctagcttcccagggcaggtgattcgtcggccccggtggcggcggcgcgtgcgacggtcacctcggtttggggaagatggaagagttgagtcaggccctggctagtagcttttctgtgtctcaagatctgaacagcacagctgccccacacccccgcctatcccagtacaagtccaagtacagttccttggagcagagtgagcgccgccggaggttactggaactgcagaaatccaagcggctggattatgtgaaccatgccagaagactggctgaagatgactggacagggatggagagtgaggaagaaaataagaaagatgatgaagaaatggacattgacactgtcaagaagttaccaaaacactatgctaatcaattgatgctttctgagtggttaattgacgttccttcagatttggggcaggaatggattgtggtcgtgtgccctgttggaaaaagagcccttatcgtggcctccaggggttctaccagtgcctacaccaagagtggctactgtgtcaacaggttttcttcacttctgccaggaggcaacaggcgaaactcaacagcaaaagactacaccattctagattgcatttacaatgaggtaaaccagacctactacgttctggatgtgatgtgctggcggggacaccctttttatgattgccagactgatttccgattctactggatgcattcaaagttaccagaagaagaaggactgggagagaaaaccaagcttaatccttttaaatttgtggggctaaagaacttcccttgcactcccgaaagcctgtgtgatgtgctatctatggatttcccttttgaggtagatggacttctcttctaccacaaacagacccactacagccccggaagcactcccttggtgggctggctgcgcccctacatggtgtcagatgtccttggtgtagctgtgccggctggcccgctgaccaccaagccagactatgctgggcaccagctccagcagattatggagcacaagaagagccagaaggaaggcatgaaggagaaactcacacacaaggcctctgagaatgggcactatgaattggagcacctgtctactcccaagttgaagggttcttcccatagcccagaccaccctggatgcctcatggagaattaaagagagaagcctccttaaggagccacaggatggtacctggccccaaaaggaatcctggagaggaggacagtgacaacaggtgacttcattctttagagtgaactttccaaacccagtccagctggaaacagcttatctataatctgaaatgctggctcaaacagttatggggaggttcccagattgcgtagcattcagattgatttgagcagctcctactgtgataagtgtatcccagatccacaatgtaaatatatgtgatttgtaagaaagaa

SEQ ID NO: 182611 - DNA, 1931 bp, Homo sapiens
  Payload ID: 15981
  Gene Symbol: SNUPN
  Gene Name: snurportin 1
  Uniprot ID: O95149
  ENST ID: ENST00000564644
  CDS Start-End: 580-1662
gtgcgacggtcacctcggtttgggtgagtccctgggttcgagcccgggccccgccagctgccgagttgcctctcggtgccggactgtgactccctctggccggccctgcactctggcctcctgggacgtcatctggagggatagagccaggcctgggactccttttgggagagtttccgttcttctattccgtgctgtccggccaggacccctcagggacttctgtggggcaggggcgaatcatgcatggcctagatgaccccatgcctagaaaaaggcagtgcggggcggtggcggcgcgcacggccgagtgaagcagatagcgtccccggggctggagcccggtagcagggccgggcgttgtggcgcgtgcctgtaatcccagctactcgggaggctgaggcaggagaatcgcttgaatccgggagatggaggttgcagtgagccgagatcatgccactgcactccagcctgggcaacaagagcgaaactctgtctcaaaaaaaaaacaacaacaacaaagaaaaaacaaaacgaaacagcaggaacccgccaagaacagccttgaaggaagggaagatggaagagttgagtcaggccctggctagtagcttttctgtgtctcaagatctgaacagcacagctgccccacacccccgcctatcccagtacaagtccaagtacagttccttggagcagagtgagcgccgccggaggttactggaactgcagaaatccaagcggctggattatgtgaaccatgccagaagactggctgaagatgactggacagggatggagagtgaggaagaaaataagaaagatgatgaagaaatggacattgacactgtcaagaagttaccaaaacactatgctaatcaattgatgctttctgagtggttaattgacgttccttcagatttggggcaggaatggattgtggtcgtgtgccctgttggaaaaagagcccttatcgtggcctccaggggttctaccagtgcctacaccaagagtggctactgtgtcaacaggttttcttcacttctgccaggaggcaacaggcgaaactcaacagcaaaagactacaccattctagattgcatttacaatgaggtaaaccagacctactacgttctggatgtgatgtgctggcggggacaccctttttatgattgccagactgatttccgattctactggatgcattcaaagttaccagaagaagaaggactgggagagaaaaccaagcttaatccttttaaatttgtggggctaaagaacttcccttgcactcccgaaagcctgtgtgatgtgctatctatggatttcccttttgaggtagatggacttctcttctaccacaaacagacccactacagccccggaagcactcccttggtgggctggctgcgcccctacatggtgtcagatgtccttggtgtagctgtgccggctggcccgctgaccaccaagccagactatgctgggcaccagctccagcagattatggagcacaagaagagccagaaggaaggcatgaaggagaaactcacacacaaggcctctgagaatgggcactatgaattggagcacctgtctactcccaagttgaagggttcttcccatagcccagaccaccctggatgcctcatggagaattaaagagagaagcctccttaaggagccacaggatggtacctggccccaaaaggaatcctggagaggaggacagtgacaacaggtgacttcattctttagagtgaactttccaaacccagtccagctggaaacagcttatctataatctgaaatgctggctcaaacagttatggggaggttcccagattgcgtagcattcagattgatttgagcagctcctactgtgataagtgtatcccagatccacaatgtaaatatatgtgatttgtaag

SEQ ID NO: 182612 - DNA, 406 bp, Homo sapiens
  Payload ID: 15981
  Gene Symbol: SNUPN
  Gene Name: snurportin 1
  ENST ID: ENST00000563875
  CDS Start-End: 401-406
gagtccctgggttcgagcccgggccccgccagctgccgagttgcctctcggtgccggactgtgactccctctggccggccctgcactctggcctcctgggacgtcatctggagggatagagccaggcctgggactccttttgggagagtttccgttcttctattccgtgctgtccggccaggacccctcagggacttctgtggggcaggggcgaatcatgcatggcctagatgaccccatgcctagaaaaaggcagtgcggggcggtggcggcgcgcacggccgagtgaagcagatagcgtccccggggctggagcccggtagcagggttcttcacactactggagcattgacgttacttgttaagcagccttccacatcctagctcttttccaaggaagatggaa

SEQ ID NO: 182613 - DNA, 661 bp, Homo sapiens
  Payload ID: 15981
  Gene Symbol: SNUPN
  Gene Name: snurportin 1
  ENST ID: ENST00000563793
  CDS Start-End: 471-661
agggagttggagcgggggttactggtgctaagaccacctggggctaaggtccgaacacttggaggcagcaccatccaaggaatgggttgaaacagcaggagcccggcggggcgcagtggctcacgcctgtaatcccagcactttgggaggccgaggtgggcggatcacctgaggtcaggagtttgagaccagcctgaccaacatggtgaaaccccatctgtactaaaaatacaaaaaaaattagccgggcgttgtggcgcgtgcctgtaatcccagctactcgggaggctgaggcaggagaatcgcttgaatccgggagatggaggttgcagtgagccgagatcatgccactgcactccagcctgggcaacaagagcgaaactctgtctcaaaaaaaaaacaacaacaacaaagaaaaaacaaaacgaaacagcaggaacccgccaagaacagccttgaaggaagggaagatggaagagttgagtcaggccctggctagtagcttttctgtgtctcaagatctgaacagcacagctgccccacacccccgcctatcccagtacaagtccaagtacagttccttggagcagagtgagcgccgccggaggttactggaactgcagaaatccaagcggctggattatgtgaaccatgccagaag

SEQ ID NO: 182614 - DNA, 1641 bp, Homo sapiens
  Payload ID: 15981
  Gene Symbol: SNUPN
  Gene Name: snurportin 1
  Uniprot ID: O95149
  ENST ID: ENST00000567134
  CDS Start-End: 284-1366
ggcgcgaggcctgtgggcccagcggtgaggcagcagctgggggcggggggagggcggacctagcttcccagggcaggtgattcgtcggccccggtggcggcggcgcgtgcgacggtcacctcggtttggggtccacctaaagtgggaagtctgttttcaaaatgacatctactccatgcctgtcttgtttccctaatgtactttatggaagttcttcacactactggagcattgacgttacttgttaagcagccttccacatcctagctcttttccaaggaagatggaagagttgagtcaggccctggctagtagcttttctgtgtctcaagatctgaacagcacagctgccccacacccccgcctatcccagtacaagtccaagtacagttccttggagcagagtgagcgccgccggaggttactggaactgcagaaatccaagcggctggattatgtgaaccatgccagaagactggctgaagatgactggacagggatggagagtgaggaagaaaataagaaagatgatgaagaaatggacattgacactgtcaagaagttaccaaaacactatgctaatcaattgatgctttctgagtggttaattgacgttccttcagatttggggcaggaatggattgtggtcgtgtgccctgttggaaaaagagcccttatcgtggcctccaggggttctaccagtgcctacaccaagagtggctactgtgtcaacaggttttcttcacttctgccaggaggcaacaggcgaaactcaacagcaaaagactacaccattctagattgcatttacaatgaggtaaaccagacctactacgttctggatgtgatgtgctggcggggacaccctttttatgattgccagactgatttccgattctactggatgcattcaaagttaccagaagaagaaggactgggagagaaaaccaagcttaatccttttaaatttgtggggctaaagaacttcccttgcactcccgaaagcctgtgtgatgtgctatctatggatttcccttttgaggtagatggacttctcttctaccacaaacagacccactacagccccggaagcactcccttggtgggctggctgcgcccctacatggtgtcagatgtccttggtgtagctgtgccggctggcccgctgaccaccaagccagactatgctgggcaccagctccagcagattatggagcacaagaagagccagaaggaaggcatgaaggagaaactcacacacaaggcctctgagaatgggcactatgaattggagcacctgtctactcccaagttgaagggttcttcccatagcccagaccaccctggatgcctcatggagaattaaagagagaagcctccttaaggagccacaggatggtacctggccccaaaaggaatcctggagaggaggacagtgacaacaggtgacttcattctttagagtgaactttccaaacccagtccagctggaaacagcttatctataatctgaaatgctggctcaaacagttatggggaggttcccagattgcgtagcattcagattgatttgagcagctcctactgtgataagtgtatcccagatccacaatgtaaatatatgtgatttgtaagaaagaa

SEQ ID NO: 182615 - DNA, 1023 bp, Homo sapiens
  Payload ID: 15981
  Gene Symbol: SNUPN
  Gene Name: snurportin 1
  ENST ID: ENST00000569817
  CDS Start-End: 395-1023
gtaatccaggcaattggcactgcccgtttaagagcacgggcccaagaggggaaggggactccaggtgaagccctaaggcccgggaagatctgcgggaggcggcagggcccagggcgttgaatgcccggccacaagatcagcctcctcccattggcgaaaggagccccgaagagcttgtgttcaggagggaggcctcggcctggtcaagtcatctagcaggaagagtcccggacagtgcaaagcaaatgcaagaagaccccctccctagccgatgggaaatgccccagccgttgaaggcggaaataacggcctgtaggcaacggaactcccagcgttcgcaaaggagggaggagccggaaactcagggcgcgaggcctgtgggcccagcgggaagatggaagagttgagtcaggccctggctagtagcttttctgtgtctcaagatctgaacagcacagctgccccacacccccgcctatcccagtacaagtccaagtacagttccttggagcagagtgagcgccgccggaggttactggaactgcagaaatccaagcggctggattatgtgaaccatgccagaagactggctgaagatgactggacagggatggagagtgaggaagaaaataagaaagatgatgaagaaatggacattgacactgtcaagaagttaccaaaacactatgctaatcaattgatgctttctgagtggttaattgacgttccttcagatttggggcaggaatggattgtggtcgtgtgccctgttggaaaaagagcccttatcgtggcctccaggggttctaccagtgcctacaccaagagtggctactgtgtcaacaggttttcttcacttctgccaggaggcaacaggcgaaactcaacagcaaaagactacaccattctagattgcatttacaatgaggtaaaccagacctactacgttctggatgtgatgtgctggcggggacaccctttttatgattgccagactgatttccgattctactggatgcattc

SEQ ID NO: 182616 - DNA, 644 bp, Homo sapiens
  Payload ID: 15981
  Gene Symbol: SNUPN
  Gene Name: snurportin 1
  ENST ID: ENST00000564086
  CDS Start-End: 237-644
cccgccctgcagaggctacaccctggcaggacttaatctcctaaatctctgccgcttaccctagtcttttgcaccaatttaatcattccttcacgcagggtctactgagcgccatcccttgtgctggactctggctacttaaataggaatcaagccaggtccctaccattgctcagcccgcagccgagtgggaaagaagctcgcaaaagcagcaaacaggcagtaatcgagggaagatggaagagttgagtcaggccctggctagtagcttttctgtgtctcaagatctgaacagcacagctgccccacacccccgcctatcccagtacaagtccaagtacagttccttggagcagagtgagcgccgccggaggttactggaactgcagaaatccaagcggctggattatgtgaaccatgccagaagactggctgaagatgactggacagggatggagagtgaggaagaaaataagaaagatgatgaagaaatggacattgacactgtcaagaagttaccaaaacactatgctaatcaattgatgctttctgagtggttaattgacgttccttcagatttggggcaggaatggattgtggtcgtgtgccctgttggaaaaagagcccttatcgtggcctccagg

SEQ ID NO: 182617 - DNA, 759 bp, Homo sapiens
  Payload ID: 15981
  Gene Symbol: SNUPN
  Gene Name: snurportin 1
  ENST ID: ENST00000568162
  CDS Start-End: 458-759
ccgccagctgccgagttgcctctcggtgccggactgtgactccctctggccggccctgcactctggcctcctgggacgtcatctggagggatagagccaggcctgggactccttttgggagagtttccgttcttctattccgtgctgtccggccaggacccctcagggacttctgtggggcaggggcgaatcatgcatggcctagatgaccccatgcctagaaaaaggcagtgcggggcggtggcggcgcgcacggccgagtgaagcagatagcgtccccggggctggagcccggtagcagggggtccacctaaagtgggaagtctgttttcaaaatgacatctactccatgcctgtcttgtttccctaatgtactttatggaagttcttcacactactggagcattgacgttacttgttaagcagccttccacatcctagctcttttccaaggaagatggaagagttgagtcaggccctggctagtagcttttctgtgtctcaagatctgaacagcacagctgccccacacccccgcctatcccagtacaagtccaagtacagttccttggagcagagtgagcgccgccggaggttactggaactgcagaaatccaagcggctggattatgtgaaccatgccagaagactggctgaagatgactggacagggatggagagtgaggaagaaaataagaaagatgatgaagaaatggacattgacactgtcaagaagttaccaaaacactatgctaatca

SEQ ID NO: 182618 - DNA, 920 bp, Homo sapiens
  Payload ID: 15981
  Gene Symbol: SNUPN
  Gene Name: snurportin 1
  ENST ID: ENST00000568078
  CDS Start-End: 1-603
agaagactggctgaagatgactggacagggatggagagtgaggaagaaaataagaaagatgatgaagaaatggacattgacactgtcaagaagttaccaaaacactatgctaatcaattgatgctttctgagtggttaattgacgttccttcagatttggggcaggaatggattgtggtcgtgtgccctgttggaaaaagagcccttatcgtggcctccaggggttctaccagtgcctacaccaagagtggctactgtgtcaacaggttttcttcacttctgccaggaggcaacaggcgaaactcaacagcaaaagactacaccattctagattgcatttacaatgaggtaaaccagacctactacgttctggatgtgatgtgctggcggggacaccctttttatgattgccagactgatttccgattctactggatgcattcaaagttaccagaagaagaaggactgggagagaaaaccaagcttaatccttttaaatttgtggggctaaagaacttcccttgcactcccgaaagcctgtgtgatgtgctatctatggatttcccttttgaggtaacgaaaccattgtctttattgccttgacatgatgataggctgcagagagacttagttacacaaagtcttaaaatattccttgattgtgctgtgtcaaagcatcagaatgggacaaagctgattctggagaaaggatgtacttgctgcccttcagagcctgagctccacccatgctggataagtcagaatgctggcactggaagggcccttaatggacagctcgtccaactccctcatcttacagatggagaaactgaggtccggagaaactgaggcccagataggagcaagacttgcatgcctagatccttcttgtgtgcctcttcctactgcaagctgagacc

SEQ ID NO: 182619 - DNA, 1682 bp, Homo sapiens
  Payload ID: 15981
  Gene Symbol: SNUPN
  Gene Name: snurportin 1
  Uniprot ID: O95149
  ENST ID: ENST00000564675
  CDS Start-End: 364-1446
ggcgcgtgcgacggtcacctcggtttgggtgagtccctgggttcgagcccgggccccgccagctgccgagttgcctctcggtgccggactgtgactccctctggccggccctgcactctggcctcctgggacgtcatctggagggatagagccaggcctgggactccttttgggagagtttccgttcttctattccgtgctgtccggccaggacccctcagggacttctgtggggcaggggcgaatcatgcatggcctagatgaccccatgcctagaaaaaggcagtgcggggcggtggcggcgcgcacggccgagtgaagcagatagcgtccccggggctggagcccggtagcagggggaagatggaagagttgagtcaggccctggctagtagcttttctgtgtctcaagatctgaacagcacagctgccccacacccccgcctatcccagtacaagtccaagtacagttccttggagcagagtgagcgccgccggaggttactggaactgcagaaatccaagcggctggattatgtgaaccatgccagaagactggctgaagatgactggacagggatggagagtgaggaagaaaataagaaagatgatgaagaaatggacattgacactgtcaagaagttaccaaaacactatgctaatcaattgatgctttctgagtggttaattgacgttccttcagatttggggcaggaatggattgtggtcgtgtgccctgttggaaaaagagcccttatcgtggcctccaggggttctaccagtgcctacaccaagagtggctactgtgtcaacaggttttcttcacttctgccaggaggcaacaggcgaaactcaacagcaaaagactacaccattctagattgcatttacaatgaggtaaaccagacctactacgttctggatgtgatgtgctggcggggacaccctttttatgattgccagactgatttccgattctactggatgcattcaaagttaccagaagaagaaggactgggagagaaaaccaagcttaatccttttaaatttgtggggctaaagaacttcccttgcactcccgaaagcctgtgtgatgtgctatctatggatttcccttttgaggtagatggacttctcttctaccacaaacagacccactacagccccggaagcactcccttggtgggctggctgcgcccctacatggtgtcagatgtccttggtgtagctgtgccggctggcccgctgaccaccaagccagactatgctgggcaccagctccagcagattatggagcacaagaagagccagaaggaaggcatgaaggagaaactcacacacaaggcctctgagaatgggcactatgaattggagcacctgtctactcccaagttgaagggttcttcccatagcccagaccaccctggatgcctcatggagaattaaagagagaagcctccttaaggagccacaggatggtacctggccccaaaaggaatcctggagaggaggacagtgacaacaggtgacttcattctttagagtgaactttccaaacccagtccagctggaaacagcttatctataatctgaaatgctggctcaaacagttatggggaggttcccagattgcgtagcattcagattgatttgagcagctcctactgtgataagtgtatccc

SEQ ID NO: 182620 - DNA, 2163 bp, Homo sapiens
  Payload ID: 15982
  Gene Symbol: SNW1
  Gene Name: SNW domain containing 1
  Uniprot ID: Q13573
  ENST ID: ENST00000261531
  CDS Start-End: 64-1674
cctcatcatctggaaagacccgcccagcggtgctgtcgctcgcgctggaagaagcggaagaagatggcgctcaccagctttttacctgcacctactcagctatctcaggaccagcttgaggctgaagaaaaggcaagatcccagagatcacggcagacctcactggtctcctcccgaagagaacctcccccgtacggataccggaaaggctggatacctcggttattagaggattttggagatggaggtgcttttccagagatccatgtggcccagtatccactggatatgggacgaaagaaaaaaatgtcgaatgcgctggccattcaggtggattctgaaggaaaaattaaatatgatgcaattgctcgacaaggacagtcaaaagacaaggtcatttatagcaaatacactgacctggttccaaaggaggttatgaatgcagatgatccagacctgcaaaggcccgatgaagaagctattaaagagataacagaaaagacaagagtagccttagaaaaatctgtatcacagaaggtcgccgcagccatgccagttcgagcagctgacaaattggctcctgctcagtatatccgatacacaccatctcagcaaggagtggcattcaactctggagctaaacagagggttattcggatggtagaaatgcagaaagatccaatggagcctccaaggttcaagattaataagaaaattccccggggaccaccttctcctcctgcgcctgtcatgcattctcctagccgaaagatgactgtaaaggaacaacaagagtggaagattcctccttgtatttctaactggaaaaatgcaaagggttatacaattccattagacaaacgtctggctgctgatggaagaggactacagacagtacacataaatgaaaatttcgccaaattggcagaagccctctacattgctgatcggaaggctcgtgaagctgtggaaatgcgtgcccaagtagagagaaaaatggctcagaaagaaaaggaaaaacatgaagagaaacttagagaaatggcccagaaagccagggagagaagagctgggatcaaaactcatgtggaaaaagaggatggggaggcacgtgagagggatgaaatccggcatgacaggcgaaaagagagacagcatgaccggaatctttccagggcagctcctgataagaggtcgaaacttcagagaaatgaaaatcgggatatcagtgaagttattgctctcggtgttcctaatcctcggacttccaatgaagttcagtatgaccaaaggctcttcaaccaatccaagggtatggacagtggatttgcaggtggagaagatgaaatttataatgtttatgatcaagcctggagaggtggtaaagatatggcccagagtatttataggcccagtaaaaatctggacaaggacatgtatggtgatgacctagaagccagaataaagaccaacagatttgttcccgacaaggagttttctggttcagaccgtagacagagaggccgagaaggaccagtgcagtttgaggaagatccttttggtttggacaagtttttggaagaagccaaacagcatggtggctctaaaagaccctcagatagcagccgccccaaggaacacgagcatgaaggcaagaagaggaggaaggaataggcacaggtctctccaaagtgaatgaactcttacccataaccctaatgatgcaagtcatatgggggaacactttgtaaatggtcaggataaaaaccaaatctgggtgccagatcccagcactactttttattactggagaaatgggggggatagaaaattctactttgaattatttagttttttttaaagagtgggttgtgtttgtgcttctcccacctttcagcatttatagaacatgctgccccacatacaaagtcaagaccacttacttttatgtgacactagtagtttggggttaatgttttgtgtaagaacagctgcatatgagtaaagttaccccaaccacagtgaggaggaagatgttcacatactggaactgtcctgccaaataaattttgcccctattgtgctctgttttaatttggagtgggcaaagtaacctcttgcttggtgcaactatttgtttcaaataaaaacatttagacaaaa

SEQ ID NO: 182621 - DNA, 1855 bp, Homo sapiens
  Payload ID: 15982
  Gene Symbol: SNW1
  Gene Name: SNW domain containing 1
  ENST ID: ENST00000555761
  CDS Start-End: 30-1745
gtcgctcgcgctggaagaagcggaagaagatggcgctcaccagctttttacctgcacctactcagctatctcaggaccagcttgaggctgaagaaaaggcaagatcccagagatcacggcagacctcactggtctcctcccgaagagaacctcccccgtacggataccggaaaggctggatacctcggttattagaggattttggagatggaggtgcttttccagagatccatgtggcccagtatccactggatatgggacgaaagaaaaaaatgtcgaatgcgctggccattcaggtggattctgaaggaaaaattaaatatgatgcaattgctcgacaaggacagtcaaaagacaaggtcatttatagcaaatacactgacctggttccaaaggaggttatgaatgcagatgatccagacctgcaaaggcccgatgaagaagctattaaagagataacagaaaagacaagagtagccttagaaaaatctgtatcacagaaggtcgccgcagccatgccagttcgagcagctgacaaattggctcctgctcagtatatccgatacacaccatctcagcaaggagtggcattcaactctggagctaaacagagggttattcggatggtagaaatgcagaaagatccaatggagcctccaaggttcaagattaataagaaaattccccggggaccaccttctcctcctgcgcctgtcatgcattctcctagccgaaagatgactgtaaaggaacaacaagagtggaagattcctccttgtatttctaactggaaaaatgcaaagggttatacaattccattagacaaacgtctggctgctgatggaagaggactacagacagtacacataaatgaaaatttcgccaaattggcagaagccctctacattgctgatcggaaggctcgtgaagctgtggaaatgcgtgcccaagtagagagaaaaatggctcagaaagaaaaggaaaaacatgaagagaaacttagagaaatggcccagaaagccagggagagaagagctgggatcaaaactcatgtggaaaaagaggatggggaggcacgtgagagggatgaaatccggcatgacaggcgaaaagagagacagcatgaccggaatctttccagggcagctcctgataagaggtcgaaacttcagagaaatgaaaatcgggatatcagtgaagttattgctctcggtgttcctaatcctcggacttccaatgaagttcagtatgaccaaaggctcttcaaccaatccaagggtatggacagtggatttgcaggtggagaagatgaaatttataatgtttatgatcaagcctggagaggtggtaaagatatggcccagagtatttataggcccagtaaaaatctggacaaggacatgtatggtgatgacctagaagccagaataaagaccaacaggtgccaagccatacaactcaatttcagtgtttacactggtgaaagcaaagtagttcatagttttttctccttttccttagatttgttcccgacaaggagttttctggttcagaccgtagacagagaggccgagaaggaccagtgcagtttgaggaagatccttttggtttggacaagtttttggaagaagccaaacagcatggtggctctaaaagaccctcagatagcagccgccccaaggaacacgagcatgaaggcaagaagaggaggaaggaataggcacaggtctctccaaagtgaatgaactcttacccataaccctaatgatgcaagtcatatgggggaacactttgtaaatggtcaggataaaaaccaaatctgggtgccagatcccagcactactttttattactg

SEQ ID NO: 182622 - DNA, 1966 bp, Homo sapiens
  Payload ID: 15982
  Gene Symbol: SNW1
  Gene Name: SNW domain containing 1
  ENST ID: ENST00000556428
  CDS Start-End: 81-224
actccttcctttccgctcctcatcatctggaaagacccgcccagcggtgctgtcgctcgcgctggaagaagcggaagaagatggcgctcaccagctatctcaggaccagcttgaggctgaagaaaaggcaagatcccagagatcacggcagacctcactggtctcctcccgaagagaacctcccccgtacggataccggaaaggctggatacctcggttattagaggattttggagatggaggtgcttttccagagatccatgtggcccagtatccactggatatgggacgaaagaaaaaaatgtcgaatgcgctggccattcaggtggattctgaaggaaaaattaaatatgatgcaattgctcgacaaggacagtcaaaagacaaggtcatttatagcaaatacactgacctggttccaaaggaggttatgaatgcagatgatccagacctgcaaaggcccgatgaagaagctattaaagagataacagaaaagacaagagtagccttagaaaaatctgtatcacagaaggtcgccgcagccatgccagttcgagcagctgacaaattggctcctgctcagtatatccgatacacaccatctcagcaaggagtggcattcaactctggagctaaacagagggttattcggatggtagaaatgcagaaagatccaatggagcctccaaggttcaagattaataagaaaattccccggggaccaccttctcctcctgcgcctgtcatgcattctcctagccgaaagatgactgtaaaggaacaacaagagtggaagattcctccttgtatttctaactggaaaaatgcaaagggttatacaattccattagacaaacgtctggctgctgatggaagaggactacagacagtacacataaatgaaaatttcgccaaattggcagaagccctctacattgctgatcggaaggctcgtgaagctgtggaaatgcgtgcccaagtagagagaaaaatggctcagaaagaaaaggaaaaacatgaagagaaacttagagaaatggcccagaaagccagggagagaagagctgggatcaaaactcatgtggaaaaagaggatggggaggcacgtgagagggatgaaatccggcatgacaggcgaaaagagagacagcatgaccggaatctttccagggcagctcctgataagaggtcgaaacttcagagaaatgaaaatcgggatatcagtgaagttattgctctcggtgttcctaatcctcggacttccaatgaagttcagtatgaccaaaggctcttcaaccaatccaagggtatggacagtggatttgcaggtggagaagatgaaatttataatgtttatgatcaagcctggagaggtggtaaagatatggcccagagtatttataggcccagtaaaaatctggacaaggacatgtatggtgatgacctagaagccagaataaagaccaacagatttgttcccgacaaggagttttctggttcagaccgtagacagagaggccgagaaggaccagtgcagtttgaggaagatccttttggtttggacaagtttttggaagaagccaaacagcatggtggctctaaaagaccctcagatagcagccgccccaaggaacacgagcatgaaggcaagaagaggaggaaggaataggcacaggtctctccaaagtgaatgaactcttacccataaccctaatgatgcaagtcatatgggggaacactttgtaaatggtcaggataaaaaccaaatctgggtgccagatcccagcactactttttattactggagaaatgggggggatagaaaattctactttgaattatttagttttttttaaagagtgggttgtgtttgtgcttctcccacctttcagcatttatagaacatgctgccccacatacaaagtcaagaccacttacttttatgtgacactagtagtttggggtt

SEQ ID NO: 182623 - DNA, 1687 bp, Homo sapiens
  Payload ID: 15982
  Gene Symbol: SNW1
  Gene Name: SNW domain containing 1
  ENST ID: ENST00000554775
  CDS Start-End: 103-1227
tcgctcgcgctggaagaagcggaagaagatggcgctcaccagataacagaaaagacaagagtagccttagaaaaatctgtatcacagaaggtcgccgcagccatgccagttcgagcagctgacaaattggctcctgctcagtatatccgatacacaccatctcagcaaggagtggcattcaactctggagctaaacagagggttattcggatggtagaaatgcagaaagatccaatggagcctccaaggttcaagattaataagaaaattccccggggaccaccttctcctcctgcgcctgtcatgcattctcctagccgaaagatgactgtaaaggaacaacaagagtggaagattcctccttgtatttctaactggaaaaatgcaaagggttatacaattccattagacaaacgtctggctgctgatggaagaggactacagacagtacacataaatgaaaatttcgccaaattggcagaagccctctacattgctgatcggaaggctcgtgaagctgtggaaatgcgtgcccaagtagagagaaaaatggctcagaaagaaaaggaaaaacatgaagagaaacttagagaaatggcccagaaagccagggagagaagagctgggatcaaaactcatgtggaaaaagaggatggggaggcacgtgagagggatgaaatccggcatgacaggcgaaaagagagacagcatgaccggaatctttccagggcagctcctgataagaggtcgaaacttcagagaaatgaaaatcgggatatcagtgaagttattgctctcggtgttcctaatcctcggacttccaatgaagttcagtatgaccaaaggctcttcaaccaatccaagggtatggacagtggatttgcaggtggagaagatgaaatttataatgtttatgatcaagcctggagaggtggtaaagatatggcccagagtatttataggcccagtaaaaatctggacaaggacatgtatggtgatgacctagaagccagaataaagaccaacagatttgttcccgacaaggagttttctggttcagaccgtagacagagaggccgagaaggaccagtgcagtttgaggaagatccttttggtttggacaagtttttggaagaagccaaacagcatggtggctctaaaagaccctcagatagcagccgccccaaggaacacgagcatgaaggcaagaagaggaggaaggaataggcacaggtctctccaaagtgaatgaactcttacccataaccctaatgatgcaagtcatatgggggaacactttgtaaatggtcaggataaaaaccaaatctgggtgccagatcccagcactactttttattactggagaaatgggggggatagaaaattctactttgaattatttagttttttttaaagagtgggttgtgtttgtgcttctcccacctttcagcatttatagaacatgctgccccacatacaaagtcaagaccacttacttttatgtgacactagtagtttggggttaatgttttgtgtaagaacagctgcatatgagtaaagttaccccaaccacagtgaggaggaagatgttcacatactggaactgtcctgccaaataaattttgcccctattgtgctctgttttaatttggagtgggcaaagtaacctcttgcttggtgcaactat

SEQ ID NO: 182624 - DNA, 584 bp, Homo sapiens
  Payload ID: 15982
  Gene Symbol: SNW1
  Gene Name: SNW domain containing 1
  ENST ID: ENST00000554324
  CDS Start-End: 30-584
gtcgctcgcgctggaagaagcggaagaagatggcgctcaccagctttttacctgcacctactcagctatctcaggaccagcttgaggctgaagaaaaggcaagatcccagagatcacggcagacctcactggtctcctcccgaagagaacctcccccgtacggataccggaaaggctggatacctcggttattagaggattttggagatggaggtgcttttccagagatccatgtggcccagtatccactggatatgggacgaaagaaaaaaatgtcgaatgcgctggccattcaggtggattctgaaggaaaaattaaatatgatgcaattgctcgacaaggacagtcaaaagacaaggtcatttatagcaaatacactgacctggttccaaaggaggttatgaatgcagatgatccagacctgcaaaggcccgatgaagaagctattaaagagatgactgtaaaggaacaacaagagtggaagattcctccttgtatttctaactggaaaaatgcaaagggttatacaattccattagacaaacgtctggctgctgatggaagaggactacagacagtacac

SEQ ID NO: 182625 - DNA, 3055 bp, Homo sapiens
  Payload ID: 15983
  Gene Symbol: SCLT1
  Gene Name: sodium channel and clathrin linker 1
  Uniprot ID: Q96NL6
  ENST ID: ENST00000281142
  CDS Start-End: 505-2571
aagaggcgccaccgtctccaaggagtggtccggggcaccggtttcaaagtcgcagggcgggccgagtggacttccgctgctggcctggggcttcccagccgtcttggcgttgtcctctccaacccccgccgctccgcgtagaacgccgctctcaggctgccgtcaagctcccgcggcactctcctaggtggcccgacgagacccagagtgacccgcgggacgcctgtatcgaccgcgtcctcttcccaccagcgtgggattcggttgaacgtggagtccccagcaatcttcagtctctcaccagggccagggactcgtctggggcgcgggggaaagaagcgtggcggggctgtagatgccgcgtgagtaggatgcagattgcaccgctggagcgcttgacaaccaaccgagcgttggcttagttttgttttcccgcacagcaagctctctgtctttcagaggaaggtaaaggtggtgaaagctctaaactaaaattgtatcgaaatggctgcagaaatcgactttctgagagagcaaaatcgaagactaaatgaagattttaggcggtatcaaatggaaagtttttccaaatattcatctgtacagaaagctgtctgccaaggagaaggagacgacacatttgaaaacctagtatttgaccaaagctttttagctcctcttgttactgagtatgataaacacctaggagaactaaatgggcagctgaaatattaccagaaacaggtgggtgagatgaaattacaacttgaaaatgtcatcaaggaaaatgaaaggttgcacagtgaattaaaagatgctgttgaaaaaaaattggaggcctttcccctgggcacagaggtaggaactgacatatatgcagatgatgaaacagtcagaaaccttcaagaacaattgcagctagccaatcaagaaaaaactcaggctgtggaactctggcagactgtttctcaggagttggacagactacacaagctttaccaggaacatatgactgaggcccagattcatgtatttgaaagtcaaaaacaaaaggatcagctatttgattttcaacaactgaccaaacaacttcatgttactaatgagaacatggaagtgactaaccaacagtttctgaaaacagtaactgaacaaagtgtgataatcgaacaactccgaaaaaaacttaggcaagccaaattagagctgagagttgctgtagcaaaagtggaagagttaactaatgtgactgaagatctgcagggacagatgaaaaagaaggagaaggatgtggtgtctgcccatggaagagaggaagcatcagataggcgtttacagcagttacagtctagtataaaacaattagaaataagattatgtgtgacaatccaagaagccaaccaattaagaaccgaaaatacacatctggaaaaacagaccagagagctacaagcaaagtgcaatgaattagaaaatgagagatatgaggctattgtaagagccagaaatagcatgcaactcttagaagaagctaaccttcaaaaaagtcaggctctacttgaggagaagcaaaaagaagaagacatagagaaaatgaaagagacagtttctcggtttgtacaagatgctaccataagaaccaagaaagaagttgcaaacaccaaaaaacaatgtaatatacaaatttctcgattaacagaagaactttcagcccttcaaatggagtgtgctgaaaaacaaggccaaattgaacgagtcattaaggaaaaaaaagcagtggaagaagaactagaaaagatttaccgtgaaggcagaggaaatgagagtgattacagaaaactggaagaaatgcaccaaagattcctggtttcagagcgttcaaaagatgatcttcagctaagacttacgagagcagaaaatagaataaaacaacttgaaactgactcctcagaagaaatatcacgttaccaagaaatgattcagaaacttcaaaatgtattggagtctgagagagagaactgtgggcttgtcagtgaacaaaggctaaaacttcagcaagaaaataaacagttacggaaagagactgagagtttaaggaagattgccctggaggctcaaaaaaaagccaaagtaaagatcagtacaatggaacatgaattttcaataaaggaacgtggatttgaagttcaattgagagagatggaagacagtaatagaaattccattgttgaactgaggcatctcctagcgactcaacagaaggcagccaataggtggaaagaagaaacgaagaaacttactgaaagtgcagaaattagaatcaataatctaaagagtgagctgagtcgacagaaacttcatacccaagagctgctttctcagctggaaatggcaaatgaaaaggtagctgagaatgaaaagctaattctagagcatcaagaaaaagccaacagacttcaaaggcgtctaagtcaggcagaagagagagctgcttcagcttcccagcagctcagtgtgattacagtgcagagaagaaaagcagcctccctgatgaatctggaaaatatttaaaaatattcatagttcactcacagaactttagagttgggaaagcagttggactagaagtgtattgaaatggtaaagcctgcaaagtataatagttaaggcttgtgttatttcgcgtaagcattgttgttctgttttgagggttattggaaaacagagcagtgaccacttcctgtaagtaaagaaaatataatcctatattgagcttcagtggagaataaaccagctgagaagaactcattgccttcatcaatgtgtctgttttttaattcctcctttttcccttgaaaggacataataattttcaaactatgcaaatttctctttcataagaaagagtttttaagaaaattctagaatttaatatttcagtttccaagatttgagaattttacatctaattgttacttctaactcatttttaaagttcctaagtatccattttattatgaactcataaatgtaataaattgtgcactttctaaaa

SEQ ID NO: 182626 - DNA, 966 bp, Homo sapiens
  Payload ID: 15983
  Gene Symbol: SCLT1
  Gene Name: sodium channel and clathrin linker 1
  Uniprot ID: Q96NL6
  ENST ID: ENST00000439369
  CDS Start-End: 308-835
gagacccagagtgacccgcgggacgcctgtatcgaccgcgtcctcttcccaccagcgtgggattcggttgaacgtggagtccccagcaatcttcagtctctcaccagggccagggactcgtctggggcgcgggggaaagaagcgtggcggggctgtagatgccgcgtgagtaggatgcagattgcaccgctggagcgcttgacaaccaaccgagcgttggcttagttttgttttcccgcacagcaagctctctgtctttcagaggaaggtaaaggtggtgaaagctctaaactaaaattgtatcgaaatggctgcagaaatcgactttctgagagagcaaaatcgaagactaaatgaagattttaggcggtatcaaatggaaagtttttccaaatattcatctgtacagaaagctgtctgccaaggagaaggagacgacacatttgaaaacctagtatttgaccaaagctttttagctcctcttgttactgagtatgataaacacctaggagaactaaatgggcagctgaaatattaccagaaacaggtgggtgagatgaaattacaacttgaaaatgtcatcaaggaaaatgaaaggagtgagctgagtcgacagaaacttcatacccaagagctgctttctcagctggaaatggcaaatgaaaaggtagctgagaatgaaaagctaattctagagcatcaagaaaaagccaacagacttcaaaggcgtctaagtcaggcagaagagagagctgcttcagcttcccagcagctcagtgtgattacagtgcagagaagaaaagcagcctccctgatgaatctggaaaatatttaaaaatattcatagttcactcacagaactttagagttgggaaagcagttggactagaagtgtattgaaatggtaaagcctgcaaagtataatagttaaggcttgtgttatttcgcgtaagcattgttgttctg

SEQ ID NO: 182627 - DNA, 1696 bp, Homo sapiens
  Payload ID: 15983
  Gene Symbol: SCLT1
  Gene Name: sodium channel and clathrin linker 1
  Uniprot ID: Q96NL6
  ENST ID: ENST00000511426
  CDS Start-End: 443-682
cgagtggacttccgctgctggcctggggcttcccagccgtcttggcgttgtcctctccaacccccgccgctccgcgtagaacgccgctctcaggctgccgtcaagctcccgcggcactctcctaggtggcccgacgagacccagagtgacccgcgggacgcctgtatcgaccgcgtcctcttcccaccagcgtgggattcggttgaacgtggagtccccagcaatcttcagtctctcaccagggccagggactcgtctggggcgcgggggaaagaagcgtggcggggctgtagatgccgcgtgagtaggatgcagattgcaccgctggagcgcttgacaaccaaccgagcgttggcttagttttgttttcccgcacagcaagctctctgtctttcagaggaaggtaaaggtggtgaaagctctaaactaaaattgtatcgaaatggctgcagaaatcgactttctgagagagcaaaatcgaagactaaatgaagattttaggcggtatcaaatggaaagtttttccaaatattcatctgtacagaaagctgtctgccaaggagaaggagacgacacatttgaaaacctagtatttgaccaaagctttttagctcctcttgttactgagtatgataaacacctaggagaactaaatgggcagctgaaatattaccaggcataacgaggaccttggaaaagttcacctttcaaaccaaatttatagttagaatttgctattctgatctcctagaccaagcttccttgatcttctcggttgaaagagagagaaaaaggctggcagaactgcctgttccacctggcccttgcgaaagtgtactccaggataagcttctctcctttagcttaggaagcacaatcaagactaatacacaatcatgaattagttaccgttttaagtgagattttgcatgcttttacatgtaaattcagggttttgtgtgtgtgtgtgtgtgtgtgtgtgtgtgtgcgcgcgcgcacactctccatttgctcattcacacttactgagagttgactacttattttttgctattttgcttttactcatattttcgccaactttaaatgctttcttttcttttgaaatcctaacatctttttactccttcagagaacgttaatcagaccttcatttaattccctttctggtgtgcattttattctgccttgtattttagttaggattttttttaaccatctttcctactatttttcaatgagcatgtctgtttaccttagcgccttgtatggtacggagagtttagatagttaatgaaggtggtgaatcagaaactgaatgaatgactgctaaaaaagacctccattttcttctttactgttagcattttaccttttgaaatactagaaaaatatacatacttatatgggcttcacctaaactgaggtgaattaactaagatatacattcaagatacaggaaccatctggtatttgttatagtgacatactccagaatatctttcatctgtttttcacaactacaagtcataggaattacatttataaacatttctcaccatgttacataaaatatttctattttatttatattctacttaaaatgaatgttttattgtgttctgtttattagtaaattatccatattaattatccctttgttataaataaagaataagtctttcttatctgtaaa

SEQ ID NO: 182628 - DNA, 1364 bp, Homo sapiens
  Payload ID: 15983
  Gene Symbol: SCLT1
  Gene Name: sodium channel and clathrin linker 1
  ENST ID: ENST00000503215
  CDS Start-End: 379-1233
acgagacccagagtgacccgcgggacgcctgtatcgaccgcgtcctcttcccaccagcgtgggattcggttgaacgtggagtccccagcaatcttcagtctctcaccagggccagggactcgtctggggcgcgggggaaagaagcgtggcggggctgtagatgccgcgtgagtaggatgcagattgcaccgctggagcgcttgacaaccaaccgagcgttggcttagttttgttttcccgcacagcaagctctctgtctttcagaggaaggtaaaggtggtgaaagctctaaactaaaattgtatcgaaatggctgcagaaatcgactttctgagagagcaaaatcgaagactaaatgaagattttaggcggtatcaaatggaaagtttttccaaatattcatctgtacagaaagctgtctgccaaggagaaggagacgacacatttgaaaacctagtatttgaccaaagctttttagctcctcttgttactgagtatgataaacacctaggagaactaaatgggcagctgaaatattaccagaaacaggtgggtgagatgaaattacaacttgaaaatgtcatcaaggaaaatgaaaggttgcacagtgaattaaaagatgctgttgaaaaaaaattggaggcctttcccctgggcacagaggtaggaactgacatatatgcagatgatgaaacagtcagaaaccttcaagaacaattgcagctagccaatcaagaaaaaactcaggctgtggaactctggcagactgtttctcaggagttggacagactacacaagctttaccaggaacatatgactgaggcccagattcatgtatttgaaagtcaaaaacaaaaggatcagctatttgattttcaacaactgaccaaacaacttcatgttactaatgagaacatggaagtgactaaccaacagtttctgaaaacagtaactgaacaaagtgtgataatcgaacaactccgaaaaaaacttaggagtgagctgagtcgacagaaacttcatacccaagagctgctttctcagctggaaatggcaaatgaaaaggtagctgagaatgaaaagctaattctagagcatcaagaaaaagccaacagacttcaaaggcgtctaagtcaggcagaagagagagctgcttcagcttcccagcagctcagtgtgattacagtgcagagaagaaaagcagcctccctgatgaatctggaaaatatttaaaaatattcatagttcactcacagaactttagagttgggaaagcagttggactagaagtgtattgaaatggtaaagcctgcaaagtataatagttaaggcttgtgttatttcgcgtaagcattgttgttctg

SEQ ID NO: 182629 - DNA, 2096 bp, Homo sapiens
  Payload ID: 15983
  Gene Symbol: SCLT1
  Gene Name: sodium channel and clathrin linker 1
  ENST ID: ENST00000506368
  CDS Start-End: 275-670
gaccgcgtcctcttcccaccagcgtgggattcggttgaacgtggagtccccagcaatcttcagtctctcaccagggccagggactcgtctggggcgcgggggaaagaagcgtggcggggctgtagatgccgcgtgagtaggatgcagattgcaccgctggagcgcttgacaaccaaccgagcgttggcttagttttgttttcccgcacagcaagctctctgtctttcagaggaaggtaaaggtggtgaaagctctaaactaaaattgtatcgaaatggctgcagaaatcgactttctgagagagcaaaatcgaagactaaatgaagattttaggcggtatcaaatggaaagtttttccaaatattcatctgtacagaaagctgtctgccaaggagaaggagacgacacatttgaaaacctagtatttgaccaaagctttttagctcctcttgttactgagtatgataaacacctaggagaactaaatgggcagctgaaatattaccagaaacaggtgggtgagatgaaattacaacttgaaaatgtcatcaaggaaaatgaaagagtcttgctctgtctcccaggctggagtgcagtggtgcgatctcggctcactgcaagctccgcctcccggattcgtgccattctcctgcctcagcctccccagtagctgggactacaggtgcccgtcaccacgcccatctaattttttttgtattttcagtagagacggggtttcaccatattagccaggatggtctcgatttcttgacctcatgatctgcccgcctcagcctcccattgttgaccatttttatatgtttatttacctatgtggttttcttttctcataaaatgcttgttcatatattttccccatttctacttatcttgttcttattaaattgccaaagtgcatatgtgatctgtattctgaaaatttgttgatgtgctggtcagtctcaacacagtaaacaataaccattctagaaatttgaaacaagaaaggatttaattcacttacatttaagtgctactaaatcattagttttacagttacacctcagagactataatcctggggttaggaatttatggtgctaccaccatccctggtgctaccaccatccctattactaccatggcagcattatttccataaaactggagacttgatattggaaaaagggtcataggatattgactacaagagacatttttgtctatccagttttacttaccagccaccatatcaacagaaaaaatggtctcagctcacttctaccttttatatctcccttaaatgcctctcactggtaaaattttaatcttatccacaacttcagctgcaagacatctgggcaatgtagttttggactttccgcccctgggacagaggccagaatgtggaagggaacagaaataaataatgagtgccagtggttcatacaacacattagataataggtgtttcaaatgtatattcccagactgtggtgtgtttgatgaacagaatttttttttcttttttttttttaacttaaagtaaatctctcactcttctcctgtggttattgttctttgtatctcctgtaagaagtcctttctcagcctaatgtcatagagatcttctcttatatttgctactaaaaaatgtttaaagcttttccataccaagtttcttaactttaacccataaaattcatataactggactgaaatctgatacatcattttttgttgacttttaactagactaaaaatccaaaattttttgagttctaaatttattcaaaacatgggctcttttaaagtttgacattcttttatttgtatttttctatgttatgtagtaattttattttattttgattatatttatttttattttagtgtagctatatttaaattaatacatgctgttccttaaaattacatagcacacccacggaattgtcttgcctttggctatttcatgattttctctcttccttgtattttccattagttttctttccttctaatttccaaaaacttcatatatttaagctgtcagtgtttactgaagtgcaaaataaagtacatcttttaattgg

SEQ ID NO: 182630 - DNA, 1604 bp, Homo sapiens
  Payload ID: 15983
  Gene Symbol: SCLT1
  Gene Name: sodium channel and clathrin linker 1
  ENST ID: ENST00000503401
  CDS Start-End: 457-627
caaagtcgcagggcgggccgagtggacttccgctgctggcctggggcttcccagccgtcttggcgttgtcctctccaacccccgccgctccgcgtagaacgccgctctcaggctgccgtcaagctcccgcggcactctcctaggtggcccgacgagacccagagtgacccgcgggacgcctgtatcgaccgcgtcctcttcccaccagcgtgggattcggttgaacgtggagtccccagcaatcttcagtctctcaccagggccagggactcgtctggggcgcgggggaaagaagcgtggcggggctgtagatgccgcgtgagtaggatgcagattgcaccgctggagcgcttgacaaccaaccgagcgttggcttagttttgttttcccgcacagcaagctctctgtctttcagaggaagatcgaagactaaatgaagattttaggcggtatcaaatggaaagtttttccaaatattcatctgtacagaaagctgtctgccaaggagaaggagacgacacatttgaaaacctagtatttgaccaaagctttttagctcctcttgttactgagtatgataaacacctaggagaactaaatgggcagctgaaatattaccaggcataacgaggaccttggaaaagttcacctttcaaaccaaatttatagttagaatttgctattctgatctcctagaccaagcttccttgatcttctcggttgaaagagagagaaaaaggctggcagaactgcctgttccacctggcccttgcgaaagtgtactccaggataagcttctctcctttagcttaggaagcacaatcaagactaatacacaatcatgaattagttaccgttttaagtgagattttgcatgcttttacatgtaaattcagggttttgtgtgtgtgtgtgtgtgtgtgtgtgtgtgtgcgcgcgcgcacactctccatttgctcattcacacttactgagagttgactacttattttttgctattttgcttttactcatattttcgccaactttaaatgctttcttttcttttgaaatcctaacatctttttactccttcagagaacgttaatcagaccttcatttaattccctttctggtgtgcattttattctgccttgtattttagttaggattttttttaaccatctttcctactatttttcaatgagcatgtctgtttaccttagcgccttgtatggtacggagagtttagatagttaatgaaggtggtgaatcagaaactgaatgaatgactgctaaaaaagacctccattttcttctttactgttagcattttaccttttgaaatactagaaaaatatacatacttatatgggcttcacctaaactgaggtgaattaactaagatatacattcaagatacaggaaccatctggtatttgttatagtgacatactccagaatatctttcatctgtttttcacaactacaagtcataggaattacatttataaacatttctcaccatgttacataaaatatttctattttatttatattctacttaaaatgaatgttttattgtgttctgtttattagtaaattatccatattaattatccctt

SEQ ID NO: 182631 - DNA, 869 bp, Homo sapiens
  Payload ID: 15984
  Gene Symbol: SCNM1
  Gene Name: sodium channel modifier 1
  Uniprot ID: Q9BWG6
  ENST ID: ENST00000368902
  CDS Start-End: 229-816
ctcttgctacggtggcctggaggagtggcgaaaccggaacagagaatttatcacttctgggactcacagtcgtgatgtctttcaagagggaaggagacgattggagtcaactcaatgtgctcaaagtaagcgtgagcggagaggatctggagccgcttcagtcgctccctgaagaaaagaagagtcggggacctcctagccagttacattccagaggatgaggcgctgatgcttcgggatggacgctttgcttgtgccatctgcccccatcgaccggtactggacaccctggccatgctgactgcccaccgtgcaggcaagaaacatctgtccagcttgcagcttttctatggcaagaagcagccgggaaaggaaagaaagcagaatccaaaacatcagaatgaattgagaagggaagaaaccaaagctgaggctcctctgctaactcagacacgacttatcacccagagtgctctgcacagagctccccactataacagttgctgccgccggaagtacagaccagaagcccctggtccctctgtctccctttcccctatgccaccctcagaggtcaaactccaaagtgggaagatcagtagggaacctgaacctgcggctggcccacaggccgaggagtcagcaactgtctcagcccctgcacccatgagccccacaagaagacgagccctggaccattatctcacccttcgaagctctggatggatcccagatggacgaggtcgatgggtaaaagatgaaaatgttgagtttgactctgatgaggaggaaccacctgatctccccttggactgatacccttttcccattcattcacaaataaattacaatgggtgctgagaacttaa

SEQ ID NO: 182632 - DNA, 2016 bp, Homo sapiens
  Payload ID: 15984
  Gene Symbol: SCNM1
  Gene Name: sodium channel modifier 1
  Uniprot ID: Q9BWG6
  ENST ID: ENST00000368905
  CDS Start-End: 112-804
acaggaagagaaggaaaaaagagaaggcgctgtcccgctcttgctacggtggcctggaggagtggcgaaaccggaacagagaatttatcacttctgggactcacagtcgtgatgtctttcaagagggaaggagacgattggagtcaactcaatgtgctcaaaaaaagaagagtcggggacctcctagccagttacattccagaggatgaggcgctgatgcttcgggatggacgctttgcttgtgccatctgcccccatcgaccggtactggacaccctggccatgctgactgcccaccgtgcaggcaagaaacatctgtccagcttgcagcttttctatggcaagaagcagccgggaaaggaaagaaagcagaatccaaaacatcagaatgaattgagaagggaagaaaccaaagctgaggctcctctgctaactcagacacgacttatcacccagagtgctctgcacagagctccccactataacagttgctgccgccggaagtacagaccagaagcccctggtccctctgtctccctttcccctatgccaccctcagaggtcaaactccaaagtgggaagatcagtagggaacctgaacctgcggctggcccacaggccgaggagtcagcaactgtctcagcccctgcacccatgagccccacaagaagacgagccctggaccattatctcacccttcgaagctctggatggatcccagatggacgaggtcgatgggtaaaagatgaaaatgttgagtttgactctgatgaggaggaaccacctgatctccccttggactgatacccttttcccattcattcacaaataaattacaatgggtgctgagaacttaactttccttaagtctggttccttgttggatctcaggatttcagatctgttcattctcattccaactactccttgcctgcaaggtacacagctctccacactccttttttttttttttttttttttgaggcagagtctcgctctatcgcccaggctggagtgcagtggcacgatctcggctcactgcaagctctgcctcccaggttcacgcctttctcctgcctcagcctcctgagtagctgggactacaggcgcccgccaccatgcccagctaattttttgtatttttagtagagacggggtttcactgtgttagccaggatggtctcgatctcctgacctcgtgatccgcccacctcggcctcccaaagtgctgggattacaggcatgagccaccgcacccagccacggctatccatacttctaacccctcccccacctcctaccaaagccatgccaagcgtcagctgcatcagcctggtgccctattaataagactgtcaaaaagaggtctttgcccttcatgttgtctgcctgcttctccactaccactcaaagtcctttcccccttcaaatcacataaggactgcaggtaggcactagggggacctggccacatctggaaacagggctgtggctaagttccctgtgaaagtagaagagtcaaaaggcattggcagggttatggggaacaccaagggagggaacacccccacctcctcctagtaacctgaacctccctgcctgctgatccccagagtataaataatcccctggtgaactggcagtaacccttgggggttagcgccaagattctcaccccaaagcccaaggaaggaggcaggcaaaatggatagaagggcttttatttacaggaaaggaggacagatgaggatttaagtgtccagtgctcccagcgctagttggtaaagggaaatgcagtgttatctcttcttttgctggcgacctgtaaaggagcaatattaaacataagtgtttgttccagctcctgctttctgcaaaggcactcttctcctttccagtcccttagccaaactcataaattggtagtgtcttaggccaccttacaggcccatcccacattaacaaaacaaaacaagaaaccacaccacaaataaaattacgatacctctaaacaag

SEQ ID NO: 182633 - DNA, 749 bp, Homo sapiens
  Payload ID: 15984
  Gene Symbol: SCNM1
  Gene Name: sodium channel modifier 1
  Uniprot ID: Q9BWG6
  ENST ID: ENST00000602841
  CDS Start-End: 114-701
tctccattctgtaagctttccgggaacatccaaggcaagactggcacccagcacagcagaaaagaagagtcggggacctcctagccagttacattccagaggatgaggcgctgatgcttcgggatggacgctttgcttgtgccatctgcccccatcgaccggtactggacaccctggccatgctgactgcccaccgtgcaggcaagaaacatctgtccagcttgcagcttttctatggcaagaagcagccgggaaaggaaagaaagcagaatccaaaacatcagaatgaattgagaagggaagaaaccaaagctgaggctcctctgctaactcagacacgacttatcacccagagtgctctgcacagagctccccactataacagttgctgccgccggaagtacagaccagaagcccctggtccctctgtctccctttcccctatgccaccctcagaggtcaaactccaaagtgggaagatcagtagggaacctgaacctgcggctggcccacaggccgaggagtcagcaactgtctcagcccctgcacccatgagccccacaagaagacgagccctggaccattatctcacccttcgaagctctggatggatcccagatggacgaggtcgatgggtaaaagatgaaaatgttgagtttgactctgatgaggaggaaccacctgatctccccttggactgatacccttttcccattcattcacaaataaattacaatgggtgctgagaa

SEQ ID NO: 182634 - DNA, 3135 bp, Homo sapiens
  Payload ID: 15985
  Gene Symbol: SCNN1A
  Gene Name: sodium channel, non voltage gated 1 alpha subunit
  Uniprot ID: P37088
  ENST ID: ENST00000228916
  CDS Start-End: 100-2109
ccggccagcgggcgggctccccagccaggccgctgcacctgtcaggggaacaagctggaggagcaggaccctagacctctgcagcccataccaggtctcatggaggggaacaagctggaggagcaggactctagccctccacagtccactccagggctcatgaaggggaacaagcgtgaggagcaggggctgggccccgaacctgcggcgccccagcagcccacggcggaggaggaggccctgatcgagttccaccgctcctaccgagagctcttcgagttcttctgcaacaacaccaccatccacggcgccatccgcctggtgtgctcccagcacaaccgcatgaagacggccttctgggcagtgctgtggctctgcacctttggcatgatgtactggcaattcggcctgcttttcggagagtacttcagctaccccgtcagcctcaacatcaacctcaactcggacaagctcgtcttccccgcagtgaccatctgcaccctcaatccctacaggtacccggaaattaaagaggagctggaggagctggaccgcatcacagagcagacgctctttgacctgtacaaatacagctccttcaccactctcgtggccggctcccgcagccgtcgcgacctgcgggggactctgccgcaccccttgcagcgcctgagggtcccgcccccgcctcacggggcccgtcgagcccgtagcgtggcctccagcttgcgggacaacaacccccaggtggactggaaggactggaagatcggcttccagctgtgcaaccagaacaaatcggactgcttctaccagacatactcatcaggggtggatgcggtgagggagtggtaccgcttccactacatcaacatcctgtcgaggctgccagagactctgccatccctggaggaggacacgctgggcaacttcatcttcgcctgccgcttcaaccaggtctcctgcaaccaggcgaattactctcacttccaccacccgatgtatggaaactgctatactttcaatgacaagaacaactccaacctctggatgtcttccatgcctggaatcaacaacggtctgtccctgatgctgcgcgcagagcagaatgacttcattcccctgctgtccacagtgactggggcccgggtaatggtgcacgggcaggatgaacctgcctttatggatgatggtggctttaacttgcggcctggcgtggagacctccatcagcatgaggaaggaaaccctggacagacttgggggcgattatggcgactgcaccaagaatggcagtgatgttcctgttgagaacctttacccttcaaagtacacacagcaggtgtgtattcactcctgcttccaggagagcatgatcaaggagtgtggctgtgcctacatcttctatccgcggccccagaacgtggagtactgtgactacagaaagcacagttcctgggggtactgctactataagctccaggttgacttctcctcagaccacctgggctgtttcaccaagtgccggaagccatgcagcgtgaccagctaccagctctctgctggttactcacgatggccctcggtgacatcccaggaatgggtcttccagatgctatcgcgacagaacaattacaccgtcaacaacaagagaaatggagtggccaaagtcaacatcttcttcaaggagctgaactacaaaaccaattctgagtctccctctgtcacgatggtcaccctcctgtccaacctgggcagccagtggagcctgtggttcggctcctcggtgttgtctgtggtggagatggctgagctcgtctttgacctgctggtcatcatgttcctcatgctgctccgaaggttccgaagccgatactggtctccaggccgagggggcaggggtgctcaggaggtagcctccaccctggcatcctcccctccttcccacttctgcccccaccccatgtctctgtccttgtcccagccaggccctgctccctctccagccttgacagcccctccccctgcctatgccaccctgggcccccgcccatctccagggggctctgcaggggccagttcctccacctgtcctctgggggggccctgagagggaaggagaggtttctcacaccaaggcagatgctcctctggtgggagggtgctggccctggcaagattgaaggatgtgcagggcttcctctcagagccgcccaaactgccgttgatgtgtggaggggaagcaagatgggtaagggctcaggaagttgctccaagaacagtagctgatgaagctgcccagaagtgccttggctccagccctgtaccccttggtactgcctctgaacactctggtttccccacccaactgcggctaagtctctttttcccttggatcagccaagcgaaacttggagctttgacaaggaactttcctaagaaaccgctgataaccaggacaaaacacaaccaagggtacacgcaggcatgcacgggtttcctgcccagcgacggcttaagccagcccccgactggcctggccacactgctctccagtagcacagatgtctgctcctcctcttgaacttgggtgggaaaccccacccaaaagccccctttgttacttaggcaattccccttccctgactcccgagggctagggctagagcagacccgggtaagtaaaggcagacccagggctcctctagcctcatacccgtgccctcacagagccatgccccggcacctctgccctgtgtctttcatacctctacatgtctgcttgagatatttcctcagcctgaaagtttccccaaccatctgccagagaactcctatgcatcccttagaaccctgctcagacaccattacttttgtgaacgcttctgccacatcttgtcttccccaaaattgatcactccgccttctcctgggctcccgtagcacactataacatctgctggagtgttgctgttgcaccatactttcttgtacatttgtgtctcccttcccaactagactgtaagtgccttgcggtcagggactgaatcttgcccgtttatgtatgctccatgtctagcccatcatcctgcttggagcaagtaggcaggagctcaataaatgtttgttgcatgaa

SEQ ID NO: 182635 - DNA, 2203 bp, Homo sapiens
  Payload ID: 15985
  Gene Symbol: SCNN1A
  Gene Name: sodium channel, non voltage gated 1 alpha subunit
  ENST ID: ENST00000338748
  CDS Start-End: 21-758
tgcagcccataccaggtctcatggaggggaacaagctggaggagcaggactctagccctccacagtccactccagggctcatgaaggggaacaagcgtgaggagcaggggctgggccccgaacctgcggcgccccagcagcccacggcggaggaggaggccctgatcgagttccaccgctcctaccgagagctcttcgagttcttctgcaacaacaccaccatccacggcgccatccgcctggtgtgctcccagcacaaccgcatgaagacggccttctgggcagtgctgtggctctgcacctttggcatgatgtactggcaattcggcctgcttttcggagagtacttcagctaccccgtcagcctcaacatcaacctcaactcggacaagctcgtcttccccgcagtgaccatctgcaccctcaatccctacaggtacccggaaattaaagaggagctggaggagctggaccgcatcacagagcagacgctctttgacctgtacaaatacagctccttcaccactctcgtggccggctcccgcagccgtcgcgacctgcgggggactctgccgcaccccttgcagcgcctgagggtcccgcccccgcctcacggggcccgtcgagcccgtagcgtggcctccagcttgcgggacaacaacccccaggtggactggaaggactggaagatcggcttccagctggaattactctcacttccaccacccgatgtatggaaactgctatactttcaatgacaagaacaactccaacctctggatgtcttccatgcctggaatcaacaacggtctgtccctgatgctgcgcgcagagcagaatgacttcattcccctgctgtccacagtgactggggcccgggtaatggtgcacgggcaggatgaacctgcctttatggatgatggtggctttaacttgcggcctggcgtggagacctccatcagcatgaggaaggaaaccctggacagacttgggggcgattatggcgactgcaccaagaatggcagtgatgttcctgttgagaacctttacccttcaaagtacacacagcaggtgtgtattcactcctgcttccaggagagcatgatcaaggagtgtggctgtgcctacatcttctatccgcggccccagaacgtggagtactgtgactacagaaagcacagttcctgggggtactgctactataagctccaggttgacttctcctcagaccacctgggctgtttcaccaagtgccggaagccatgcagcgtgaccagctaccagctctctgctggttactcacgatggccctcggtgacatcccaggaatgggtcttccagatgctatcgcgacagaacaattacaccgtcaacaacaagagaaatggagtggccaaagtcaacatcttcttcaaggagctgaactacaaaaccaattctgagtctccctctgtcacgatggtcaccctcctgtccaacctgggcagccagtggagcctgtggttcggctcctcggtgttgtctgtggtggagatggctgagctcgtctttgacctgctggtcatcatgttcctcatgctgctccgaaggttccgaagccgatactggtctccaggccgagggggcaggggtgctcaggaggtagcctccaccctggcatcctcccctccttcccacttctgcccccaccccatgtctctgtccttgtcccagccaggccctgctccctctccagccttgacagcccctccccctgcctatgccaccctgggcccccgcccatctccagggggctctgcaggggccagttcctccacctgtcctctgggggggccctgagagggaaggagaggtttctcacaccaaggcagatgctcctctggtgggagggtgctggccctggcaagattgaaggatgtgcagggcttcctctcagagccgcccaaactgccgttgatgtgtggaggggaagcaagatgggtaagggctcaggaagttgctccaagaacagtagctgatgaagctgcccagaagtgccttggctccagccctgtaccccttggtactgcctctgaacactctggtttccccacccaactgcggctaagtctctttttcccttggatcagccaagcgaaacttggagctttgacaaggaactttcctaagaaaccgctgataaccaggacaaaacacaaccaag

SEQ ID NO: 182636 - DNA, 3481 bp, Homo sapiens
  Payload ID: 15985
  Gene Symbol: SCNN1A
  Gene Name: sodium channel, non voltage gated 1 alpha subunit
  Uniprot ID: P37088
  ENST ID: ENST00000360168
  CDS Start-End: 265-2451
aaacagaaggcagatagagagggagtgagaggcaggagctgagacacagatcctggaggaagaagaccaaaggaagggggcagagacagaaagggaggtgctaggacaaaactcgaaaggtggccctatcagggaagcagaggagaggccgttctagggaagcccagctccggcacttttggccccaactcccgcaggtctgctggctccaggaaaggtggaggagggagggaggagtgggagaatgtgggcgcagggtgggacatgggcatggccaggggcagcctcactcgggttccaggggtgatgggagagggcactcagggcccagagctcagccttgaccctgacccttgctctccccaatccactccggggctcatgaaggggaacaagctggaggagcaggaccctagacctctgcagcccataccaggtctcatggaggggaacaagctggaggagcaggactctagccctccacagtccactccagggctcatgaaggggaacaagcgtgaggagcaggggctgggccccgaacctgcggcgccccagcagcccacggcggaggaggaggccctgatcgagttccaccgctcctaccgagagctcttcgagttcttctgcaacaacaccaccatccacggcgccatccgcctggtgtgctcccagcacaaccgcatgaagacggccttctgggcagtgctgtggctctgcacctttggcatgatgtactggcaattcggcctgcttttcggagagtacttcagctaccccgtcagcctcaacatcaacctcaactcggacaagctcgtcttccccgcagtgaccatctgcaccctcaatccctacaggtacccggaaattaaagaggagctggaggagctggaccgcatcacagagcagacgctctttgacctgtacaaatacagctccttcaccactctcgtggccggctcccgcagccgtcgcgacctgcgggggactctgccgcaccccttgcagcgcctgagggtcccgcccccgcctcacggggcccgtcgagcccgtagcgtggcctccagcttgcgggacaacaacccccaggtggactggaaggactggaagatcggcttccagctgtgcaaccagaacaaatcggactgcttctaccagacatactcatcaggggtggatgcggtgagggagtggtaccgcttccactacatcaacatcctgtcgaggctgccagagactctgccatccctggaggaggacacgctgggcaacttcatcttcgcctgccgcttcaaccaggtctcctgcaaccaggcgaattactctcacttccaccacccgatgtatggaaactgctatactttcaatgacaagaacaactccaacctctggatgtcttccatgcctggaatcaacaacggtctgtccctgatgctgcgcgcagagcagaatgacttcattcccctgctgtccacagtgactggggcccgggtaatggtgcacgggcaggatgaacctgcctttatggatgatggtggctttaacttgcggcctggcgtggagacctccatcagcatgaggaaggaaaccctggacagacttgggggcgattatggcgactgcaccaagaatggcagtgatgttcctgttgagaacctttacccttcaaagtacacacagcaggtgtgtattcactcctgcttccaggagagcatgatcaaggagtgtggctgtgcctacatcttctatccgcggccccagaacgtggagtactgtgactacagaaagcacagttcctgggggtactgctactataagctccaggttgacttctcctcagaccacctgggctgtttcaccaagtgccggaagccatgcagcgtgaccagctaccagctctctgctggttactcacgatggccctcggtgacatcccaggaatgggtcttccagatgctatcgcgacagaacaattacaccgtcaacaacaagagaaatggagtggccaaagtcaacatcttcttcaaggagctgaactacaaaaccaattctgagtctccctctgtcacgatggtcaccctcctgtccaacctgggcagccagtggagcctgtggttcggctcctcggtgttgtctgtggtggagatggctgagctcgtctttgacctgctggtcatcatgttcctcatgctgctccgaaggttccgaagccgatactggtctccaggccgagggggcaggggtgctcaggaggtagcctccaccctggcatcctcccctccttcccacttctgcccccaccccatgtctctgtccttgtcccagccaggccctgctccctctccagccttgacagcccctccccctgcctatgccaccctgggcccccgcccatctccagggggctctgcaggggccagttcctccacctgtcctctgggggggccctgagagggaaggagaggtttctcacaccaaggcagatgctcctctggtgggagggtgctggccctggcaagattgaaggatgtgcagggcttcctctcagagccgcccaaactgccgttgatgtgtggaggggaagcaagatgggtaagggctcaggaagttgctccaagaacagtagctgatgaagctgcccagaagtgccttggctccagccctgtaccccttggtactgcctctgaacactctggtttccccacccaactgcggctaagtctctttttcccttggatcagccaagcgaaacttggagctttgacaaggaactttcctaagaaaccgctgataaccaggacaaaacacaaccaagggtacacgcaggcatgcacgggtttcctgcccagcgacggcttaagccagcccccgactggcctggccacactgctctccagtagcacagatgtctgctcctcctcttgaacttgggtgggaaaccccacccaaaagccccctttgttacttaggcaattccccttccctgactcccgagggctagggctagagcagacccgggtaagtaaaggcagacccagggctcctctagcctcatacccgtgccctcacagagccatgccccggcacctctgccctgtgtctttcatacctctacatgtctgcttgagatatttcctcagcctgaaagtttccccaaccatctgccagagaactcctatgcatcccttagaaccctgctcagacaccattacttttgtgaacgcttctgccacatcttgtcttccccaaaattgatcactccgccttctcctgggctcccgtagcacactataacatctgctggagtgttgctgttgcaccatactttcttgtacatttgtgtctcccttcccaactagactgtaagtgccttgcggtcagggactgaatcttgcccgtttatgtatgctccatgtctagcccatcatcctgcttggagcaagtaggcaggagctcaataaatgtttgttgcatgaaggaa

SEQ ID NO: 182637 - DNA, 2336 bp, Homo sapiens
  Payload ID: 15985
  Gene Symbol: SCNN1A
  Gene Name: sodium channel, non voltage gated 1 alpha subunit
  ENST ID: ENST00000396966
  CDS Start-End: 21-1556
tgcagcccataccaggtctcatggaggggaacaagctggaggagcaggactctagccctccacagtccactccagggctcatgaaggggaacaagcgtgaggagcaggggctgggccccgaacctgcggcgccccagcagcccacggcggaggaggaggccctgatcgagttccaccgctcctaccgagagctcttcgagttcttctgcaacaacaccaccatccacggcgccatccgcctggtgtgctcccagcacaaccgcatgaagacggccttctgggcagtgctgtggctctgcacctttggcatgatgtactggcaattcggcctgcttttcggagagtacttcagctaccccgtcagcctcaacatcaacctcaactcggacaagctcgtcttccccgcagtgaccatctgcaccctcaatccctacaggtacccggaaattaaagaggagctggaggagctggaccgcatcacagagcagacgctctttgacctgtacaaatacagctccttcaccactctcgtggccggctcccgcagccgtcgcgacctgcgggggactctgccgcaccccttgcagcgcctgagggtcccgcccccgcctcacggggcccgtcgagcccgtagcgtggcctccagcttgcgggacaacaacccccaggtggactggaaggactggaagatcggcttccagctgtgcaaccagaacaaatcggactgcttctaccagacatactcatcaggggtggatgcggtgagggagtggtaccgcttccactacatcaacatcctgtcgaggctgccagagactctgccatccctggaggaggacacgctgggcaacttcatcttcgcctgccgcttcaaccaggtctcctgcaaccaggcgaattactctcacttccaccacccgatgtatggaaactgctatactttcaatgacaagaacaactccaacctctggatgtcttccatgcctggaatcaacaacggtctgtccctgatgctgcgcgcagagcagaatgacttcattcccctgctgtccacagtgactggggcccgggtaatggtgcacgggcaggatgaacctgcctttatggatgatggtggctttaacttgcggcctggcgtggagacctccatcagcatgaggaaggaaaccctggacagacttgggggcgattatggcgactgcaccaagaatggcagtgatgttcctgttgagaacctttacccttcaaagtacacacagcaggtgtgtattcactcctgcttccaggagagcatgatcaaggagtgtggctgtgcctacatcttctatccgcggccccagaacgtggagtactgtgactacagaaagcacagttcctgggggtactgctactataagctccaggttgacttctcctcagaccacctgggctgtttcaccaagtgccggaagccatgcaggaatgggtcttccagatgctatcgcgacagaacaattacaccgtcaacaacaagagaaatggagtggccaaagtcaacatcttcttcaaggagctgaactacaaaaccaattctgagtctccctctgtcacgatggtcaccctcctgtccaacctgggcagccagtggagcctgtggttcggctcctcggtgttgtctgtggtggagatggctgagctcgtctttgacctgctggtcatcatgttcctcatgctgctccgaaggttccgaagccgatactggtctccaggccgagggggcaggggtgctcaggaggtagcctccaccctggcatcctcccctccttcccacttctgcccccaccccatgtctctgtccttgtcccagccaggccctgctccctctccagccttgacagcccctccccctgcctatgccaccctgggcccccgcccatctccagggggctctgcaggggccagttcctccacctgtcctctgggggggccctgagagggaaggagaggtttctcacaccaaggcagatgctcctctggtgggagggtgctggccctggcaagattgaaggatgtgcagggcttcctctcagagccgcccaaactgccgttgatgtgtggaggggaagcaagatgggtaagggctcaggaagttgctccaagaacagtagctgatgaagctgcccagaagtgccttggctccagccctgtaccccttggtactgcctctgaacactctggtttccccacccaactgcggctaagtctctttttcccttggatcagccaagcgaaacttggagctttgacaaggaactttcctaagaaaccgctgataaccaggacaaaacacaaccaag

SEQ ID NO: 182638 - DNA, 2361 bp, Homo sapiens
  Payload ID: 15985
  Gene Symbol: SCNN1A
  Gene Name: sodium channel, non voltage gated 1 alpha subunit
  Uniprot ID: P37088
  ENST ID: ENST00000543768
  CDS Start-End: 94-2172
aacctcagaaaactgatttatccttgggaagggtcagtttcttcattaggacaatgaagaaaaatccagctgtcccttccaaggggaggtatcatgagcagtatcaaggggaacaagctggaggagcaggaccctagacctctgcagcccataccaggtctcatggaggggaacaagctggaggagcaggactctagccctccacagtccactccagggctcatgaaggggaacaagcgtgaggagcaggggctgggccccgaacctgcggcgccccagcagcccacggcggaggaggaggccctgatcgagttccaccgctcctaccgagagctcttcgagttcttctgcaacaacaccaccatccacggcgccatccgcctggtgtgctcccagcacaaccgcatgaagacggccttctgggcagtgctgtggctctgcacctttggcatgatgtactggcaattcggcctgcttttcggagagtacttcagctaccccgtcagcctcaacatcaacctcaactcggacaagctcgtcttccccgcagtgaccatctgcaccctcaatccctacaggtacccggaaattaaagaggagctggaggagctggaccgcatcacagagcagacgctctttgacctgtacaaatacagctccttcaccactctcgtggccggctcccgcagccgtcgcgacctgcgggggactctgccgcaccccttgcagcgcctgagggtcccgcccccgcctcacggggcccgtcgagcccgtagcgtggcctccagcttgcgggacaacaacccccaggtggactggaaggactggaagatcggcttccagctgtgcaaccagaacaaatcggactgcttctaccagacatactcatcaggggtggatgcggtgagggagtggtaccgcttccactacatcaacatcctgtcgaggctgccagagactctgccatccctggaggaggacacgctgggcaacttcatcttcgcctgccgcttcaaccaggtctcctgcaaccaggcgaattactctcacttccaccacccgatgtatggaaactgctatactttcaatgacaagaacaactccaacctctggatgtcttccatgcctggaatcaacaacggtctgtccctgatgctgcgcgcagagcagaatgacttcattcccctgctgtccacagtgactggggcccgggtaatggtgcacgggcaggatgaacctgcctttatggatgatggtggctttaacttgcggcctggcgtggagacctccatcagcatgaggaaggaaaccctggacagacttgggggcgattatggcgactgcaccaagaatggcagtgatgttcctgttgagaacctttacccttcaaagtacacacagcaggtgtgtattcactcctgcttccaggagagcatgatcaaggagtgtggctgtgcctacatcttctatccgcggccccagaacgtggagtactgtgactacagaaagcacagttcctgggggtactgctactataagctccaggttgacttctcctcagaccacctgggctgtttcaccaagtgccggaagccatgcagcgtgaccagctaccagctctctgctggttactcacgatggccctcggtgacatcccaggaatgggtcttccagatgctatcgcgacagaacaattacaccgtcaacaacaagagaaatggagtggccaaagtcaacatcttcttcaaggagctgaactacaaaaccaattctgagtctccctctgtcacgatggtcaccctcctgtccaacctgggcagccagtggagcctgtggttcggctcctcggtgttgtctgtggtggagatggctgagctcgtctttgacctgctggtcatcatgttcctcatgctgctccgaaggttccgaagccgatactggtctccaggccgagggggcaggggtgctcaggaggtagcctccaccctggcatcctcccctccttcccacttctgcccccaccccatgtctctgtccttgtcccagccaggccctgctccctctccagccttgacagcccctccccctgcctatgccaccctgggcccccgcccatctccagggggctctgcaggggccagttcctccacctgtcctctgggggggccctgagagggaaggagaggtttctcacaccaaggcagatgctcctctggtgggagggtgctggccctggcaagattgaaggatgtgcagggcttcctctcagagccgcccaaactgccgttgatgtgtggaggggaagcaagatgggtaagggctcaggaagttgctccaagaacagtagctgatgaagctgcc

SEQ ID NO: 182639 - DNA, 3040 bp, Homo sapiens
  Payload ID: 15985
  Gene Symbol: SCNN1A
  Gene Name: sodium channel, non voltage gated 1 alpha subunit
  ENST ID: ENST00000540037
  CDS Start-End: 905-2014
gcggcactcaagccgaaaggccaccgacactcgcctgcggggatcagggcgggatgacctgggtaccgcggtcacgccaaggccgaggccctcacccttcccctctttgggaaagggcagacaagttccgggttcccttctaggtccgggcgagggggagagcgccccacagacgacaggcgcctcctgcctctctccttcaataaacagtccacagtgtcccggctgggctcgccgtggcctccgccttcccggcggacacacctgtttacccttcaccgccggacggccaggaggcgccacgacgaccccagccccgcccaggcttctccgggatggaccggcctcccggggcacagatgaggaccctgaccccggaggggccagacactcgctccagggcccctggcctgaccctcttcccctcgccccttcaggtacccggaaattaaagaggagctggaggagctggaccgcatcacagagcagacgctctttgacctgtacaaatacagctccttcaccactctcgtggccggctcccgcagccgtcgcgacctgcgggggactctgccgcaccccttgcagcgcctgagggtcccgcccccgcctcacggggcccgtcgagcccgtagcgtggcctccagcttgcgggacaacaacccccaggtggactggaaggactggaagatcggcttccagctgtgcaaccagaacaaatcggactgcttctaccagacatactcatcaggggtggatgcggtgagggagtggtaccgcttccactacatcaacatcctgtcgaggctgccagagactctgccatccctggaggaggacacgctgggcaacttcatcttcgcctgccgcttcaaccaggaattactctcacttccaccacccgatgtatggaaactgctatactttcaatgacaagaacaactccaacctctggatgtcttccatgcctggaatcaacaacggtctgtccctgatgctgcgcgcagagcagaatgacttcattcccctgctgtccacagtgactggggcccgggtaatggtgcacgggcaggatgaacctgcctttatggatgatggtggctttaacttgcggcctggcgtggagacctccatcagcatgaggaaggaaaccctggacagacttgggggcgattatggcgactgcaccaagaatggcagtgatgttcctgttgagaacctttacccttcaaagtacacacagcaggtgtgtattcactcctgcttccaggagagcatgatcaaggagtgtggctgtgcctacatcttctatccgcggccccagaacgtggagtactgtgactacagaaagcacagttcctgggggtactgctactataagctccaggttgacttctcctcagaccacctgggctgtttcaccaagtgccggaagccatgcagcgtgaccagctaccagctctctgctggttactcacgatggccctcggtgacatcccaggaatgggtcttccagatgctatcgcgacagaacaattacaccgtcaacaacaagagaaatggagtggccaaagtcaacatcttcttcaaggagctgaactacaaaaccaattctgagtctccctctgtcacgatggtcaccctcctgtccaacctgggcagccagtggagcctgtggttcggctcctcggtgttgtctgtggtggagatggctgagctcgtctttgacctgctggtcatcatgttcctcatgctgctccgaaggttccgaagccgatactggtctccaggccgagggggcaggggtgctcaggaggtagcctccaccctggcatcctcccctccttcccacttctgcccccaccccatgtctctgtccttgtcccagccaggccctgctccctctccagccttgacagcccctccccctgcctatgccaccctgggcccccgcccatctccagggggctctgcaggggccagttcctccacctgtcctctgggggggccctgagagggaaggagaggtttctcacaccaaggcagatgctcctctggtgggagggtgctggccctggcaagattgaaggatgtgcagggcttcctctcagagccgcccaaactgccgttgatgtgtggaggggaagcaagatgggtaagggctcaggaagttgctccaagaacagtagctgatgaagctgcccagaagtgccttggctccagccctgtaccccttggtactgcctctgaacactctggtttccccacccaactgcggctaagtctctttttcccttggatcagccaagcgaaacttggagctttgacaaggaactttcctaagaaaccgctgataaccaggacaaaacacaaccaagggtacacgcaggcatgcacgggtttcctgcccagcgacggcttaagccagcccccgactggcctggccacactgctctccagtagcacagatgtctgctcctcctcttgaacttgggtgggaaaccccacccaaaagccccctttgttacttaggcaattccccttccctgactcccgagggctagggctagagcagacccgggtaagtaaaggcagacccagggctcctctagcctcatacccgtgccctcacagagccatgccccggcacctctgccctgtgtctttcatacctctacatgtctgcttgagatatttcctcagcctgaaagtttccccaaccatctgccagagaactcctatgcatcccttagaaccctgctcagacaccattacttttgtgaacgcttctgccacatcttgtcttccccaaaattgatcactccgccttctcctgggctcccgtagcacactataacatctgctggagtgttgctgttgcaccatactttcttgtacatttgtgtctcccttcccaactagactgtaagtgccttgcggtcagggactgaatcttgcccgtttatgtatgctccatgtctagcccatcatcctgcttggagcaagtaggcaggagctcaataaatgtttgttgcatgaa

SEQ ID NO: 182640 - DNA, 533 bp, Homo sapiens
  Payload ID: 15985
  Gene Symbol: SCNN1A
  Gene Name: sodium channel, non voltage gated 1 alpha subunit
  ENST ID: ENST00000536788
  CDS Start-End: 56-533
agaacctttgagatcaaacagccagggtgctgagcaccttattgcagggaggaccatgcccaatgggaacaagctggaggagcaggaccctagacctctgcagcccataccaggtctcatggaggggaacaagctggaggagcaggactctagccctccacagtccactccagggctcatgaaggggaacaagcgtgaggagcaggggctgggccccgaacctgcggcgccccagcagcccacggcggaggaggaggccctgatcgagttccaccgctcctaccgagagctcttcgagttcttctgcaacaacaccaccatccacggcgccatccgcctggtgtgctcccagcacaaccgcatgaagacggccttctgggcagtgctgtggctctgcacctttggcatgatgtactggcaattcggcctgcttttcggagagtacttcagctaccccgtcagcctcaacatcaacctcaactcggacaagctcgtcttccccgcagtgaccatctgcaccctcaatccctaca

SEQ ID NO: 182641 - DNA, 2085 bp, Homo sapiens
  Payload ID: 15986
  Gene Symbol: SCNN1B
  Gene Name: sodium channel, non voltage gated 1 beta subunit
  Uniprot ID: P51168
  ENST ID: ENST00000307331
  CDS Start-End: 28-2085
cttgagccctctcatcaccagttatccatgctgctgcatataaacccagcttatttatttaaactgctgcatggattcccgccgtggataatgcctaccgatgggaatttaggtgacaaaaattttcagatggggaaaccagggcacagagagggtgccactatgcacgtgaagaagtacctgctgaagggcctgcatcggctgcagaagggccccggctacacgtacaaggagctgctggtgtggtactgcgacaacaccaacacccacggccccaagcgcatcatctgtgaggggcccaagaagaaagccatgtggttcctgctcaccctgctcttcgccgccctcgtctgctggcagtggggcatcttcatcaggacctacttgagctgggaggtcagcgtctccctctccgtaggcttcaagaccatggacttccctgccgtcaccatctgcaatgctagccccttcaagtattccaaaatcaagcatttgctgaaggacctggatgagctgatggaagctgtcctggagagaatcctggctcctgagctaagccatgccaatgccaccaggaacctgaacttctccatctggaaccacacacccctggtccttattgatgaacggaacccccaccaccccatggtccttgatctctttggagacaaccacaatggcttaacaagcagctcagcatcagaaaagatctgtaatgcccacgggtgcaaaatggccatgagactatgtagcctcaacaggacccagtgtaccttccggaacttcaccagtgctacccaggcattgacagagtggtacatcctgcaggccaccaacatctttgcacaggtgccacagcaggagctagtagagatgagctaccccggcgagcagatgatcctggcctgcctattcggagctgagccctgcaactaccggaacttcacgtccatcttctaccctcactatggcaactgttacatcttcaactggggcatgacagagaaggcacttccttcggccaaccctggaactgaattcggcctgaagttgatcctggacataggccaggaagactacgtccccttccttgcgtccacggccggggtcaggctgatgcttcacgagcagaggtcataccccttcatcagagatgagggcatctacgccatgtcggggacagagacgtccatcggggtactcgtggacaagcttcagcgcatgggggagccctacagcccgtgcaccgtgaatggttctgaggtccccgtccaaaacttctacagtgactacaacacgacctactccatccaggcctgtcttcgctcctgcttccaagaccacatgatccgtaactgcaactgtggccactacctgtacccactgccccgtggggagaaatactgcaacaaccgggacttcccagactgggcccattgctactcagatctacagatgagcgtggcgcagagagagacctgcattggcatgtgcaaggagtcctgcaatgacacccagtacaagatgaccatctccatggctgactggccttctgaggcctccgaggactggattttccacgtcttgtctcaggagcgggaccaaagcaccaatatcaccctgagcaggaagggaattgtcaagctcaacatctacttccaagaatttaactatcgcaccattgaagaatcagcagccaataacatcgtctggctgctctcgaatctgggtggccagtttggcttctggatggggggctctgtgctgtgcctcatcgagtttggggagatcatcatcgactttgtgtggatcaccatcatcaagctggtggccttggccaagagcctacggcagcggcgagcccaagccagctacgctggcccaccgcccaccgtggccgagctggtggaggcccacaccaactttggcttccagcctgacacggccccccgcagccccaacactgggccctaccccagtgagcaggccctgcccatcccaggcaccccgccccccaactatgactccctgcgtctgcagccgctggacgtcatcgagtctgacagtgagggtgatgccatctaa

SEQ ID NO: 182642 - DNA, 2597 bp, Homo sapiens
  Payload ID: 15986
  Gene Symbol: SCNN1B
  Gene Name: sodium channel, non voltage gated 1 beta subunit
  Uniprot ID: P51168
  ENST ID: ENST00000343070
  CDS Start-End: 177-2099
gtgcttccccgcccctgaacctgctccctcccagtcggtctcgccgcgctcgccgggtgtcccagtgtcaccaacactcggccgccgccgccagcttggcgcgcaccgccgcctccgccaccgccgacagcgcgcatcctccgtgtccccgctccgccgcccgagcaggtgccactatgcacgtgaagaagtacctgctgaagggcctgcatcggctgcagaagggccccggctacacgtacaaggagctgctggtgtggtactgcgacaacaccaacacccacggccccaagcgcatcatctgtgaggggcccaagaagaaagccatgtggttcctgctcaccctgctcttcgccgccctcgtctgctggcagtggggcatcttcatcaggacctacttgagctgggaggtcagcgtctccctctccgtaggcttcaagaccatggacttccctgccgtcaccatctgcaatgctagccccttcaagtattccaaaatcaagcatttgctgaaggacctggatgagctgatggaagctgtcctggagagaatcctggctcctgagctaagccatgccaatgccaccaggaacctgaacttctccatctggaaccacacacccctggtccttattgatgaacggaacccccaccaccccatggtccttgatctctttggagacaaccacaatggcttaacaagcagctcagcatcagaaaagatctgtaatgcccacgggtgcaaaatggccatgagactatgtagcctcaacaggacccagtgtaccttccggaacttcaccagtgctacccaggcattgacagagtggtacatcctgcaggccaccaacatctttgcacaggtgccacagcaggagctagtagagatgagctaccccggcgagcagatgatcctggcctgcctattcggagctgagccctgcaactaccggaacttcacgtccatcttctaccctcactatggcaactgttacatcttcaactggggcatgacagagaaggcacttccttcggccaaccctggaactgaattcggcctgaagttgatcctggacataggccaggaagactacgtccccttccttgcgtccacggccggggtcaggctgatgcttcacgagcagaggtcataccccttcatcagagatgagggcatctacgccatgtcggggacagagacgtccatcggggtactcgtggacaagcttcagcgcatgggggagccctacagcccgtgcaccgtgaatggttctgaggtccccgtccaaaacttctacagtgactacaacacgacctactccatccaggcctgtcttcgctcctgcttccaagaccacatgatccgtaactgcaactgtggccactacctgtacccactgccccgtggggagaaatactgcaacaaccgggacttcccagactgggcccattgctactcagatctacagatgagcgtggcgcagagagagacctgcattggcatgtgcaaggagtcctgcaatgacacccagtacaagatgaccatctccatggctgactggccttctgaggcctccgaggactggattttccacgtcttgtctcaggagcgggaccaaagcaccaatatcaccctgagcaggaagggaattgtcaagctcaacatctacttccaagaatttaactatcgcaccattgaagaatcagcagccaataacatcgtctggctgctctcgaatctgggtggccagtttggcttctggatggggggctctgtgctgtgcctcatcgagtttggggagatcatcatcgactttgtgtggatcaccatcatcaagctggtggccttggccaagagcctacggcagcggcgagcccaagccagctacgctggcccaccgcccaccgtggccgagctggtggaggcccacaccaactttggcttccagcctgacacggccccccgcagccccaacactgggccctaccccagtgagcaggccctgcccatcccaggcaccccgccccccaactatgactccctgcgtctgcagccgctggacgtcatcgagtctgacagtgagggtgatgccatctaaccctgcccctgcccaccccgggcggctgaaactcactgagcagccaagactgttgcccgaggcctcactgtatggtgccctctccaaagggtcgggagggtagctctccaggccagagcttgtgtccttcaacagagaggccagcggcaactggtccgttactggccaagggctctgtagaatcacggtgctggtacaggatgcaggaataaattgtatcttcacctggttcctaccctcgtccctacctgtcctgatcctggtcctgaagacccctcggaacaccctctcctggtggcaggccacttccctcccagtgccagtctccatccaccccagagaggaacaggcgggtgggccatgtggttttctccttcctggccttggctggcctctggggcaggggtggtggagagatggaagggcatcaggtgtagggaccctgccaagtggcacctgatttactctagaaaataaaagtagaaaatactgagtcca

SEQ ID NO: 182643 - DNA, 1825 bp, Homo sapiens
  Payload ID: 15986
  Gene Symbol: SCNN1B
  Gene Name: sodium channel, non voltage gated 1 beta subunit
  ENST ID: ENST00000568085
  CDS Start-End: 9-1823
gtgccactatgcacgtgaagaagtacctgctgaagggcctgcatcggctgcagaagggccccggctacacgtacaaggagctgctggtgtggtactgcgacaacaccaacacccacggccccaagcgcatcatctgtgaggggcccaagaagaaagccatgtggttcctgctcaccctgctcttcgccgccctcgtctgctggcagtggggcatcttcatcaggacctacttgagctgggaggtcagcgtctccctctccgtaggcttcaagaccatggacttccctgccgtcaccatctgcaatgctagccccttcaagtattccaaaatcaagcatttgctgaaggacctggatgagctgatggaagctgtcctggagagaatcctggctcctgagctaagccatgccaatgccaccaggaacctgaacttctccatctggaaccacacacccctggtccttattgatgaacggaacccccaccaccccatggtccttgatctctttggagacaaccacaatggcttaacaagcagctcagcatcagaaaagatctgtaatgcccacgggtgcaaaatggccatgagactatgtagcctcaacaggacccagtgtaccttccggaacttcaccagtgctacccaggcattgacagagtggtacatcctgcaggccaccaacatctttgcacaggtgccacagcaggagctagtagagatgagctaccccggcgagcagatgatcctggcctgcctattcggagctgagccctgcaactaccggaacttcacgtccatcttctaccctcactatggcaactgttacatcttcaactggggcatgacagagaaggcacttccttcggccaaccctggaactgaattcggcctgaagttgatcctggacataggccaggaagactacgtccccttccttgcgtccacggccggggtcaggctgatgcttcacgagcagaggtcataccccttcatcagagatgagggcatctacgccatgtcggggacagagacgtccatcggggtactcgtggcctgtcttcgctcctgcttccaagaccacatgatccgtaactgcaactgtggccactacctgtacccactgccccgtggggagaaatactgcaacaaccgggacttcccagactgggcccattgctactcagatctacagatgagcgtggcgcagagagagacctgcattggcatgtgcaaggagtcctgcaatgacacccagtacaagatgaccatctccatggctgactggccttctgaggcctccgaggactggattttccacgtcttgtctcaggagcgggaccaaagcaccaatatcaccctgagcaggaagggaattgtcaagctcaacatctacttccaagaatttaactatcgcaccattgaagaatcagcagccaataacatcgtctggctgctctcgaatctgggtggccagtttggcttctggatggggggctctgtgctgtgcctcatcgagtttggggagatcatcatcgactttgtgtggatcaccatcatcaagctggtggccttggccaagagcctacggcagcggcgagcccaagccagctacgctggcccaccgcccaccgtggccgagctggtggaggcccacaccaactttggcttccagcctgacacggccccccgcagccccaacactgggccctaccccagtgagcaggccctgcccatcccaggcaccccgccccccaactatgactccctgcgtctgcagccgctggacgtcatcgagtctgacagtgagggtgatgccatctaacc

SEQ ID NO: 182644 - DNA, 1852 bp, Homo sapiens
  Payload ID: 15986
  Gene Symbol: SCNN1B
  Gene Name: sodium channel, non voltage gated 1 beta subunit
  ENST ID: ENST00000568923
  CDS Start-End: 9-1850
gtgccactatgcacgtgaagaagtacctgctgaagggcctgcatcggctgcagaagggccccggctacacgtacaaggagctgctggtgtggtactgcgacaacaccaacacccacggccccaagcgcatcatctgtgaggggcccaagaagaaagccatgtggttcctgctcaccctgctcttcgccgccctcgtctgctggcagtggggcatcttcatcaggacctacttgagctgggaggtcagcgtctccctctccgtaggcttcaagaccatggacttccctgccgtcaccatctgcaatgctagccccttcaagtattccaaaatcaagcatttgctgaaggacctggatgagctgatggaagctgtcctggagagaatcctggctcctgagctaagccatgccaatgccaccaggaacctgaacttctccatctggaaccacacacccctggtccttattgatgaacggaacccccaccaccccatggtccttgatctctttggagacaaccacaatggcttaacaagcagctcagcatcagaaaagatctgtaatgcccacgggtgcaaaatggccatgagactagccaccaacatctttgcacaggtgccacagcaggagctagtagagatgagctaccccggcgagcagatgatcctggcctgcctattcggagctgagccctgcaactaccggaacttcacgtccatcttctaccctcactatggcaactgttacatcttcaactggggcatgacagagaaggcacttccttcggccaaccctggaactgaattcggcctgaagttgatcctggacataggccaggaagactacgtccccttccttgcgtccacggccggggtcaggctgatgcttcacgagcagaggtcataccccttcatcagagatgagggcatctacgccatgtcggggacagagacgtccatcggggtactcgtggacaagcttcagcgcatgggggagccctacagcccgtgcaccgtgaatggttctgaggtccccgtccaaaacttctacagtgactacaacacgacctactccatccaggcctgtcttcgctcctgcttccaagaccacatgatccgtaactgcaactgtggccactacctgtacccactgccccgtggggagaaatactgcaacaaccgggacttcccagactgggcccattgctactcagatctacagatgagcgtggcgcagagagagacctgcattggcatgtgcaaggagtcctgcaatgacacccagtacaagatgaccatctccatggctgactggccttctgaggcctccgaggactggattttccacgtcttgtctcaggagcgggaccaaagcaccaatatcaccctgagcaggaagggaattgtcaagctcaacatctacttccaagaatttaactatcgcaccattgaagaatcagcagccaataacatcgtctggctgctctcgaatctgggtggccagtttggcttctggatggggggctctgtgctgtgcctcatcgagtttggggagatcatcatcgactttgtgtggatcaccatcatcaagctggtggccttggccaagagcctacggcagcggcgagcccaagccagctacgctggcccaccgcccaccgtggccgagctggtggaggcccacaccaactttggcttccagcctgacacggccccccgcagccccaacactgggccctaccccagtgagcaggccctgcccatcccaggcaccccgccccccaactatgactccctgcgtctgcagccgctggacgtcatcgagtctgacagtgagggtgatgccatctaacc

SEQ ID NO: 182645 - DNA, 1829 bp, Homo sapiens
  Payload ID: 15986
  Gene Symbol: SCNN1B
  Gene Name: sodium channel, non voltage gated 1 beta subunit
  ENST ID: ENST00000564275
  CDS Start-End: 9-899
gtgccactatgcacgtgaagaagtacctgctgaagggcctgcatcggctgcagaagggccccggctacacgtacaaggagctgctggtgtggtactgcgacaacaccaacacccacggccccaagcgcatcatctgtgaggggcccaagaagaaagccatgtggttcctgctcaccctgctcttcgccgccctcgtctgctggcagtggggcatcttcatcaggacctacttgagctgggaggtcagcgtctccctctccgtaggcttcaagaccatggacttccctgccgtcaccatctgcaatgctagccccttcaagtattccaaaatcaagcatttgctgaaggacctggatgagctgatggaagctgtcctggagagaatcctggctcctgagctaagccatgccaatgccaccaggaacctgaacttctccatctggaaccacacacccctggtccttattgatgaacggaacccccaccaccccatggtccttgatctctttggagacaaccacaatggcttaacaagcagctcagcatcagaaaagatctgtaatgcccacgggtgcaaaatggccatgagactatgtagcctcaacaggacccagtgtaccttccggaacttcaccagtgctacccaggcattgacagagtggtacatcctgcaggccaccaacatctttgcacaggtgccacagcaggagctagtagagatgagctaccccggcgagcagatgatcctggcctgcctattcggagctgagccctgcaactaccggcctgaagttgatcctggacataggccaggaagactacgtccccttccttgcgtccacggccggggtcaggctgatgcttcacgagcagaggtcataccccttcatcagagatgagggcatctacgccatgtcggggacagagacgtccatcggggtactcgtggacaagcttcagcgcatgggggagccctacagcccgtgcaccgtgaatggttctgaggtccccgtccaaaacttctacagtgactacaacacgacctactccatccaggcctgtcttcgctcctgcttccaagaccacatgatccgtaactgcaactgtggccactacctgtacccactgccccgtggggagaaatactgcaacaaccgggacttcccagactgggcccattgctactcagatctacagatgagcgtggcgcagagagagacctgcattggcatgtgcaaggagtcctgcaatgacacccagtacaagatgaccatctccatggctgactggccttctgaggcctccgaggactggattttccacgtcttgtctcaggagcgggaccaaagcaccaatatcaccctgagcaggaagggaattgtcaagctcaacatctacttccaagaatttaactatcgcaccattgaagaatcagcagccaataacatcgtctggctgctctcgaatctgggtggccagtttggcttctggatggggggctctgtgctgtgcctcatcgagtttggggagatcatcatcgactttgtgtggatcaccatcatcaagctggtggccttggccaagagcctacggcagcggcgagcccaagccagctacgctggcccaccgcccaccgtggccgagctggtggaggcccacaccaactttggcttccagcctgacacggccccccgcagccccaacactgggccctaccccagtgagcaggccctgcccatcccaggcaccccgccccccaactatgactccctgcgtctgcagccgctggacgtcatcgagtctgacagtgagggtgatgccatctaacc

SEQ ID NO: 182646 - DNA, 749 bp, Homo sapiens
  Payload ID: 15986
  Gene Symbol: SCNN1B
  Gene Name: sodium channel, non voltage gated 1 beta subunit
  ENST ID: ENST00000566441
  CDS Start-End: 1-566
tagtagagatgagctaccccggcgagcagatgatcctggcctgcctattcggagctgagccctgcaactaccggaacttcacgtccatcttctaccctcactatggcaactgttacatcttcaactggggcatgacagagaaggcacttccttcggccaaccctggaactgaattcggcctgaagttgatcctggacataggccaggaagactacgtccccttccttgcgtccacggccggggtcaggctgatgcttcacgagcagaggtcataccccttcatcagagatgagggcatctacgccatgtcggggacagagacgtccatcggggtactcgtggacaagcttcagcgcatgggggagccctacagcccgtgcaccgtgaatggttctgaggtccccgtccaaaacttctacagtgactacaacacgacctactccatccaggtgggaaggtggtgcacgcctcatgccccggggcccctgtccgggtttatggggccaaggcctcagtactccgggagagctggccccagcaagtctggctctgctgggcctttgtaggttgccacggggcaccccgggcctgtgggaccagtcactttcctgggctctctcaccagggcctagggttggccacttctcatccccacattggcaggtgtacccctggggaagcccaggggattatggggatcttactctggggtttcccaagatgaaaacaaaaaatagcagctaacacca

SEQ ID NO: 182647 - DNA, 2679 bp, Homo sapiens
  Payload ID: 15987
  Gene Symbol: SCNN1D
  Gene Name: sodium channel, non voltage gated 1 delta subunit
  Uniprot ID: P51172
  ENST ID: ENST00000325425
  CDS Start-End: 151-2265
gacatcagcaagccccctgccgcgagcttggagaggcaccccagccccatctggcactcaaggaaatcagctcagagaggttgagtaactcgggaaggccacacagccagtgacgaagctgtgattcacacaggcctgggtgactccagcatggctttcctctccaggacgtcaccggtggcagctgcttccttccagagccggcaggaggccagaggctccatcctgcttcagagctgccagctgcccccgcaatggctgagcaccgaagcatggacgggagaatggaagcagccacacgggggggctctcacctccagatcgcctgggcctgtggctccccagaggccctgccacctgaagggatggcagcacagacccactcagcacaacgctgcctgcaaacagggccaggctgcagcccagacgccccccaggccggggccaccatcagcaccaccaccaccacccaaggaggggcaccaggaggggctggtggagctgcccgcctcgttccgggagctgctcaccttcttctgcaccaatgccaccatccacggcgccatccgcctggtctgctcccgcgggaaccgcctcaagacgacgtcctgggggctgctgtccctgggagccctggtcgcgctctgctggcagctggggctcctctttgagcgtcactggcaccgcccggtcctcatggccgtctctgtgcactcggagcgcaagctgctcccgctggtcaccctgtgtgacgggaacccacgtcggccgagtccggtcctccgccatctggagctgctggacgagtttgccagggagaacattgactccctgtacaacgtcaacctcagcaaaggcagagccgccctctccgccactgtcccccgccacgagccccccttccacctggaccgggagatccgtctgcagaggctgagccactcgggcagccgggtcagagtggggttcagactgtgcaacagcacgggcggcgactgcttttaccgaggctacacgtcaggcgtggcggctgtccaggactggtaccacttccactatgtggatatcctggccctgctgcccgcggcatgggaggacagccacgggagccaggacggccacttcgtcctctcctgcagttacgatggcctggactgccaggcccgacagttccggaccttccaccaccccacctacggcagctgctacacggtcgatggcgtctggacagctcagcgccccggcatcacccacggagtcggcctggtcctcagggttgagcagcagcctcacctccctctgctgtccacgctggccggcatcagggtcatggttcacggccgtaaccacacgcccttcctggggcaccacagcttcagcgtccggccagggacggaggccaccatcagcatccgagaggacgaggtgcaccggctcgggagcccctacggccactgcaccgccggcggggaaggcgtggaggtggagctgctacacaacacctcctacaccaggcaggcctgcctggtgtcctgcttccagcagctgatggtggagacctgctcctgtggctactacctccaccctctgccggcgggggctgagtactgcagctctgcccggcaccctgcctggggacactgcttctaccgcctctaccaggacctggagacccaccggctcccctgtacctcccgctgccccaggccctgcagggagtctgcattcaagctctccactgggacctccaggtggccttccgccaagtcagctggatggactctggccacgctaggtgaacaggggctgccgcatcagagccacagacagaggagcagcctggccaaaatcaacatcgtctaccaggagctcaactaccgctcagtggaggaggcgcccgtgtactcggtgccgcagctgctctcggccatgggcagcctctgcagcctgtggtttggggcctccgtcctctccctcctggagctcctggagctgctgctcgatgcttctgccctcaccctggtgctaggcggccgccggctccgcagggcgtggttctcctggcccagagccagccctgcctcaggggcgtccagcatcaagccagaggccagtcagatgcccccgcctgcaggcggcacgtcagatgacccggagcccagcgggcctcatctcccacgggtgatgcttccaggggttctggcgggagtctcagccgaagagagctgggctgggccccagccccttgagactctggacacctgaaccagacctgccagggctgtgcgatctcttggcctggtccttgcagctgtggcagcagcaggctccccagcggcccagggtgggccagaccagcagcccaggaagcagcacacgcggccgtggggaggcaggcaccgggcatgtcggcgcctctggtcaaaccacctacactgcctggggtgggtctcaaggaggcccggggcggaggggggttcccgcgtgcacacgagtgcggctggacgtgccgacacgcggtgatgtacccatgctccgtgtgtctgtgtctgcatgtccacacgtctgatgcacctgtgtacgtgtgtcaagcctagccacctcagctgcagggaggcagaaggcaaggcaggccccacggacacacttgggctgctctgaaataaagctgttgactcc

SEQ ID NO: 182648 - DNA, 3475 bp, Homo sapiens
  Payload ID: 15987
  Gene Symbol: SCNN1D
  Gene Name: sodium channel, non voltage gated 1 delta subunit
  Uniprot ID: P51172
  ENST ID: ENST00000338555
  CDS Start-End: 1145-3061
tataaatgcttctcatcagactcaaggcctgaggtgatgctgatgctgtgcctgaattccagcagggaggaggcatgaggtgcgtccgactcccttcccatcacagctgagctagtttttcaggttaactttggaatgcccatggctaagaccaggggtccatccagacagttcagggcttataattttatttttggtttatgagggaacctagaaggcagcccacacgcaccttactcctcccagcaggggacaccggccagaccccaagctccacactcccaccctcagcacccacccaggccagcagccgggggcaccttggtgccaccttagtgcctgttctgcggaggctccactggacagtgcagttgatgcccggggccgagggggctctgcctgggaggctgttcacctgcctgggtgcaggaccccagagggaccccaggccacccctggcctgcccatgcccacgggaatcccgaccttgggctgcctgtctattgcaccagaaccgtcccagggctgactcagagtgaccctgagtgggggacgctcaccccaggggaggaaacggggctctgggataggaggtcctggctggggtcccacagatgccaggcgcctgccatctccagggcagtgctgtcacagaagacaacaccgctccctcgttacctgtggcccggccacctcagcggcccaaggaggtgagctcacagccatgctcggtcaatggggcctggccgtctttcctgggagagagcagaggcatgggcccaaagggagccagggatgcctgcccgtcccttctctcattcaggctcacctggtcatggtgcagtgaccacaggacccccacatgccgggagctgggttcgccccaccccaccccctgcaccgggccagcgaggggatggcccagaagagggggaggaccatgtggattcaccagtgctggacatgtgctctgtggctaccccctctgcctactctctggcccgatacaggggtgtgggacaggcctgggtgactccagcatggctttcctctccaggacgtcaccggtggcagctgcttccttccagagccggcaggaggccagaggctccatcctgcttcagagctgccagctgcccccgcaatggctgagcaccgaagcatggacgggagaatggaagcagccacacgggggggctctcacctccaggctgcagcccagacgccccccaggccggggccaccatcagcaccaccaccaccacccaaggaggggcaccaggaggggctggtggagctgcccgcctcgttccgggagctgctcaccttcttctgcaccaatgccaccatccacggcgccatccgcctggtctgctcccgcgggaaccgcctcaagacgacgtcctgggggctgctgtccctgggagccctggtcgcgctctgctggcagctggggctcctctttgagcgtcactggcaccgcccggtcctcatggccgtctctgtgcactcggagcgcaagctgctcccgctggtcaccctgtgtgacgggaacccacgtcggccgagtccggtcctccgccatctggagctgctggacgagtttgccagggagaacattgactccctgtacaacgtcaacctcagcaaaggcagagccgccctctccgccactgtcccccgccacgagccccccttccacctggaccgggagatccgtctgcagaggctgagccactcgggcagccgggtcagagtggggttcagactgtgcaacagcacgggcggcgactgcttttaccgaggctacacgtcaggcgtggcggctgtccaggactggtaccacttccactatgtggatatcctggccctgctgcccgcggcatgggaggacagccacgggagccaggacggccacttcgtcctctcctgcagttacgatggcctggactgccaggcccgacagttccggaccttccaccaccccacctacggcagctgctacacggtcgatggcgtctggacagctcagcgccccggcatcacccacggagtcggcctggtcctcagggttgagcagcagcctcacctccctctgctgtccacgctggccggcatcagggtcatggttcacggccgtaaccacacgcccttcctggggcaccacagcttcagcgtccggccagggacggaggccaccatcagcatccgagaggacgaggtgcaccggctcgggagcccctacggccactgcaccgccggcggggaaggcgtggaggtggagctgctacacaacacctcctacaccaggcaggcctgcctggtgtcctgcttccagcagctgatggtggagacctgctcctgtggctactacctccaccctctgccggcgggggctgagtactgcagctctgcccggcaccctgcctggggacactgcttctaccgcctctaccaggacctggagacccaccggctcccctgtacctcccgctgccccaggccctgcagggagtctgcattcaagctctccactgggacctccaggtggccttccgccaagtcagctggatggactctggccacgctaggtgaacaggggctgccgcatcagagccacagacagaggagcagcctggccaaaatcaacatcgtctaccaggagctcaactaccgctcagtggaggaggcgcccgtgtactcggtgccgcagctgctctcggccatgggcagcctctgcagcctgtggtttggggcctccgtcctctccctcctggagctcctggagctgctgctcgatgcttctgccctcaccctggtgctaggcggccgccggctccgcagggcgtggttctcctggcccagagccagccctgcctcaggggcgtccagcatcaagccagaggccagtcagatgcccccgcctgcaggcggcacgtcagatgacccggagcccagcgggcctcatctcccacgggtgatgcttccaggggttctggcgggagtctcagccgaagagagctgggctgggccccagccccttgagactctggacacctgaaccagacctgccagggctgtgcgatctcttggcctggtccttgcagctgtggcagcagcaggctccccagcggcccagggtgggccagaccagcagcccaggaagcagcacacgcggccgtggggaggcaggcaccgggcatgtcggcgcctctggtcaaaccacctacactgcctggggtgggtctcaaggaggcccggggcggaggggggttcccgcgtgcacacgagtgcggctggacgtgccgacacgcggtgatgtacccatgctccgtgtgtctgtgtctgcatgtccacacgtctgatgcacctgtgtacgtgtgtcaagcctagccacctcagctgcagggaggcagaaggcaaggcaggccccacggacacacttgggctgctctgaaataaagctgttgactcc

SEQ ID NO: 182649 - DNA, 923 bp, Homo sapiens
  Payload ID: 15987
  Gene Symbol: SCNN1D
  Gene Name: sodium channel, non voltage gated 1 delta subunit
  ENST ID: ENST00000379099
  CDS Start-End: 1-923
tgcaacagcacgggcggcgactgcttttaccgaggctacacgtcaggcgtggcggctgtccaggactggtaccacttccactatgtggatatcctggccctgctgcccgcggcatgggaggacagccacgggagccaggacggccacttcgtcctctcctgcagttacgatggcctggactgccaggcccgacagttccggaccttccaccaccccacctacggcagctgctacacggtcgatggcgtctggacagctcagcgccccggcatcacccacggtgggtgccagcccctggccggtgcgggggcaggggtgcaggtcaggtggcctcacaccagcccttggcctcccaggagtcggcctggtcctcagggttgagcagcagcctcacctccctctgctgtccacgctggccggcatcagggtcatggttcacggccgtaaccacacgcccttcctggggcaccacagcttcagcgtccggccagggacggaggccaccatcagcatccgagaggacgaggtgcaccggctcgggagcccctacggccactgcaccgccggcggggaaggcgtggaggtggagctgctacacaacacctcctacaccaggcaggcctgcctggtgtcctgcttccagcagctgatggtggagacctgctcctgtggctactacctccaccctctgccggcgggggctgagtactgcagctctgcccggcaccctgcctggggacactgcttctaccgcctctaccaggacctggagacccaccggctcccctgtacctcccgctgccccaggccctgcagggagtctgcattcaagctctccactgggacctccaggtggccttccgccaagtcagctggatggactctggccacgctaggtgaacaggggctgccgcatcagagcc

SEQ ID NO: 182650 - DNA, 3044 bp, Homo sapiens
  Payload ID: 15987
  Gene Symbol: SCNN1D
  Gene Name: sodium channel, non voltage gated 1 delta subunit
  ENST ID: ENST00000379116
  CDS Start-End: 227-2635
cctgggcgacagcgagactccatctcaataaataaaaaaaaaaaagagttgttatcagtagaagggaatgtctggttacagtatggcgttgtgcagatgaaggtcttatcgcagatgaagccaccaggtcacaagcctcagagagaatcaactataaatgcttctcatcagactcaaggcctgaggtgatgctgatgctgtgcctgaattccagcagggaggaggcatgagggcagtgctgtcacagaagacaacaccgctccctcgttacctgtggcccggccacctcagcggcccaaggaggctcacctggtcatggtgcagtgaccacaggacccccacatgccgggagctgggttcgccccaccccaccccctgcaccgggccagcgaggggatggcccagaagagggggaggaccatgtggattcaccagtgctggacatgtgctctgtggctaccccctctgcctactctctggcccgatacaggggtgtgggacaggcctgggtgactccagcatggctttcctctccaggacgtcaccggtggcagctgcttccttccagagccggcaggaggccagaggctccatcctgcttcagagctgccagctgcccccgcaatggctgagcaccgaagcatggacgggagaatggaagcagccacacgggggggctctcacctccagatcgcctgggcctgtggctccccagaggccctgccacctgaagggatggcagcacagacccactcagcacaacgctgcctgcaaacagggccaggctgcagcccagacgccccccaggccggggccaccatcagcaccaccaccaccacccaaggaggggcaccaggaggggctggtggagctgcccgcctcgttccgggagctgctcaccttcttctgcaccaatgccaccatccacggcgccatccgcctggtctgctcccgcgggaaccgcctcaagacgacgtcctgggggctgctgtccctgggagccctggtcgcgctctgctggcagctggggctcctctttgagcgtcactggcaccgcccggtcctcatggccgtctctgtgcactcggagcgcaagctgctcccgctggtcaccctgtgtgacgggaacccacgtcggccgagtccggtcctccgccatctggagctgctggacgagtttgccagggagaacattgactccctgtacaacgtcaacctcagcaaaggcagagccgccctctccgccactgtcccccgccacgagccccccttccacctggaccgggagatccgtctgcagaggctgagccactcgggcagccgggtcagagtggggttcagactgtgcaacagcacgggcggcgactgcttttaccgaggctacacgtcaggcgtggcggctgtccaggactggtaccacttccactatgtggatatcctggccctgctgcccgcggcatgggaggacagccacgggagccaggacggccacttcgtcctctcctgcagttacgatggcctggactgccaggcccgacagttccggaccttccaccaccccacctacggcagctgctacacggtcgatggcgtctggacagctcagcgccccggcatcacccacggagtcggcctggtcctcagggttgagcagcagcctcacctccctctgctgtccacgctggccggcatcagggtcatggttcacggccgtaaccacacgcccttcctggggcaccacagcttcagcgtccggccagggacggaggccaccatcagcatccgagaggacgaggtgcaccggctcgggagcccctacggccactgcaccgccggcggggaaggcgtggaggtggagctgctacacaacacctcctacaccaggcaggcctgcctggtgtcctgcttccagcagctgatggtggagacctgctcctgtggctactacctccaccctctgccggcgggggctgagtactgcagctctgcccggcaccctgcctggggacactgcttctaccgcctctaccaggacctggagacccaccggctcccctgtacctcccgctgccccaggccctgcagggagtctgcattcaagctctccactgggacctccaggtggccttccgccaagtcagctggatggactctggccacgctaggtgaacaggggctgccgcatcagagccacagacagaggagcagcctggccaaaatcaacatcgtctaccaggagctcaactaccgctcagtggaggaggcgcccgtgtactcggtgccgcagctgctctcggccatgggcagcctctgcagcctgtggtttggggcctccgtcctctccctcctggagctcctggagctgctgctcgatgcttctgccctcaccctggtgctaggcggccgccggctccgcagggcgtggttctcctggcccagagccagccctgcctcaggggcgtccagcatcaagccagaggccagtcagatgcccccgcctgcaggcggcacgtcagatgacccggagcccagcgggcctcatctcccacgggtgatgcttccaggggttctggcgggagtctcagccgaagagagctgggctgggccccagccccttgagactctggacacctgaaccagacctgccagggctgtgcgatctcttggcctggtccttgcagctgtggcagcagcaggctccccagcggcccagggtgggccagaccagcagcccaggaagcagcacacgcggccgtggggaggcaggcaccgggcatgtcggcgcctctggtcaaaccacctacactgcctggggtgggtctcaaggaggcccggggcggaggggggttcccgcgtgcacacgagtgcggctggacgtgccgacacgcggtgatgtacccatgctccgtgtgtctgtgtctgcatgtccacacgtctgatgcacctgtgtacgtgtgtcaagcctagccacctcagctgcagggaggcagaaggcaaggcaggccccacggacacacttgggctgctctgaaataaagctgttg

SEQ ID NO: 182651 - DNA, 2731 bp, Homo sapiens
  Payload ID: 15987
  Gene Symbol: SCNN1D
  Gene Name: sodium channel, non voltage gated 1 delta subunit
  Uniprot ID: P51172
  ENST ID: ENST00000400928
  CDS Start-End: 396-2312
agggcagtgctgtcacagaagacaacaccgctccctcgttacctgtggcccggccacctcagcggcccaaggaggctcacctggtcatggtgcagtgaccacaggacccccacatgccgggagctgggttcgccccaccccaccccctgcaccgggccagcgaggggatggcccagaagagggggaggaccatgtggattcaccagtgctggacatgtgctctgtggctaccccctctgcctactctctggcccgatacaggggtgtgggacaggcctgggtgactccagcatggctttcctctccaggacgtcaccggtggcagctgcttccttccagagccggcaggaggccagaggctccatcctgcttcagagctgccagctgcccccgcaatggctgagcaccgaagcatggacgggagaatggaagcagccacacgggggggctctcacctccaggctgcagcccagacgccccccaggccggggccaccatcagcaccaccaccaccacccaaggaggggcaccaggaggggctggtggagctgcccgcctcgttccgggagctgctcaccttcttctgcaccaatgccaccatccacggcgccatccgcctggtctgctcccgcgggaaccgcctcaagacgacgtcctgggggctgctgtccctgggagccctggtcgcgctctgctggcagctggggctcctctttgagcgtcactggcaccgcccggtcctcatggccgtctctgtgcactcggagcgcaagctgctcccgctggtcaccctgtgtgacgggaacccacgtcggccgagtccggtcctccgccatctggagctgctggacgagtttgccagggagaacattgactccctgtacaacgtcaacctcagcaaaggcagagccgccctctccgccactgtcccccgccacgagccccccttccacctggaccgggagatccgtctgcagaggctgagccactcgggcagccgggtcagagtggggttcagactgtgcaacagcacgggcggcgactgcttttaccgaggctacacgtcaggcgtggcggctgtccaggactggtaccacttccactatgtggatatcctggccctgctgcccgcggcatgggaggacagccacgggagccaggacggccacttcgtcctctcctgcagttacgatggcctggactgccaggcccgacagttccggaccttccaccaccccacctacggcagctgctacacggtcgatggcgtctggacagctcagcgccccggcatcacccacggagtcggcctggtcctcagggttgagcagcagcctcacctccctctgctgtccacgctggccggcatcagggtcatggttcacggccgtaaccacacgcccttcctggggcaccacagcttcagcgtccggccagggacggaggccaccatcagcatccgagaggacgaggtgcaccggctcgggagcccctacggccactgcaccgccggcggggaaggcgtggaggtggagctgctacacaacacctcctacaccaggcaggcctgcctggtgtcctgcttccagcagctgatggtggagacctgctcctgtggctactacctccaccctctgccggcgggggctgagtactgcagctctgcccggcaccctgcctggggacactgcttctaccgcctctaccaggacctggagacccaccggctcccctgtacctcccgctgccccaggccctgcagggagtctgcattcaagctctccactgggacctccaggtggccttccgccaagtcagctggatggactctggccacgctaggtgaacaggggctgccgcatcagagccacagacagaggagcagcctggccaaaatcaacatcgtctaccaggagctcaactaccgctcagtggaggaggcgcccgtgtactcggtgccgcagctgctctcggccatgggcagcctctgcagcctgtggtttggggcctccgtcctctccctcctggagctcctggagctgctgctcgatgcttctgccctcaccctggtgctaggcggccgccggctccgcagggcgtggttctcctggcccagagccagccctgcctcaggggcgtccagcatcaagccagaggccagtcagatgcccccgcctgcaggcggcacgtcagatgacccggagcccagcgggcctcatctcccacgggtgatgcttccaggggttctggcgggagtctcagccgaagagagctgggctgggccccagccccttgagactctggacacctgaaccagacctgccagggctgtgcgatctcttggcctggtccttgcagctgtggcagcagcaggctccccagcggcccagggtgggccagaccagcagcccaggaagcagcacacgcggccgtggggaggcaggcaccgggcatgtcggcgcctctggtcaaaccacctacactgcctggggtgggtctcaaggaggcccggggcggaggggggttcccgcgtgcacacgagtgcggctggacgtgccgacacgcggtgatgtacccatgctccgtgtgtctgtgtctgcatgtccacacgtctgatgcacctgtgtacgtgtgtcaagcctagccacctcagctgcagggaggcagaaggcaaggcaggccccacggacacacttgggctgctctgaaataaagctgttgactccacctg

SEQ ID NO: 182652 - DNA, 645 bp, Homo sapiens
  Payload ID: 15987
  Gene Symbol: SCNN1D
  Gene Name: sodium channel, non voltage gated 1 delta subunit
  ENST ID: ENST00000470022
  CDS Start-End: 229-645
agccacaatctctggcaagcacctaggaccttgtccccgcctgccaagtagccgcccgggccatgtgtgccctgtctcctcggcagcaagccccctgccgcgagcttggagaggcaccccagccccatctggcactcaaggaaatcagctcagagaggttgagtaactcgggaaggccacacagccagtgacgaagctgtgattcacacaggcctgggtgactccagcatggctttcctctccaggacgtcaccggtggcagctgcttccttccagagccggcaggcaggaggccagaggctccatcctgcttcagagctgccagctgcccccgcaatggctgagcaccgaagcatggacgggagaatggaagcagccacacgggggggctctcacctccaggctgcagcccagacgccccccaggccggggccaccatcagcaccaccaccaccacccaaggaggggcaccaggaggggctggtggagctgcccgcctcgttccgggagctgctcaccttcttctgcaccaatgccaccatccacggcgccatccgcctggtctgctcccgcgggaaccgcctcaagacgacgtcctgggggctgctgtccctgggagccctggtcgcgctctgctggcagctg

SEQ ID NO: 182653 - DNA, 2268 bp, Homo sapiens
  Payload ID: 15987
  Gene Symbol: SCNN1D
  Gene Name: sodium channel, non voltage gated 1 delta subunit
  ENST ID: ENST00000379101
  CDS Start-End: 191-1177
aaaaaaaaagagttgttatcagtagaagggaatgtctggttacagtatggcgttgtgcagatgaaggtcttatcgcagatgaagccaccaggtcacaagcctcagagagaatcaactataaatgcttctcatcagactcaaggcctgaggtgatgctgatgctgtgcctgaattccagcagggaggaggcatgagggcagtgctgtcacagaagacaacaccgctccctcgttacctgtggcccggccacctcagcggcccaaggaggctcacctggtcatggtgcagtgaccacaggacccccacatgccgggagctgggttcgccccaccccaccccctgcaccgggccagcgaggggatggcccagaagagggggaggaccatgtggattcaccagtgctggacatgtgctctgtggctaccccctctgcctactctctggcccgatacaggggtgtgggacaggcctgggtgactccagcatggctttcctctccaggacgtcaccggtggcagctgcttccttccagagccggcaggaggccagaggctccatcctgcttcagagctgccagctgcccccgcaatggctgagcaccgaagcatggacgggagaatggaagcagccacacgggggggctctcacctccaggctgcagcccagacgccccccaggccggggccaccatcagcaccaccaccaccacccaaggaggggcaccaggaggggctggtggagctgcccgcctcgttccgggagctgctcaccttcttctgcaccaatgccaccatccacggcgccatccgcctggtctgctcccgcgggaaccgcctcaagacgacgtcctgggggctgctgtccctgggagccctggtcgcgctctgctggcagctggggctcctctttgagcgtcactggcaccgcccggtcctcatggccgtctctgtgcactcggagcgcaagctgctcccgctggtcaccctgtgtgacgggaacccacgtcggccgagtccggtcctccgccatctggagctgctggacgagtttgccagggagaacattgactccctgtacaacgtcaacctcagcaaaggcagagccgccctctccgccactgtcccccgccacgagccccccttccacctggaccgggagatccgtctgcagaggctgagccactcgggcagccgggtcagagtggggttcagactgtgcaacagcacgggcggcgactgcttttaccgaggctacacgtcaggcgtggcggctgtccaggactggtaccacttccactatgtggatatcctggccctgctgcccgcggcatgggaggacagccacgggagccaggacggccacttcgtcctctcctgcagttacgatggcctggactgccaggcccgacagttccggaccttccaccaccccacctacggcagctgctacacggtcgatggcgtctggacagctcagcgccccggcatcacccacggagtcggcctggtcctcagggttgagcagcagcctcacctccctctgctgtccacgctggccggcatcagggtcatggttcacggccgtaaccacacgcccttcctggggcaccacagcttcagcgtccggccagggacggaggccaccatcagcatccgagaggacgaggtgcaccggctcgggagcccctacggccactgcaccgccggcggggaaggcgtggaggtggagctgctacacaacacctcctacaccaggcaggcctgcctggtgtcctgcttccagcagctgatggtggagacctgctcctgtggctactacctccaccctctgccggcgggggctgagtactgcagctctgcccggcaccctgcctggggacactgcttctaccgcctctaccaggacctggagacccaccggctcccctgtacctcccgctgccccaggccctgcagggagtctgcattcaagctctccactgggacctccaggtggccttccgccaagtcagctggatggactctggccacgctaggtgaacaggggctgccgcatcagagccacagacagaggagcagcctggccaaaatcaacatcgtctaccaggagctcaactaccgctcagtggaggaggcgcccgtgtactcggtgccgcagctgctctcggccatgggcagcctctgcagcctgtggtttggggcctccgtcctctccctcctggagctcctggagctgctgctcgatgcttctgccctcaccctggtgcta

SEQ ID NO: 182654 - DNA, 2871 bp, Homo sapiens
  Payload ID: 15987
  Gene Symbol: SCNN1D
  Gene Name: sodium channel, non voltage gated 1 delta subunit
  ENST ID: ENST00000616713
  CDS Start-End: 41-2452
gaggtcctggctggggtcccacagatgccaggcgcctgccatctccagggcagtgctgtcacagaagacaacaccgctccctcgttacctgtggcccggccacctcagcggcccaaggaggctcacctggtcatggtgcagtgaccacaggacccccacatgccgggagctgggttcgccccaccccaccccctgcaccgggccagcgaggggatggcccagaagagggggaggaccatgtggattcaccagtgctggacatgtgctctgtggctaccccctctgcctactctctggcccgatacaggggtgtgggacaggcctgggtgactccagcatggctttcctctccaggacgtcaccggtggcagctgcttccttccagagccggcaggaggccagaggctccatcctgcttcagagctgccagctgcccccgcaatggctgagcaccgaagcatggacgggagaatggaagcagccacacgggggggctctcacctccagatcgcctgggcctgtggctccccagaggccctgccacctgaagggatggcagcacagacccactcagcacaacgctgcctgcaaacagggccaggctgcagcccagacgccccccaggccggggccaccatcagcaccaccaccaccacccaaggaggggcaccaggaggggctggtggagctgcccgcctcgttccgggagctgctcaccttcttctgcaccaatgccaccatccacggcgccatccgcctggtctgctcccgcgggaaccgcctcaagacgacgtcctgggggctgctgtccctgggagccctggtcgcgctctgctggcagctggggctcctctttgagcgtcactggcaccgcccggtcctcatggccgtctctgtgcactcggagcgcaagctgctcccgctggtcaccctgtgtgacgggaacccacgtcggccgagtccggtcctccgccatctggagctgctggacgagtttgccagggagaacattgactccctgtacaacgtcaacctcagcaaaggcagagccgccctctccgccactgtcccccgccacgagccccccttccacctggaccgggagatccgtctgcagaggctgagccactcgggcagccgggtcagagtggggttcagactgtgcaacagcacgggcggcgactgcttttaccgaggctacacgtcaggcgtggcggctgtccaggactggtaccacttccactatgtggatatcctggccctgctgcccgcggcatgggaggacagccacgggagccaggacggccacttcgtcctctcctgcagttacgatggcctggactgccaggcccgacagttccggaccttccaccaccccacctacggcagctgctacacggtcgatggcgtctggacagctcagcgccccggcatcacccacggagtcggcctggtcctcagggttgagcagcagcctcacctccctctgctgtccacgctggccggcatcagggtcatggttcacggccgtaaccacacgcccttcctggggcaccacagcttcagcgtccggccagggacggaggccaccatcagcatccgagaggacgaggtgcaccggctcgggagcccctacggccactgcaccgccggcggggaaggcgtggaggtggagctgctacacaacacctcctacaccaggcaggcctgcctggtgtcctgcttccagcagctgatggtggagacctgctcctgtggctactacctccaccctctgccggcgggggctgagtactgcagctctgcccggcaccctgcctggggacactgcttctaccgcctctaccaggacctggagacccaccggctcccctgtacctcccgctgccccaggccctgcagggagtctgcattcaagctctccactgggacctccaggtggccttccgccaagtcagctggatggactctggccacgctaggtgaacaggggctgccgcatcagagccacagacagaggagcagcctggccaaaatcaacatcgtctaccaggagctcaactaccgctcagtggaggaggcgcccgtgtactcggtgccgcagctgctctcggccatgggcagcctctgcagcctgtggtttggggcctccgtcctctccctcctggagctcctggagctgctgctcgatgcttctgccctcaccctggtgctaggcggccgccggctccgcagggcgtggttctcctggcccagagccagccctgcctcaggggcgtccagcatcaagccagaggccagtcagatgcccccgcctgcaggcggcacgtcagatgacccggagcccagcgggcctcatctcccacgggtgatgcttccaggggttctggcgggagtctcagccgaagagagctgggctgggccccagccccttgagactctggacacctgaaccagacctgccagggctgtgcgatctcttggcctggtccttgcagctgtggcagcagcaggctccccagcggcccagggtgggccagaccagcagcccaggaagcagcacacgcggccgtggggaggcaggcaccgggcatgtcggcgcctctggtcaaaccacctacactgcctggggtgggtctcaaggaggcccggggcggaggggggttcccgcgtgcacacgagtgcggctggacgtgccgacacgcggtgatgtacccatgctccgtgtgtctgtgtctgcatgtccacacgtctgatgcacctgtgtacgtgtgtcaagcctagccacctcagctgcagggaggcagaaggcaaggcaggccccacggacacacttgggctgctctgaaataaagctgttgactccacctg

SEQ ID NO: 182655 - DNA, 3507 bp, Homo sapiens
  Payload ID: 15988
  Gene Symbol: SCNN1G
  Gene Name: sodium channel, non voltage gated 1 gamma subunit
  Uniprot ID: P51170
  ENST ID: ENST00000300061
  CDS Start-End: 144-2093
ccacaagagcccgcggtggcgctgccaggggatgctagcccgagagcgagcagaggagcagcgcacccgcacgagccttggaccctttggaaccgaaagcacgcccgtcctcagagtcccgtcctcaaagtcccatcctcgccatggcacccggagagaagatcaaagccaaaatcaagaagaatctgcccgtgacgggccctcaggcgccgaccattaaagagctgatgcggtggtactgcctcaacaccaacacccatggctgtcgccgcatcgtggtgtcccgcggccgtctgcgccgcctcctctggatcgggttcacactgactgccgtggccctcatcctctggcagtgcgccctcctcgtcttctccttctatactgtctcagtttccatcaaagtccacttccggaagctggattttcctgcagtcaccatctgcaacatcaacccctacaagtacagcaccgttcgccaccttctagctgacttggaacaggagaccagagaggccctgaagtccctgtatggctttccagagtcccggaagcgccgagaggcggagtcctggaactccgtctcagagggaaagcagcctagattctcccaccggattccgctgctgatctttgatcaggatgagaagggcaaggccagggacttcttcacagggaggaagcggaaagtcggcggtagcatcattcacaaggcttcaaatgtcatgcacatcgagtccaagcaagtggtgggattccaactgtgctcaaatgacacctccgactgtgccacctacaccttcagctcgggaatcaatgccattcaggagtggtataagctacactacatgaacatcatggcacaggtgcctctggagaagaaaatcaacatgagctattctgctgaggagctgctggtgacctgcttctttgatggagtgtcctgtgatgccaggaatttcacgcttttccaccacccgatgcatgggaattgctatactttcaacaacagagaaaatgagaccattctcagcacctccatggggggcagcgaatatgggctgcaagtcattttgtacataaacgaagaggaatacaacccattcctcgtgtcctccactggagctaaggtgatcatccatcggcaggatgagtatcccttcgtcgaagatgtgggaacagagattgagacagcaatggtcacctctataggaatgcacctgacagagtccttcaagctgagtgagccctacagtcagtgcacggaggacgggagtgacgtgccaatcaggaacatctacaacgctgcctactcgctccagatctgccttcattcatgcttccagacaaagatggtggagaaatgtgggtgtgcccagtacagccagcctctacctcctgcagccaactactgcaactaccagcagcaccccaactggatgtattgttactaccaactgcatcgagcctttgtccaggaagagctgggctgccagtctgtgtgcaaggaagcctgcagctttaaagagtggacactaaccacaagcctggcacaatggccatctgtggtttcggagaagtggttgctgcctgttctcacttgggaccaaggccggcaagtaaacaaaaagctcaacaagacagacttggccaaactcttgatattctacaaagacctgaaccagagatccatcatggagagcccagccaacagtattgagatgcttctgtccaacttcggtggccagctgggcctgtggatgagctgctctgttgtctgcgtcatcgagatcatcgaggtcttcttcattgacttcttctctatcattgcccgccgccagtggcagaaagccaaggagtggtgggcctggaaacaggctcccccatgtccagaagctccccgtagcccacagggccaggacaatccagccctggatatagacgatgacctacccactttcaactctgctttgcacctgcctccagccctaggaacccaagtgcccggcacaccgccccccaaatacaataccttgcgcttggagagggccttttccaaccagctcacagatacccagatgctggatgagctctgaggcagggttgagaagacagatctagtcaggaccaccagccatggtctaaggacatggatcgggtgcccccagacgtgtgcacaggggaccctctgccccactctgggcttttcagatactctgaccaaaaagcctgctttaaaccgcaagatggggcctgggcatgcgcaggaggagccatcgggtactacgcagcaacactcacaactgtccaggctgagataaatcccgggacctgaactattagcacgtcactagagactgggagccgaggcagtggtgctggcccaagtgaaggccagagtgaggactgatgcagctctttacgggtcttgagagggaaggactcttccaaagccccaaagccgagggtttcacccacactgccagcctgggttggggcccaaggatgtgaccttgagtgtcaaggctggacagctactgccagatgccaaagataggagaaagtgccagccctgaagctggagccgtttgtgaataaactgttcttcatcattgacactggagaaaggtgtcctccatgccctcaggcagcagagaactggcccagagcccttggagtgttggtggagatcagagtgccgtggtggaggtctgggactatgtcagagtgtcctcactttggggcatgggtgggtccaggagatggatttagttattcaattttgtggatgaataaattgaggcacagaaagattaagttaccggcccaaggtgacacagtgaggaggtggcagagctaggatttgaacccagacaatctgacttcatgattttgcatccaattcgtgtctgtgccttttaaagggtgaggtctgtgtcactttgggtggggagggggagcatggtgggccatgctctgggcagctgttccaagacagagctgacccttccattaccaatggcctgtccctcaccaacaagccaactgccacagatgacccacttcataccacattcacatctttccacctgaaatggctaacaggtattaaatccttggttggtgtttaaagccaacccaagaacagggtgttaggtactgttttaagcacctagataggttagcataggggactgcaaatggtgttccgcaaagcaaatcctgtttttgaccatgaactaagaattttattttattttattttttattttttgtagaaataggatctcactatgttgcccaggctgttcttgaactcctggcctcaaatgatcttcccacttcagcctcccaaagtgcagggattacaggcacaagccaccgtgcccagccaagaatttttatttttgcttttaaatagcaaaagaagaagattctgtgactcatgaaaatgatatgagattcgaattccagtgtctataaataaagttttattggtacacagccaca

SEQ ID NO: 182656 - DNA, 8533 bp, Homo sapiens
  Payload ID: 15989
  Gene Symbol: SCN1A
  Gene Name: sodium channel, voltage gated, type I alpha subunit
  Uniprot ID: P35498
  ENST ID: ENST00000303395
  CDS Start-End: 419-6448
caagctatttgctgatttgtattaggtaccatagagtgaggcgaggatgaagccgagaggatactgcagaggtctctggtgcatgtgtgtatgtgtgcgtttgtgtgtgtttgtgtgtctgtgtgttctgccccagtgagactgcagcccttgtaaatactttgacaccttttgcaagaaggaatctgaacaattgcaactgaaggcacattgttatcatctcgtctttgggtgatgctgttcctcactgcagatggataattttccttttaatcaggtttgggcaattatgaataaggctgctgtatacatccgtgtgcaggattttgtgtggacataagttttcaactcctttggttaaatcctaaggaatttcatatgcagaataaatggtaattaaaatgtgcaggatgacaagatggagcaaacagtgcttgtaccaccaggacctgacagcttcaacttcttcaccagagaatctcttgcggctattgaaagacgcattgcagaagaaaaggcaaagaatcccaaaccagacaaaaaagatgacgacgaaaatggcccaaagccaaatagtgacttggaagctggaaagaaccttccatttatttatggagacattcctccagagatggtgtcagagcccctggaggacctggacccctactatatcaataagaaaacttttatagtattgaataaagggaaggccatcttccggttcagtgccacctctgccctgtacattttaactcccttcaatcctcttaggaaaatagctattaagattttggtacattcattattcagcatgctaattatgtgcactattttgacaaactgtgtgtttatgacaatgagtaaccctcctgattggacaaagaatgtagaatacaccttcacaggaatatatacttttgaatcacttataaaaattattgcaaggggattctgtttagaagattttactttccttcgggatccatggaactggctcgatttcactgtcattacatttgcgtacgtcacagagtttgtggacctgggcaatgtctcggcattgagaacattcagagttctccgagcattgaagacgatttcagtcattccaggcctgaaaaccattgtgggagccctgatccagtctgtgaagaagctctcagatgtaatgatcctgactgtgttctgtctgagcgtatttgctctaattgggctgcagctgttcatgggcaacctgaggaataaatgtatacaatggcctcccaccaatgcttccttggaggaacatagtatagaaaagaatataactgtgaattataatggtacacttataaatgaaactgtctttgagtttgactggaagtcatatattcaagattcaagatatcattatttcctggagggttttttagatgcactactatgtggaaatagctctgatgcaggccaatgtccagagggatatatgtgtgtgaaagctggtagaaatcccaattatggctacacaagctttgataccttcagttgggcttttttgtccttgtttcgactaatgactcaggacttctgggaaaatctttatcaactgacattacgtgctgctgggaaaacgtacatgatattttttgtattggtcattttcttgggctcattctacctaataaatttgatcctggctgtggtggccatggcctacgaggaacagaatcaggccaccttggaagaagcagaacagaaagaggccgaatttcagcagatgattgaacagcttaaaaagcaacaggaggcagctcagcaggcagcaacggcaactgcctcagaacattccagagagcccagtgcagcaggcaggctctcagacagctcatctgaagcctctaagttgagttccaagagtgctaaggaaagaagaaatcggaggaagaaaagaaaacagaaagagcagtctggtggggaagagaaagatgaggatgaattccaaaaatctgaatctgaggacagcatcaggaggaaaggttttcgcttctccattgaagggaaccgattgacatatgaaaagaggtactcctccccacaccagtctttgttgagcatccgtggctccctattttcaccaaggcgaaatagcagaacaagccttttcagctttagagggcgagcaaaggatgtgggatctgagaacgacttcgcagatgatgagcacagcacctttgaggataacgagagccgtagagattccttgtttgtgccccgacgacacggagagagacgcaacagcaacctgagtcagaccagtaggtcatcccggatgctggcagtgtttccagcgaatgggaagatgcacagcactgtggattgcaatggtgtggtttccttggttggtggaccttcagttcctacatcgcctgttggacagcttctgccagaggtgataatagataagccagctactgatgacaatggaacaaccactgaaactgaaatgagaaagagaaggtcaagttctttccacgtttccatggactttctagaagatccttcccaaaggcaacgagcaatgagtatagccagcattctaacaaatacagtagaagaacttgaagaatccaggcagaaatgcccaccctgttggtataaattttccaacatattcttaatctgggactgttctccatattggttaaaagtgaaacatgttgtcaacctggttgtgatggacccatttgttgacctggccatcaccatctgtattgtcttaaatactcttttcatggccatggagcactatccaatgacggaccatttcaataatgtgcttacagtaggaaacttggttttcactgggatctttacagcagaaatgtttctgaaaattattgccatggatccttactattatttccaagaaggctggaatatctttgacggttttattgtgacgcttagcctggtagaacttggactcgccaatgtggaaggattatctgttctccgttcatttcgattgctgcgagttttcaagttggcaaaatcttggccaacgttaaatatgctaataaagatcatcggcaattccgtgggggctctgggaaatttaaccctcgtcttggccatcatcgtcttcatttttgccgtggtcggcatgcagctctttggtaaaagctacaaagattgtgtctgcaagatcgccagtgattgtcaactcccacgctggcacatgaatgacttcttccactccttcctgattgtgttccgcgtgctgtgtggggagtggatagagaccatgtgggactgtatggaggttgctggtcaagccatgtgccttactgtcttcatgatggtcatggtgattggaaacctagtggtcctgaatctctttctggccttgcttctgagctcatttagtgcagacaaccttgcagccactgatgatgataatgaaatgaataatctccaaattgctgtggataggatgcacaaaggagtagcttatgtgaaaagaaaaatatatgaatttattcaacagtccttcattaggaaacaaaagattttagatgaaattaaaccacttgatgatctaaacaacaagaaagacagttgtatgtccaatcatacagcagaaattgggaaagatcttgactatcttaaagatgtaaatggaactacaagtggtataggaactggcagcagtgttgaaaaatacattattgatgaaagtgattacatgtcattcataaacaaccccagtcttactgtgactgtaccaattgctgtaggagaatctgactttgaaaatttaaacacggaagactttagtagtgaatcggatctggaagaaagcaaagagaaactgaatgaaagcagtagctcatcagaaggtagcactgtggacatcggcgcacctgtagaagaacagcccgtagtggaacctgaagaaactcttgaaccagaagcttgtttcactgaaggctgtgtacaaagattcaagtgttgtcaaatcaatgtggaagaaggcagaggaaaacaatggtggaacctgagaaggacgtgtttccgaatagttgaacataactggtttgagaccttcattgttttcatgattctccttagtagtggtgctctggcatttgaagatatatatattgatcagcgaaagacgattaagacgatgttggaatatgctgacaaggttttcacttacattttcattctggaaatgcttctaaaatgggtggcatatggctatcaaacatatttcaccaatgcctggtgttggctggacttcttaattgttgatgtttcattggtcagtttaacagcaaatgccttgggttactcagaacttggagccatcaaatctctcaggacactaagagctctgagacctctaagagccttatctcgatttgaagggatgagggtggttgtgaatgcccttttaggagcaattccatccatcatgaatgtgcttctggtttgtcttatattctggctaattttcagcatcatgggcgtaaatttgtttgctggcaaattctaccactgtattaacaccacaactggtgacaggtttgacatcgaagacgtgaataatcatactgattgcctaaaactaatagaaagaaatgagactgctcgatggaaaaatgtgaaagtaaactttgataatgtaggatttgggtatctctctttgcttcaagttgccacattcaaaggatggatggatataatgtatgcagcagttgattccagaaatgtggaactccagcctaagtatgaagaaagtctgtacatgtatctttactttgttattttcatcatctttgggtccttcttcaccttgaacctgtttattggtgtcatcatagataatttcaaccagcagaaaaagaagtttggaggtcaagacatctttatgacagaagaacagaagaaatactataatgcaatgaaaaaattaggatcgaaaaaaccgcaaaagcctatacctcgaccaggaaacaaatttcaaggaatggtctttgacttcgtaaccagacaagtttttgacataagcatcatgattctcatctgtcttaacatggtcacaatgatggtggaaacagatgaccagagtgaatatgtgactaccattttgtcacgcatcaatctggtgttcattgtgctatttactggagagtgtgtactgaaactcatctctctacgccattattattttaccattggatggaatatttttgattttgtggttgtcattctctccattgtaggtatgtttcttgccgagctgatagaaaagtatttcgtgtcccctaccctgttccgagtgatccgtcttgctaggattggccgaatcctacgtctgatcaaaggagcaaaggggatccgcacgctgctctttgctttgatgatgtcccttcctgcgttgtttaacatcggcctcctactcttcctagtcatgttcatctacgccatctttgggatgtccaactttgcctatgttaagagggaagttgggatcgatgacatgttcaactttgagacctttggcaacagcatgatctgcctattccaaattacaacctctgctggctgggatggattgctagcacccattctcaacagtaagccacccgactgtgaccctaataaagttaaccctggaagctcagttaagggagactgtgggaacccatctgttggaattttcttttttgtcagttacatcatcatatccttcctggttgtggtgaacatgtacatcgcggtcatcctggagaacttcagtgttgctactgaagaaagtgcagagcctctgagtgaggatgactttgagatgttctatgaggtttgggagaagtttgatcccgatgcaactcagttcatggaatttgaaaaattatctcagtttgcagctgcgcttgaaccgcctctcaatctgccacaaccaaacaaactccagctcattgccatggatttgcccatggtgagtggtgaccggatccactgtcttgatatcttatttgcttttacaaagcgggttctaggagagagtggagagatggatgctctacgaatacagatggaagagcgattcatggcttccaatccttccaaggtctcctatcagccaatcactactactttaaaacgaaaacaagaggaagtatctgctgtcattattcagcgtgcttacagacgccaccttttaaagcgaactgtaaaacaagcttcctttacgtacaataaaaacaaaatcaaaggtggggctaatcttcttataaaagaagacatgataattgacagaataaatgaaaactctattacagaaaaaactgatctgaccatgtccactgcagcttgtccaccttcctatgaccgggtgacaaagccaattgtggaaaaacatgagcaagaaggcaaagatgaaaaagccaaagggaaataaatgaaaataaataaaaataattgggtgacaaattgtttacagcctgtgaaggtgatgtatttttatcaacaggactcctttaggaggtcaatgccaaactgactgtttttacacaaatctccttaaggtcagtgcctacaataagacagtgaccccttgtcagcaaactgtgactctgtgtaaaggggagatgaccttgacaggaggttactgttctcactaccagctgacactgctgaagataagatgcacaatggctagtcagactgtagggaccagtttcaaggggtgcaaacctgtgattttggggttgtttaacatgaaacactttagtgtagtaattgtatccactgtttgcatttcaactgccacatttgtcacatttttatggaatctgttagtggattcatctttttgttaatccatgtgtttattatatgtgactatttttgtaaacgaagtttctgttgagaaataggctaaggacctctataacaggtatgccacctggggggtatggcaaccacatggccctcccagctacacaaagtcgtggtttgcatgagggcatgctgcacttagagatcatgcatgagaaaaagtcacaagaaaaacaaattcttaaatttcaccatatttctgggaggggtaattgggtgataagtggaggtgctttgttgatcttgttttgcgaaatccagcccctagaccaagtagattatttgtgggtaggccagtaaatcttagcaggtgcaaacttcattcaaatgtttggagtcataaatgttatgtttctttttgttgtattaaaaaaaaaacctgaatagtgaatattgcccctcaccctccaccgccagaagactgaattgaccaaaattactctttataaatttctgctttttcctgcactttgtttagccatcttcggctctcagcaaggttgacactgtatatgttaatgaaatgctatttattatgtaaatagtcattttaccctgtggtgcacgtttgagcaaacaaataatgacctaagcacagtatttattgcatcaaatatgtaccacaagaaatgtagagtgcaagctttacacaggtaataaaatgtattctgtaccatttatagatagtttggatgctatcaatgcatgtttatattaccatgctgctgtatctggtttctctcactgctcagaatctcatttatgagaaaccatatgtcagtggtaaagtcaaggaaattgttcaacagatctcatttatttaagtcattaagcaatagtttgcagcactttaacagctttttggttatttttacattttaagtggataacatatggtatatagccagactgtacagacatgtttaaaaaaacacactgcttaacctattaaatatgtgtttagaattttataagcaaatataaatactgtaaaaagtcactttattttatttttcagcattatgtacataaatatgaagaggaaattatcttcaggttgatatcacaatcacttttcttactttctgtccatagtactttttcatgaaagaaatttgctaaataagacatgaaaacaagactgggtagttgtagatttctgctttttaaattacatttgctaattttagattatttcacaattttaaggagcaaaataggttcacgattcatatccaaattatgctttgcaattggaaaagggtttaaaattttatttatatttctggtagtacctgcactaactgaattgaaggtagtgcttatgttatttttgttctttttttctgacttcggtttatgttttcatttctttggagtaatgctgctctagattgttctaaatagaatgtgggcttcataatttttttttccacaaaaacagagtagtcaacttatatagtcaattacatcaggacattttgtgtttcttacagaagcaaaccataggctcctcttttccttaaaactacttagataaactgtattcgtgaactgcatgctggaaaatgctactattatgctaaataatgctaaccaacatttaaaatgtgcaaaactaataaagattacattttttatttta

SEQ ID NO: 182657 - DNA, 8097 bp, Homo sapiens
  Payload ID: 15989
  Gene Symbol: SCN1A
  Gene Name: sodium channel, voltage gated, type I alpha subunit
  Uniprot ID: P35498
  ENST ID: ENST00000375405
  CDS Start-End: 19-6015
aatgtgcaggatgacaagatggagcaaacagtgcttgtaccaccaggacctgacagcttcaacttcttcaccagagaatctcttgcggctattgaaagacgcattgcagaagaaaaggcaaagaatcccaaaccagacaaaaaagatgacgacgaaaatggcccaaagccaaatagtgacttggaagctggaaagaaccttccatttatttatggagacattcctccagagatggtgtcagagcccctggaggacctggacccctactatatcaataagaaaacttttatagtattgaataaagggaaggccatcttccggttcagtgccacctctgccctgtacattttaactcccttcaatcctcttaggaaaatagctattaagattttggtacattcattattcagcatgctaattatgtgcactattttgacaaactgtgtgtttatgacaatgagtaaccctcctgattggacaaagaatgtagaatacaccttcacaggaatatatacttttgaatcacttataaaaattattgcaaggggattctgtttagaagattttactttccttcgggatccatggaactggctcgatttcactgtcattacatttgcgtacgtcacagagtttgtggacctgggcaatgtctcggcattgagaacattcagagttctccgagcattgaagacgatttcagtcattccaggcctgaaaaccattgtgggagccctgatccagtctgtgaagaagctctcagatgtaatgatcctgactgtgttctgtctgagcgtatttgctctaattgggctgcagctgttcatgggcaacctgaggaataaatgtatacaatggcctcccaccaatgcttccttggaggaacatagtatagaaaagaatataactgtgaattataatggtacacttataaatgaaactgtctttgagtttgactggaagtcatatattcaagattcaagatatcattatttcctggagggttttttagatgcactactatgtggaaatagctctgatgcaggccaatgtccagagggatatatgtgtgtgaaagctggtagaaatcccaattatggctacacaagctttgataccttcagttgggcttttttgtccttgtttcgactaatgactcaggacttctgggaaaatctttatcaactgacattacgtgctgctgggaaaacgtacatgatattttttgtattggtcattttcttgggctcattctacctaataaatttgatcctggctgtggtggccatggcctacgaggaacagaatcaggccaccttggaagaagcagaacagaaagaggccgaatttcagcagatgattgaacagcttaaaaagcaacaggaggcagctcagcaggcagcaacggcaactgcctcagaacattccagagagcccagtgcagcaggcaggctctcagacagctcatctgaagcctctaagttgagttccaagagtgctaaggaaagaagaaatcggaggaagaaaagaaaacagaaagagcagtctggtggggaagagaaagatgaggatgaattccaaaaatctgaatctgaggacagcatcaggaggaaaggttttcgcttctccattgaagggaaccgattgacatatgaaaagaggtactcctccccacaccagtctttgttgagcatccgtggctccctattttcaccaaggcgaaatagcagaacaagccttttcagctttagagggcgagcaaaggatgtgggatctgagaacgacttcgcagatgatgagcacagcacctttgaggataacgagagccgtagagattccttgtttgtgccccgacgacacggagagagacgcaacagcaacctgagtcagaccagtaggtcatcccggatgctggcagtgtttccagcgaatgggaagatgcacagcactgtggattgcaatggtgtggtttccttggttggtggaccttcagttcctacatcgcctgttggacagcttctgccagagggaacaaccactgaaactgaaatgagaaagagaaggtcaagttctttccacgtttccatggactttctagaagatccttcccaaaggcaacgagcaatgagtatagccagcattctaacaaatacagtagaagaacttgaagaatccaggcagaaatgcccaccctgttggtataaattttccaacatattcttaatctgggactgttctccatattggttaaaagtgaaacatgttgtcaacctggttgtgatggacccatttgttgacctggccatcaccatctgtattgtcttaaatactcttttcatggccatggagcactatccaatgacggaccatttcaataatgtgcttacagtaggaaacttggttttcactgggatctttacagcagaaatgtttctgaaaattattgccatggatccttactattatttccaagaaggctggaatatctttgacggttttattgtgacgcttagcctggtagaacttggactcgccaatgtggaaggattatctgttctccgttcatttcgattgctgcgagttttcaagttggcaaaatcttggccaacgttaaatatgctaataaagatcatcggcaattccgtgggggctctgggaaatttaaccctcgtcttggccatcatcgtcttcatttttgccgtggtcggcatgcagctctttggtaaaagctacaaagattgtgtctgcaagatcgccagtgattgtcaactcccacgctggcacatgaatgacttcttccactccttcctgattgtgttccgcgtgctgtgtggggagtggatagagaccatgtgggactgtatggaggttgctggtcaagccatgtgccttactgtcttcatgatggtcatggtgattggaaacctagtggtcctgaatctctttctggccttgcttctgagctcatttagtgcagacaaccttgcagccactgatgatgataatgaaatgaataatctccaaattgctgtggataggatgcacaaaggagtagcttatgtgaaaagaaaaatatatgaatttattcaacagtccttcattaggaaacaaaagattttagatgaaattaaaccacttgatgatctaaacaacaagaaagacagttgtatgtccaatcatacagcagaaattgggaaagatcttgactatcttaaagatgtaaatggaactacaagtggtataggaactggcagcagtgttgaaaaatacattattgatgaaagtgattacatgtcattcataaacaaccccagtcttactgtgactgtaccaattgctgtaggagaatctgactttgaaaatttaaacacggaagactttagtagtgaatcggatctggaagaaagcaaagagaaactgaatgaaagcagtagctcatcagaaggtagcactgtggacatcggcgcacctgtagaagaacagcccgtagtggaacctgaagaaactcttgaaccagaagcttgtttcactgaaggctgtgtacaaagattcaagtgttgtcaaatcaatgtggaagaaggcagaggaaaacaatggtggaacctgagaaggacgtgtttccgaatagttgaacataactggtttgagaccttcattgttttcatgattctccttagtagtggtgctctggcatttgaagatatatatattgatcagcgaaagacgattaagacgatgttggaatatgctgacaaggttttcacttacattttcattctggaaatgcttctaaaatgggtggcatatggctatcaaacatatttcaccaatgcctggtgttggctggacttcttaattgttgatgtttcattggtcagtttaacagcaaatgccttgggttactcagaacttggagccatcaaatctctcaggacactaagagctctgagacctctaagagccttatctcgatttgaagggatgagggtggttgtgaatgcccttttaggagcaattccatccatcatgaatgtgcttctggtttgtcttatattctggctaattttcagcatcatgggcgtaaatttgtttgctggcaaattctaccactgtattaacaccacaactggtgacaggtttgacatcgaagacgtgaataatcatactgattgcctaaaactaatagaaagaaatgagactgctcgatggaaaaatgtgaaagtaaactttgataatgtaggatttgggtatctctctttgcttcaagttgccacattcaaaggatggatggatataatgtatgcagcagttgattccagaaatgtggaactccagcctaagtatgaagaaagtctgtacatgtatctttactttgttattttcatcatctttgggtccttcttcaccttgaacctgtttattggtgtcatcatagataatttcaaccagcagaaaaagaagtttggaggtcaagacatctttatgacagaagaacagaagaaatactataatgcaatgaaaaaattaggatcgaaaaaaccgcaaaagcctatacctcgaccaggaaacaaatttcaaggaatggtctttgacttcgtaaccagacaagtttttgacataagcatcatgattctcatctgtcttaacatggtcacaatgatggtggaaacagatgaccagagtgaatatgtgactaccattttgtcacgcatcaatctggtgttcattgtgctatttactggagagtgtgtactgaaactcatctctctacgccattattattttaccattggatggaatatttttgattttgtggttgtcattctctccattgtaggtatgtttcttgccgagctgatagaaaagtatttcgtgtcccctaccctgttccgagtgatccgtcttgctaggattggccgaatcctacgtctgatcaaaggagcaaaggggatccgcacgctgctctttgctttgatgatgtcccttcctgcgttgtttaacatcggcctcctactcttcctagtcatgttcatctacgccatctttgggatgtccaactttgcctatgttaagagggaagttgggatcgatgacatgttcaactttgagacctttggcaacagcatgatctgcctattccaaattacaacctctgctggctgggatggattgctagcacccattctcaacagtaagccacccgactgtgaccctaataaagttaaccctggaagctcagttaagggagactgtgggaacccatctgttggaattttcttttttgtcagttacatcatcatatccttcctggttgtggtgaacatgtacatcgcggtcatcctggagaacttcagtgttgctactgaagaaagtgcagagcctctgagtgaggatgactttgagatgttctatgaggtttgggagaagtttgatcccgatgcaactcagttcatggaatttgaaaaattatctcagtttgcagctgcgcttgaaccgcctctcaatctgccacaaccaaacaaactccagctcattgccatggatttgcccatggtgagtggtgaccggatccactgtcttgatatcttatttgcttttacaaagcgggttctaggagagagtggagagatggatgctctacgaatacagatggaagagcgattcatggcttccaatccttccaaggtctcctatcagccaatcactactactttaaaacgaaaacaagaggaagtatctgctgtcattattcagcgtgcttacagacgccaccttttaaagcgaactgtaaaacaagcttcctttacgtacaataaaaacaaaatcaaaggtggggctaatcttcttataaaagaagacatgataattgacagaataaatgaaaactctattacagaaaaaactgatctgaccatgtccactgcagcttgtccaccttcctatgaccgggtgacaaagccaattgtggaaaaacatgagcaagaaggcaaagatgaaaaagccaaagggaaataaatgaaaataaataaaaataattgggtgacaaattgtttacagcctgtgaaggtgatgtatttttatcaacaggactcctttaggaggtcaatgccaaactgactgtttttacacaaatctccttaaggtcagtgcctacaataagacagtgaccccttgtcagcaaactgtgactctgtgtaaaggggagatgaccttgacaggaggttactgttctcactaccagctgacactgctgaagataagatgcacaatggctagtcagactgtagggaccagtttcaaggggtgcaaacctgtgattttggggttgtttaacatgaaacactttagtgtagtaattgtatccactgtttgcatttcaactgccacatttgtcacatttttatggaatctgttagtggattcatctttttgttaatccatgtgtttattatatgtgactatttttgtaaacgaagtttctgttgagaaataggctaaggacctctataacaggtatgccacctggggggtatggcaaccacatggccctcccagctacacaaagtcgtggtttgcatgagggcatgctgcacttagagatcatgcatgagaaaaagtcacaagaaaaacaaattcttaaatttcaccatatttctgggaggggtaattgggtgataagtggaggtgctttgttgatcttgttttgcgaaatccagcccctagaccaagtagattatttgtgggtaggccagtaaatcttagcaggtgcaaacttcattcaaatgtttggagtcataaatgttatgtttctttttgttgtattaaaaaaaaaacctgaatagtgaatattgcccctcaccctccaccgccagaagactgaattgaccaaaattactctttataaatttctgctttttcctgcactttgtttagccatcttcggctctcagcaaggttgacactgtatatgttaatgaaatgctatttattatgtaaatagtcattttaccctgtggtgcacgtttgagcaaacaaataatgacctaagcacagtatttattgcatcaaatatgtaccacaagaaatgtagagtgcaagctttacacaggtaataaaatgtattctgtaccatttatagatagtttggatgctatcaatgcatgtttatattaccatgctgctgtatctggtttctctcactgctcagaatctcatttatgagaaaccatatgtcagtggtaaagtcaaggaaattgttcaacagatctcatttatttaagtcattaagcaatagtttgcagcactttaacagctttttggttatttttacattttaagtggataacatatggtatatagccagactgtacagacatgtttaaaaaaacacactgcttaacctattaaatatgtgtttagaattttataagcaaatataaatactgtaaaaagtcactttattttatttttcagcattatgtacataaatatgaagaggaaattatcttcaggttgatatcacaatcacttttcttactttctgtccatagtactttttcatgaaagaaatttgctaaataagacatgaaaacaagactgggtagttgtagatttctgctttttaaattacatttgctaattttagattatttcacaattttaaggagcaaaataggttcacgattcatatccaaattatgctttgcaattggaaaagggtttaaaattttatttatatttctggtagtacctgcactaactgaattgaaggtagtgcttatgttatttttgttctttttttctgacttcggtttatgttttcatttctttggagtaatgctgctctagattgttctaaatagaatgtgggcttcataatttttttttccacaaaaacagagtagtcaacttatatagtcaattacatcaggacattttgtgtttcttacagaagcaaaccataggctcctcttttccttaaaactacttagataaactgtattcgtgaactgcatgctggaaaatgctactattatgctaaataatgctaaccaacatttaaaatgtgcaaaactaataaagattacattttttatt

SEQ ID NO: 182658 - DNA, 5946 bp, Homo sapiens
  Payload ID: 15989
  Gene Symbol: SCN1A
  Gene Name: sodium channel, voltage gated, type I alpha subunit
  Uniprot ID: P35498
  ENST ID: ENST00000409050
  CDS Start-End: 1-5946
atggagcaaacagtgcttgtaccaccaggacctgacagcttcaacttcttcaccagagaatctcttgcggctattgaaagacgcattgcagaagaaaaggcaaagaatcccaaaccagacaaaaaagatgacgacgaaaatggcccaaagccaaatagtgacttggaagctggaaagaaccttccatttatttatggagacattcctccagagatggtgtcagagcccctggaggacctggacccctactatatcaataagaaaacttttatagtattgaataaagggaaggccatcttccggttcagtgccacctctgccctgtacattttaactcccttcaatcctcttaggaaaatagctattaagattttggtacattcattattcagcatgctaattatgtgcactattttgacaaactgtgtgtttatgacaatgagtaaccctcctgattggacaaagaatgtagaatacaccttcacaggaatatatacttttgaatcacttataaaaattattgcaaggggattctgtttagaagattttactttccttcgggatccatggaactggctcgatttcactgtcattacatttgcgtacgtcacagagtttgtggacctgggcaatgtctcggcattgagaacattcagagttctccgagcattgaagacgatttcagtcattccaggcctgaaaaccattgtgggagccctgatccagtctgtgaagaagctctcagatgtaatgatcctgactgtgttctgtctgagcgtatttgctctaattgggctgcagctgttcatgggcaacctgaggaataaatgtatacaatggcctcccaccaatgcttccttggaggaacatagtatagaaaagaatataactgtgaattataatggtacacttataaatgaaactgtctttgagtttgactggaagtcatatattcaagattcaagatatcattatttcctggagggttttttagatgcactactatgtggaaatagctctgatgcaggccaatgtccagagggatatatgtgtgtgaaagctggtagaaatcccaattatggctacacaagctttgataccttcagttgggcttttttgtccttgtttcgactaatgactcaggacttctgggaaaatctttatcaactgacattacgtgctgctgggaaaacgtacatgatattttttgtattggtcattttcttgggctcattctacctaataaatttgatcctggctgtggtggccatggcctacgaggaacagaatcaggccaccttggaagaagcagaacagaaagaggccgaatttcagcagatgattgaacagcttaaaaagcaacaggaggcagctcagcaggcagcaacggcaactgcctcagaacattccagagagcccagtgcagcaggcaggctctcagacagctcatctgaagcctctaagttgagttccaagagtgctaaggaaagaagaaatcggaggaagaaaagaaaacagaaagagcagtctggtggggaagagaaagatgaggatgaattccaaaaatctgaatctgaggacagcatcaggaggaaaggttttcgcttctccattgaagggaaccgattgacatatgaaaagaggtactcctccccacaccagtctttgttgagcatccgtggctccctattttcaccaaggcgaaatagcagaacaagccttttcagctttagagggcgagcaaaggatgtgggatctgagaacgacttcgcagatgatgagcacagcacctttgaggataacgagagccgtagagattccttgtttgtgccccgacgacacggagagagacgcaacagcaacctgagtcagaccagtaggtcatcccggatgctggcagtgtttccagcgaatgggaagatgcacagcactgtggattgcaatggtgtggtttccttgggaacaaccactgaaactgaaatgagaaagagaaggtcaagttctttccacgtttccatggactttctagaagatccttcccaaaggcaacgagcaatgagtatagccagcattctaacaaatacagtagaagaacttgaagaatccaggcagaaatgcccaccctgttggtataaattttccaacatattcttaatctgggactgttctccatattggttaaaagtgaaacatgttgtcaacctggttgtgatggacccatttgttgacctggccatcaccatctgtattgtcttaaatactcttttcatggccatggagcactatccaatgacggaccatttcaataatgtgcttacagtaggaaacttggttttcactgggatctttacagcagaaatgtttctgaaaattattgccatggatccttactattatttccaagaaggctggaatatctttgacggttttattgtgacgcttagcctggtagaacttggactcgccaatgtggaaggattatctgttctccgttcatttcgattgctgcgagttttcaagttggcaaaatcttggccaacgttaaatatgctaataaagatcatcggcaattccgtgggggctctgggaaatttaaccctcgtcttggccatcatcgtcttcatttttgccgtggtcggcatgcagctctttggtaaaagctacaaagattgtgtctgcaagatcgccagtgattgtcaactcccacgctggcacatgaatgacttcttccactccttcctgattgtgttccgcgtgctgtgtggggagtggatagagaccatgtgggactgtatggaggttgctggtcaagccatgtgccttactgtcttcatgatggtcatggtgattggaaacctagtggtcctgaatctctttctggccttgcttctgagctcatttagtgcagacaaccttgcagccactgatgatgataatgaaatgaataatctccaaattgctgtggataggatgcacaaaggagtagcttatgtgaaaagaaaaatatatgaatttattcaacagtccttcattaggaaacaaaagattttagatgaaattaaaccacttgatgatctaaacaacaagaaagacagttgtatgtccaatcatacagcagaaattgggaaagatcttgactatcttaaagatgtaaatggaactacaagtggtataggaactggcagcagtgttgaaaaatacattattgatgaaagtgattacatgtcattcataaacaaccccagtcttactgtgactgtaccaattgctgtaggagaatctgactttgaaaatttaaacacggaagactttagtagtgaatcggatctggaagaaagcaaagagaaactgaatgaaagcagtagctcatcagaaggtagcactgtggacatcggcgcacctgtagaagaacagcccgtagtggaacctgaagaaactcttgaaccagaagcttgtttcactgaaggctgtgtacaaagattcaagtgttgtcaaatcaatgtggaagaaggcagaggaaaacaatggtggaacctgagaaggacgtgtttccgaatagttgaacataactggtttgagaccttcattgttttcatgattctccttagtagtggtgctctggcatttgaagatatatatattgatcagcgaaagacgattaagacgatgttggaatatgctgacaaggttttcacttacattttcattctggaaatgcttctaaaatgggtggcatatggctatcaaacatatttcaccaatgcctggtgttggctggacttcttaattgttgatgtttcattggtcagtttaacagcaaatgccttgggttactcagaacttggagccatcaaatctctcaggacactaagagctctgagacctctaagagccttatctcgatttgaagggatgagggtggttgtgaatgcccttttaggagcaattccatccatcatgaatgtgcttctggtttgtcttatattctggctaattttcagcatcatgggcgtaaatttgtttgctggcaaattctaccactgtattaacaccacaactggtgacaggtttgacatcgaagacgtgaataatcatactgattgcctaaaactaatagaaagaaatgagactgctcgatggaaaaatgtgaaagtaaactttgataatgtaggatttgggtatctctctttgcttcaagttgccacattcaaaggatggatggatataatgtatgcagcagttgattccagaaatgtggaactccagcctaagtatgaagaaagtctgtacatgtatctttactttgttattttcatcatctttgggtccttcttcaccttgaacctgtttattggtgtcatcatagataatttcaaccagcagaaaaagaagtttggaggtcaagacatctttatgacagaagaacagaagaaatactataatgcaatgaaaaaattaggatcgaaaaaaccgcaaaagcctatacctcgaccaggaaacaaatttcaaggaatggtctttgacttcgtaaccagacaagtttttgacataagcatcatgattctcatctgtcttaacatggtcacaatgatggtggaaacagatgaccagagtgaatatgtgactaccattttgtcacgcatcaatctggtgttcattgtgctatttactggagagtgtgtactgaaactcatctctctacgccattattattttaccattggatggaatatttttgattttgtggttgtcattctctccattgtaggtatgtttcttgccgagctgatagaaaagtatttcgtgtcccctaccctgttccgagtgatccgtcttgctaggattggccgaatcctacgtctgatcaaaggagcaaaggggatccgcacgctgctctttgctttgatgatgtcccttcctgcgttgtttaacatcggcctcctactcttcctagtcatgttcatctacgccatctttgggatgtccaactttgcctatgttaagagggaagttgggatcgatgacatgttcaactttgagacctttggcaacagcatgatctgcctattccaaattacaacctctgctggctgggatggattgctagcacccattctcaacagtaagccacccgactgtgaccctaataaagttaaccctggaagctcagttaagggagactgtgggaacccatctgttggaattttcttttttgtcagttacatcatcatatccttcctggttgtggtgaacatgtacatcgcggtcatcctggagaacttcagtgttgctactgaagaaagtgcagagcctctgagtgaggatgactttgagatgttctatgaggtttgggagaagtttgatcccgatgcaactcagttcatggaatttgaaaaattatctcagtttgcagctgcgcttgaaccgcctctcaatctgccacaaccaaacaaactccagctcattgccatggatttgcccatggtgagtggtgaccggatccactgtcttgatatcttatttgcttttacaaagcgggttctaggagagagtggagagatggatgctctacgaatacagatggaagagcgattcatggcttccaatccttccaaggtctcctatcagccaatcactactactttaaaacgaaaacaagaggaagtatctgctgtcattattcagcgtgcttacagacgccaccttttaaagcgaactgtaaaacaagcttcctttacgtacaataaaaacaaaatcaaaggtggggctaatcttcttataaaagaagacatgataattgacagaataaatgaaaactctattacagaaaaaactgatctgaccatgtccactgcagcttgtccaccttcctatgaccgggtgacaaagccaattgtggaaaaacatgagcaagaaggcaaagatgaaaaagccaaagggaaataa

SEQ ID NO: 182659 - DNA, 8191 bp, Homo sapiens
  Payload ID: 15989
  Gene Symbol: SCN1A
  Gene Name: sodium channel, voltage gated, type I alpha subunit
  Uniprot ID: P35498
  ENST ID: ENST00000423058
  CDS Start-End: 77-6106
aaaatatctgtattccttttattttaggaatttcatatgcagaataaatggtaattaaaatgtgcaggatgacaagatggagcaaacagtgcttgtaccaccaggacctgacagcttcaacttcttcaccagagaatctcttgcggctattgaaagacgcattgcagaagaaaaggcaaagaatcccaaaccagacaaaaaagatgacgacgaaaatggcccaaagccaaatagtgacttggaagctggaaagaaccttccatttatttatggagacattcctccagagatggtgtcagagcccctggaggacctggacccctactatatcaataagaaaacttttatagtattgaataaagggaaggccatcttccggttcagtgccacctctgccctgtacattttaactcccttcaatcctcttaggaaaatagctattaagattttggtacattcattattcagcatgctaattatgtgcactattttgacaaactgtgtgtttatgacaatgagtaaccctcctgattggacaaagaatgtagaatacaccttcacaggaatatatacttttgaatcacttataaaaattattgcaaggggattctgtttagaagattttactttccttcgggatccatggaactggctcgatttcactgtcattacatttgcgtacgtcacagagtttgtggacctgggcaatgtctcggcattgagaacattcagagttctccgagcattgaagacgatttcagtcattccaggcctgaaaaccattgtgggagccctgatccagtctgtgaagaagctctcagatgtaatgatcctgactgtgttctgtctgagcgtatttgctctaattgggctgcagctgttcatgggcaacctgaggaataaatgtatacaatggcctcccaccaatgcttccttggaggaacatagtatagaaaagaatataactgtgaattataatggtacacttataaatgaaactgtctttgagtttgactggaagtcatatattcaagattcaagatatcattatttcctggagggttttttagatgcactactatgtggaaatagctctgatgcaggccaatgtccagagggatatatgtgtgtgaaagctggtagaaatcccaattatggctacacaagctttgataccttcagttgggcttttttgtccttgtttcgactaatgactcaggacttctgggaaaatctttatcaactgacattacgtgctgctgggaaaacgtacatgatattttttgtattggtcattttcttgggctcattctacctaataaatttgatcctggctgtggtggccatggcctacgaggaacagaatcaggccaccttggaagaagcagaacagaaagaggccgaatttcagcagatgattgaacagcttaaaaagcaacaggaggcagctcagcaggcagcaacggcaactgcctcagaacattccagagagcccagtgcagcaggcaggctctcagacagctcatctgaagcctctaagttgagttccaagagtgctaaggaaagaagaaatcggaggaagaaaagaaaacagaaagagcagtctggtggggaagagaaagatgaggatgaattccaaaaatctgaatctgaggacagcatcaggaggaaaggttttcgcttctccattgaagggaaccgattgacatatgaaaagaggtactcctccccacaccagtctttgttgagcatccgtggctccctattttcaccaaggcgaaatagcagaacaagccttttcagctttagagggcgagcaaaggatgtgggatctgagaacgacttcgcagatgatgagcacagcacctttgaggataacgagagccgtagagattccttgtttgtgccccgacgacacggagagagacgcaacagcaacctgagtcagaccagtaggtcatcccggatgctggcagtgtttccagcgaatgggaagatgcacagcactgtggattgcaatggtgtggtttccttggttggtggaccttcagttcctacatcgcctgttggacagcttctgccagaggtgataatagataagccagctactgatgacaatggaacaaccactgaaactgaaatgagaaagagaaggtcaagttctttccacgtttccatggactttctagaagatccttcccaaaggcaacgagcaatgagtatagccagcattctaacaaatacagtagaagaacttgaagaatccaggcagaaatgcccaccctgttggtataaattttccaacatattcttaatctgggactgttctccatattggttaaaagtgaaacatgttgtcaacctggttgtgatggacccatttgttgacctggccatcaccatctgtattgtcttaaatactcttttcatggccatggagcactatccaatgacggaccatttcaataatgtgcttacagtaggaaacttggttttcactgggatctttacagcagaaatgtttctgaaaattattgccatggatccttactattatttccaagaaggctggaatatctttgacggttttattgtgacgcttagcctggtagaacttggactcgccaatgtggaaggattatctgttctccgttcatttcgattgctgcgagttttcaagttggcaaaatcttggccaacgttaaatatgctaataaagatcatcggcaattccgtgggggctctgggaaatttaaccctcgtcttggccatcatcgtcttcatttttgccgtggtcggcatgcagctctttggtaaaagctacaaagattgtgtctgcaagatcgccagtgattgtcaactcccacgctggcacatgaatgacttcttccactccttcctgattgtgttccgcgtgctgtgtggggagtggatagagaccatgtgggactgtatggaggttgctggtcaagccatgtgccttactgtcttcatgatggtcatggtgattggaaacctagtggtcctgaatctctttctggccttgcttctgagctcatttagtgcagacaaccttgcagccactgatgatgataatgaaatgaataatctccaaattgctgtggataggatgcacaaaggagtagcttatgtgaaaagaaaaatatatgaatttattcaacagtccttcattaggaaacaaaagattttagatgaaattaaaccacttgatgatctaaacaacaagaaagacagttgtatgtccaatcatacagcagaaattgggaaagatcttgactatcttaaagatgtaaatggaactacaagtggtataggaactggcagcagtgttgaaaaatacattattgatgaaagtgattacatgtcattcataaacaaccccagtcttactgtgactgtaccaattgctgtaggagaatctgactttgaaaatttaaacacggaagactttagtagtgaatcggatctggaagaaagcaaagagaaactgaatgaaagcagtagctcatcagaaggtagcactgtggacatcggcgcacctgtagaagaacagcccgtagtggaacctgaagaaactcttgaaccagaagcttgtttcactgaaggctgtgtacaaagattcaagtgttgtcaaatcaatgtggaagaaggcagaggaaaacaatggtggaacctgagaaggacgtgtttccgaatagttgaacataactggtttgagaccttcattgttttcatgattctccttagtagtggtgctctggcatttgaagatatatatattgatcagcgaaagacgattaagacgatgttggaatatgctgacaaggttttcacttacattttcattctggaaatgcttctaaaatgggtggcatatggctatcaaacatatttcaccaatgcctggtgttggctggacttcttaattgttgatgtttcattggtcagtttaacagcaaatgccttgggttactcagaacttggagccatcaaatctctcaggacactaagagctctgagacctctaagagccttatctcgatttgaagggatgagggtggttgtgaatgcccttttaggagcaattccatccatcatgaatgtgcttctggtttgtcttatattctggctaattttcagcatcatgggcgtaaatttgtttgctggcaaattctaccactgtattaacaccacaactggtgacaggtttgacatcgaagacgtgaataatcatactgattgcctaaaactaatagaaagaaatgagactgctcgatggaaaaatgtgaaagtaaactttgataatgtaggatttgggtatctctctttgcttcaagttgccacattcaaaggatggatggatataatgtatgcagcagttgattccagaaatgtggaactccagcctaagtatgaagaaagtctgtacatgtatctttactttgttattttcatcatctttgggtccttcttcaccttgaacctgtttattggtgtcatcatagataatttcaaccagcagaaaaagaagtttggaggtcaagacatctttatgacagaagaacagaagaaatactataatgcaatgaaaaaattaggatcgaaaaaaccgcaaaagcctatacctcgaccaggaaacaaatttcaaggaatggtctttgacttcgtaaccagacaagtttttgacataagcatcatgattctcatctgtcttaacatggtcacaatgatggtggaaacagatgaccagagtgaatatgtgactaccattttgtcacgcatcaatctggtgttcattgtgctatttactggagagtgtgtactgaaactcatctctctacgccattattattttaccattggatggaatatttttgattttgtggttgtcattctctccattgtaggtatgtttcttgccgagctgatagaaaagtatttcgtgtcccctaccctgttccgagtgatccgtcttgctaggattggccgaatcctacgtctgatcaaaggagcaaaggggatccgcacgctgctctttgctttgatgatgtcccttcctgcgttgtttaacatcggcctcctactcttcctagtcatgttcatctacgccatctttgggatgtccaactttgcctatgttaagagggaagttgggatcgatgacatgttcaactttgagacctttggcaacagcatgatctgcctattccaaattacaacctctgctggctgggatggattgctagcacccattctcaacagtaagccacccgactgtgaccctaataaagttaaccctggaagctcagttaagggagactgtgggaacccatctgttggaattttcttttttgtcagttacatcatcatatccttcctggttgtggtgaacatgtacatcgcggtcatcctggagaacttcagtgttgctactgaagaaagtgcagagcctctgagtgaggatgactttgagatgttctatgaggtttgggagaagtttgatcccgatgcaactcagttcatggaatttgaaaaattatctcagtttgcagctgcgcttgaaccgcctctcaatctgccacaaccaaacaaactccagctcattgccatggatttgcccatggtgagtggtgaccggatccactgtcttgatatcttatttgcttttacaaagcgggttctaggagagagtggagagatggatgctctacgaatacagatggaagagcgattcatggcttccaatccttccaaggtctcctatcagccaatcactactactttaaaacgaaaacaagaggaagtatctgctgtcattattcagcgtgcttacagacgccaccttttaaagcgaactgtaaaacaagcttcctttacgtacaataaaaacaaaatcaaaggtggggctaatcttcttataaaagaagacatgataattgacagaataaatgaaaactctattacagaaaaaactgatctgaccatgtccactgcagcttgtccaccttcctatgaccgggtgacaaagccaattgtggaaaaacatgagcaagaaggcaaagatgaaaaagccaaagggaaataaatgaaaataaataaaaataattgggtgacaaattgtttacagcctgtgaaggtgatgtatttttatcaacaggactcctttaggaggtcaatgccaaactgactgtttttacacaaatctccttaaggtcagtgcctacaataagacagtgaccccttgtcagcaaactgtgactctgtgtaaaggggagatgaccttgacaggaggttactgttctcactaccagctgacactgctgaagataagatgcacaatggctagtcagactgtagggaccagtttcaaggggtgcaaacctgtgattttggggttgtttaacatgaaacactttagtgtagtaattgtatccactgtttgcatttcaactgccacatttgtcacatttttatggaatctgttagtggattcatctttttgttaatccatgtgtttattatatgtgactatttttgtaaacgaagtttctgttgagaaataggctaaggacctctataacaggtatgccacctggggggtatggcaaccacatggccctcccagctacacaaagtcgtggtttgcatgagggcatgctgcacttagagatcatgcatgagaaaaagtcacaagaaaaacaaattcttaaatttcaccatatttctgggaggggtaattgggtgataagtggaggtgctttgttgatcttgttttgcgaaatccagcccctagaccaagtagattatttgtgggtaggccagtaaatcttagcaggtgcaaacttcattcaaatgtttggagtcataaatgttatgtttctttttgttgtattaaaaaaaaaacctgaatagtgaatattgcccctcaccctccaccgccagaagactgaattgaccaaaattactctttataaatttctgctttttcctgcactttgtttagccatcttcggctctcagcaaggttgacactgtatatgttaatgaaatgctatttattatgtaaatagtcattttaccctgtggtgcacgtttgagcaaacaaataatgacctaagcacagtatttattgcatcaaatatgtaccacaagaaatgtagagtgcaagctttacacaggtaataaaatgtattctgtaccatttatagatagtttggatgctatcaatgcatgtttatattaccatgctgctgtatctggtttctctcactgctcagaatctcatttatgagaaaccatatgtcagtggtaaagtcaaggaaattgttcaacagatctcatttatttaagtcattaagcaatagtttgcagcactttaacagctttttggttatttttacattttaagtggataacatatggtatatagccagactgtacagacatgtttaaaaaaacacactgcttaacctattaaatatgtgtttagaattttataagcaaatataaatactgtaaaaagtcactttattttatttttcagcattatgtacataaatatgaagaggaaattatcttcaggttgatatcacaatcacttttcttactttctgtccatagtactttttcatgaaagaaatttgctaaataagacatgaaaacaagactgggtagttgtagatttctgctttttaaattacatttgctaattttagattatttcacaattttaaggagcaaaataggttcacgattcatatccaaattatgctttgcaattggaaaagggtttaaaattttatttatatttctggtagtacctgcactaactgaattgaaggtagtgcttatgttatttttgttctttttttctgacttcggtttatgttttcatttctttggagtaatgctgctctagattgttctaaatagaatgtgggcttcataatttttttttccacaaaaacagagtagtcaacttatatagtcaattacatcaggacattttgtgtttcttacagaagcaaaccataggctcctcttttccttaaaactacttagataaactgtattcgtgaactgcatgctggaaaatgctactattatgctaaataatgctaaccaacatttaaaatgtgcaaaactaataaagattacattttttatttta

SEQ ID NO: 182660 - DNA, 1451 bp, Homo sapiens
  Payload ID: 15990
  Gene Symbol: SCN1B
  Gene Name: sodium channel, voltage gated, type I beta subunit
  Uniprot ID: Q07699
  ENST ID: ENST00000262631
  CDS Start-End: 138-794
ctcgccggtcccagagccgcagctgctgcgcccgcgcgctcccggggacattctaaccgccgccaggtcccgccgcctctcgccccgctattaataccggcggcccgggaggggggcgcagcacgcgccgcgcagccatggggaggctgctggccttagtggtcggcgcggcactggtgtcctcagcctgcgggggctgcgtggaggtggactcggagaccgaggccgtgtatgggatgaccttcaaaattctttgcatctcctgcaagcgccgcagcgagaccaacgctgagaccttcaccgagtggaccttccgccagaagggcactgaggagtttgtcaagatcctgcgctatgagaatgaggtgttgcagctggaggaggatgagcgcttcgagggccgcgtggtgtggaatggcagccggggcaccaaagacctgcaggatctgtctatcttcatcaccaatgtcacctacaaccactcgggcgactacgagtgccacgtctaccgcctgctcttcttcgaaaactacgagcacaacaccagcgtcgtcaagaagatccacattgaggtagtggacaaagccaacagagacatggcatccatcgtgtctgagatcatgatgtatgtgctcattgtggtgttgaccatatggctcgtggcagagatgatttactgctacaagaagatcgctgccgccacggagactgctgcacaggagaatgcctcggaatacctggccatcacctctgaaagcaaagagaactgcacgggcgtccaggtggccgaatagccctggccctgggccccgcctcaaggaagagccagccgtaatggggactctccaggcaccgcctgcccccagcgtgggggtggccactcctgggccccagaaagcctcagagtcctgccgacggagccactggggtgggagggggcagggggcttggctcgcacccccactttcgcctcctccagctcctgccccgccggccgcgcaccgccatgcatgatgggtaaagcaatactgccgctgcccccaccctgcttctgctgcctgtttggggaggggggcggtgaggtgggggcagcggccccgcacccctcctccttgctgatttgcacacattggccgcttcagacacgcacttctggggccagcccctccccgcctcctccctgcctggcggcaggggtcgcgatgatgggctggagcagtttggggcagggggttctgggacccactccgactccccctccccggcatcatttcccctcccgcttcctccggctggacctggggtcccccctccctgtaatgcactcctgccccggcccaacctcgccctctctcaccagccttgaactgtggccacctagaaaggggcccattcagcctcgtctctttacagaagtagttttgttcatgaaataaagactcttggacttg

SEQ ID NO: 182661 - DNA, 979 bp, Homo sapiens
  Payload ID: 15990
  Gene Symbol: SCN1B
  Gene Name: sodium channel, voltage gated, type I beta subunit
  Uniprot ID: Q07699
  ENST ID: ENST00000415950
  CDS Start-End: 1-807
atggggaggctgctggccttagtggtcggcgcggcactggtgtcctcagcctgcgggggctgcgtggaggtggactcggagaccgaggccgtgtatgggatgaccttcaaaattctttgcatctcctgcaagcgccgcagcgagaccaacgctgagaccttcaccgagtggaccttccgccagaagggcactgaggagtttgtcaagatcctgcgctatgagaatgaggtgttgcagctggaggaggatgagcgcttcgagggccgcgtggtgtggaatggcagccggggcaccaaagacctgcaggatctgtctatcttcatcaccaatgtcacctacaaccactcgggcgactacgagtgccacgtctaccgcctgctcttcttcgaaaactacgagcacaacaccagcgtcgtcaagaagatccacattgaggtagtggacaaaggtgagtcgggtgctgcctgcccctttaccgtcacccaccggagagccagatggagggacagatggcaggcagtggacaggacaggctggctctgtgcctggccagccaaccgcccacagcagcgggctgagggggaggggagcagcccctcctgcccactccagctctggcctctgtttctctccagcccacggagaggtcaaagcatgcctgtcccccacagacgctccgggtacagaacccagctctgtcacctgtgctgtatgacctctggcaggtgccttctgtctctgagccaaagggttgtcctgggcttgcccgggataataatccgatgtgtttctcggggtgtggtttgagccattcttccatcatggggttcatgaggattgagcagctgcaggcacacgcctggcttccagcagagccttgcaggtggtggcgagggtggcggttcttactgttcgagtagctcagccctgctgccctctgtggtgatgaggcaagagagcgtgccacctagagcagagt

SEQ ID NO: 182662 - DNA, 814 bp, Homo sapiens
  Payload ID: 15990
  Gene Symbol: SCN1B
  Gene Name: sodium channel, voltage gated, type I beta subunit
  ENST ID: ENST00000595652
  CDS Start-End: 89-532
attctaaccgccgccaggtcccgccgcctctcgccccgctattaataccggcggcccgggaggggggcgcagcacgcgccgcgcagccatggggaggctgctggccttagtggtcggcgcggcactggtgtcctcagcctgcgggggctgcgtggaggtggactcggagaccgaggccgtgtatgggatgaccttcaaaattctttgcatctcctgcaagcgccgcagcgagaccaacgctgagaccttcaccgagtggaccttccgccagaagggcactgaggagtttgtcaagaagatccacattgaggtagtggacaaagccaacagagacatggcatccatcgtgtctgagatcatgatgtatgtgctcattgtggtgttgaccatatggctcgtggcagagatgatttactgctacaagaagatcgctgccgccacggagactgctgcacaggagaatgcctcggaatacctggccatcacctctgaaagcaaagagaactgcacgggcgtccaggtggccgaatagccctggccctgggccccgcctcaaggaagagccagccgtaatggggactctccaggcaccgcctgcccccagcgtgggggtggccactcctgggccccagaaagcctcagagtcctgccgacggagccactggggtgggagggggcagggggcttggctcgcacccccactttcgcctcctccagctcctgccccgccggccgcgcaccgccatgcatgatgggtaaagcaatactgccgctgcccccaccctgcttctgctgcctgtttggggaggggggc

SEQ ID NO: 182663 - DNA, 8660 bp, Homo sapiens
  Payload ID: 15991
  Gene Symbol: SCN2A
  Gene Name: sodium channel, voltage gated, type II alpha subunit
  Uniprot ID: Q99250
  ENST ID: ENST00000283256
  CDS Start-End: 157-6174
aaaaaaaagatttttttttttttaaagcatgatggaattttagctgcagtcttcttggtgccagcttatcaatcccaaactctgggtgtaaaagattctacagggcactttcttatgcaaggagctaaacagtgattaaaggagcaggatgaaaagatggcacagtcagtgctggtaccgccaggacctgacagcttccgcttctttaccagggaatcccttgctgctattgaacaacgcattgcagaagagaaagctaagagacccaaacaggaacgcaaggatgaggatgatgaaaatggcccaaagccaaacagtgacttggaagcaggaaaatctcttccatttatttatggagacattcctccagagatggtgtcagtgcccctggaggatctggacccctactatatcaataagaaaacgtttatagtattgaataaagggaaagcaatctctcgattcagtgccacccctgccctttacattttaactcccttcaaccctattagaaaattagctattaagattttggtacattctttattcaatatgctcattatgtgcacgattcttaccaactgtgtatttatgaccatgagtaaccctccagactggacaaagaatgtggagtatacctttacaggaatttatacttttgaatcacttattaaaatacttgcaaggggcttttgtttagaagatttcacatttttacgggatccatggaattggttggatttcacagtcattacttttgcatatgtgacagagtttgtggacctgggcaatgtctcagcgttgagaacattcagagttctccgagcattgaaaacaatttcagtcattccaggcctgaagaccattgtgggggccctgatccagtcagtgaagaagctttctgatgtcatgatcttgactgtgttctgtctaagcgtgtttgcgctaataggattgcagttgttcatgggcaacctacgaaataaatgtttgcaatggcctccagataattcttcctttgaaataaatatcacttccttctttaacaattcattggatgggaatggtactactttcaataggacagtgagcatatttaactgggatgaatatattgaggataaaagtcacttttattttttagaggggcaaaatgatgctctgctttgtggcaacagctcagatgcaggccagtgtcctgaaggatacatctgtgtgaaggctggtagaaaccccaactatggctacacgagctttgacacctttagttgggcctttttgtccttatttcgtctcatgactcaagacttctgggaaaacctttatcaactgacactacgtgctgctgggaaaacgtacatgatattttttgtgctggtcattttcttgggctcattctatctaataaatttgatcttggctgtggtggccatggcctatgaggaacagaatcaggccacattggaagaggctgaacagaaggaagctgaatttcagcagatgctcgaacagttgaaaaagcaacaagaagaagctcaggcggcagctgcagccgcatctgctgaatcaagagacttcagtggtgctggtgggataggagttttttcagagagttcttcagtagcatctaagttgagctccaaaagtgaaaaagagctgaaaaacagaagaaagaaaaagaaacagaaagaacagtctggagaagaagagaaaaatgacagagtccgaaaatcggaatctgaagacagcataagaagaaaaggtttccgtttttccttggaaggaagtaggctgacatatgaaaagagattttcttctccacaccagtccttactgagcatccgtggctcccttttctctccaagacgcaacagtagggcgagccttttcagcttcagaggtcgagcaaaggacattggctctgagaatgactttgctgatgatgagcacagcacctttgaggacaatgacagccgaagagactctctgttcgtgccgcacagacatggagaacggcgccacagcaatgtcagccaggccagccgtgcctccagggtgctccccatcctgcccatgaatgggaagatgcatagcgctgtggactgcaatggtgtggtctccctggtcgggggcccttctaccctcacatctgctgggcagctcctaccagagggcacaactactgaaacagaaataagaaagagacggtccagttcttatcatgtttccatggatttattggaagatcctacatcaaggcaaagagcaatgagtatagccagtattttgaccaacaccatggaagaacttgaagaatccagacagaaatgcccaccatgctggtataaatttgctaatatgtgtttgatttgggactgttgtaaaccatggttaaaggtgaaacaccttgtcaacctggttgtaatggacccatttgttgacctggccatcaccatctgcattgtcttaaatacactcttcatggctatggagcactatcccatgacggagcagttcagcagtgtactgtctgttggaaacctggtcttcacagggatcttcacagcagaaatgtttctcaagataattgccatggatccatattattactttcaagaaggctggaatatttttgatggttttattgtgagccttagtttaatggaacttggtttggcaaatgtggaaggattgtcagttctccgatcattccggctgctccgagttttcaagttggcaaaatcttggccaactctaaatatgctaattaagatcattggcaattctgtgggggctctaggaaacctcaccttggtattggccatcatcgtcttcatttttgctgtggtcggcatgcagctctttggtaagagctacaaagaatgtgtctgcaagatttccaatgattgtgaactcccacgctggcacatgcatgactttttccactccttcctgatcgtgttccgcgtgctgtgtggagagtggatagagaccatgtgggactgtatggaggtcgctggccaaaccatgtgccttactgtcttcatgatggtcatggtgattggaaatctagtggttctgaacctcttcttggccttgcttttgagttccttcagttctgacaatcttgctgccactgatgatgataacgaaatgaataatctccagattgctgtgggaaggatgcagaaaggaatcgattttgttaaaagaaaaatacgtgaatttattcagaaagcctttgttaggaagcagaaagctttagatgaaattaaaccgcttgaagatctaaataataaaaaagacagctgtatttccaaccataccaccatagaaataggcaaagacctcaattatctcaaagacggaaatggaactactagtggcataggcagcagtgtagaaaaatatgtcgtggatgaaagtgattacatgtcatttataaacaaccctagcctcactgtgacagtaccaattgctgttggagaatctgactttgaaaatttaaatactgaagaattcagcagcgagtcagatatggaggaaagcaaagagaagctaaatgcaactagttcatctgaaggcagcacggttgatattggagctcccgccgagggagaacagcctgaggttgaacctgaggaatcccttgaacctgaagcctgttttacagaagactgtgtacggaagttcaagtgttgtcagataagcatagaagaaggcaaagggaaactctggtggaatttgaggaaaacatgctataagatagtggagcacaattggttcgaaaccttcattgtcttcatgattctgctgagcagtggggctctggcctttgaagatatatacattgagcagcgaaaaaccattaagaccatgttagaatatgctgacaaggttttcacttacatattcattctggaaatgctgctaaagtgggttgcatatggttttcaagtgtattttaccaatgcctggtgctggctagacttcctgattgttgatgtctcactggttagcttaactgcaaatgccttgggttactcagaacttggtgccatcaaatccctcagaacactaagagctctgaggccactgagagctttgtcccggtttgaaggaatgagggttgttgtaaatgctcttttaggagccattccatctatcatgaatgtacttctggtttgtctgatcttttggctaatattcagtatcatgggagtgaatctctttgctggcaagttttaccattgtattaattacaccactggagagatgtttgatgtaagcgtggtcaacaactacagtgagtgcaaagctctcattgagagcaatcaaactgccaggtggaaaaatgtgaaagtaaactttgataacgtaggacttggatatctgtctctacttcaagtagccacgtttaagggatggatggatattatgtatgcagctgttgattcacgaaatgtagaattacaacccaagtatgaagacaacctgtacatgtatctttattttgtcatctttattatttttggttcattctttaccttgaatcttttcattggtgtcatcatagataacttcaaccaacagaaaaagaagtttggaggtcaagacatttttatgacagaagaacagaagaaatactacaatgcaatgaaaaaactgggttcaaagaaaccacaaaaacccatacctcgacctgctaacaaattccaaggaatggtctttgattttgtaaccaaacaagtctttgatatcagcatcatgatcctcatctgccttaacatggtcaccatgatggtggaaaccgatgaccagagtcaagaaatgacaaacattctgtactggattaatctggtgtttattgttctgttcactggagaatgtgtgctgaaactgatctctcttcgttactactatttcactattggatggaatatttttgattttgtggtggtcattctctccattgtaggaatgtttctggctgaactgatagaaaagtattttgtgtcccctaccctgttccgagtgatccgtcttgccaggattggccgaatcctacgtctgatcaaaggagcaaaggggatccgcacgctgctctttgctttgatgatgtcccttcctgcgttgtttaacatcggcctccttcttttcctggtcatgttcatctacgccatctttgggatgtccaattttgcctatgttaagagggaagttgggatcgatgacatgttcaactttgagacctttggcaacagcatgatctgcctgttccaaattacaacctctgctggctgggatggattgctagcacctattcttaatagtggacctccagactgtgaccctgacaaagatcaccctggaagctcagttaaaggagactgtgggaacccatctgttgggattttcttttttgtcagttacatcatcatatccttcctggttgtggtgaacatgtacatcgcggtcatcctggagaacttcagtgttgctactgaagaaagtgcagagcctctgagtgaggatgactttgagatgttctatgaggtttgggagaagtttgatcccgatgcgacccagtttatagagtttgccaaactttctgattttgcagatgccctggatcctcctcttctcatagcaaaacccaacaaagtccagctcattgccatggatctgcccatggtgagtggtgaccggatccactgtcttgacatcttatttgcttttacaaagcgtgttttgggtgagagtggagagatggatgcccttcgaatacagatggaagagcgattcatggcatcaaacccctccaaagtctcttatgagcccattacgaccacgttgaaacgcaaacaagaggaggtgtctgctattattatccagagggcttacagacgctacctcttgaagcaaaaagttaaaaaggtatcaagtatatacaagaaagacaaaggcaaagaatgtgatggaacacccatcaaagaagatactctcattgataaactgaatgagaattcaactccagagaaaaccgatatgacgccttccaccacgtctccaccctcgtatgatagtgtgaccaaaccagaaaaagaaaaatttgaaaaagacaaatcagaaaaggaagacaaagggaaagatatcagggaaagtaaaaagtaaaaagaaaccaagaattttccattttgtgatcaattgtttacagcccgtgatggtgatgtgtttgtgtcaacaggactcccacaggaggtctatgccaaactgactgtttttacaaatgtatacttaaggtcagtgcctataacaagacagagacctctggtcagcaaactggaactcagtaaactggagaaatagtatcgatgggaggtttctattttcacaaccagctgacactgctgaagagcagaggcgtaatggctactcagacgataggaaccaatttaaaggggggagggaagttaaatttttatgtaaattcaacatgtgacacttgataatagtaattgtcaccagtgtttatgttttaactgccacacctgccatatttttacaaaacgtgtgctgtgaatttatcacttttctttttaattcacaggttgtttactattatatgtgactatttttgtaaatgggtttgtgtttggggagagggattaaagggagggaattctacatttctctattgtattgtataactggatatattttaaatggaggcatgctgcaattctcattcacacataaaaaaatcacatcacaaaagggaagagtttacttcttgtttcaggatgtttttagatttttgaggtgcttaaatagctattcgtatttttaaggtgtctcatccagaaaaaatttaatgtgcctgtaaatgttccatagaatcacaagcattaaagagttgttttatttttacataacccattaaatgtacatgtatatatgtatatatgtatatgtgcgtgtatatacatatatatgtatacacacatgcacacacagagatatacacataccattacattgtcattcacagtcccagcagcatgactatcacatttttgataagtgtcctttggcataaaataaaaatatcctatcagtcctttctaagaagcctgaattgaccaaaaaacatccccaccaccactttataaagttgattctgctttatcctgcagtattgtttagccatcttctgctcttggtaaggttgacatagtatatgtcaatttaaaaaataaaagtctgctttgtaaatagtaattttacccagtggtgcatgtttgagcaaacaaaaatgatgatttaagcacactacttattgcatcaaatatgtaccacagtaagtatagtttgcaagctttcaacaggtaatatgatgtaattggttccattatagtttgaagctgtcactgctgcatgtttatcttgcctatgctgctgtatcttattccttccactgttcagaagtctaatatgggaagccatatatcagtggtaaagtgaagcaaattgttctaccaagacctcattcttcatgtcattaagcaataggttgcagcaaacaaggaagagcttcttgctttttattcttccaaccttaattgaacactcaatgatgaaaagcccgactgtacaaacatgttgcaagctgcttaaatctgtttaaaatatatggttagagttttctaagaaaatataaatactgtaaaaagttcattttattttatttttcagccttttgtacgtaaaatgagaaattaaaagtatcttcaggtggatgtcacagtcactattgttagtttctgttcctagcacttttaaattgaagcacttcacaaaataagaagcaaggactaggatgcagtgtaggtttctgcttttttattagtactgtaaacttgcacacatttcaatgtgaaacaaatctcaaactgagttcaatgtttatttgctttcaatagtaatgccttatcattgaaagaggcttaaagaaaaaaaaaatcagctgatactcttggcattgcttgaatccaatgtttccacctagtctttttattcagtaatcatcagtcttttccaatgtttgtttacacagatagatcttattgacccatatggcactagaactgtatcagatataatatgggatcccagctttttttcctctcccacaaaaccaggtagtgaagttatattaccagttacagcaaaatactttgtgtttcacaagcaacaataaatgtagattctttatactgaagctattgacttgtagtgtgttggtgaaatgcatgcaggaaaatgctgttaccataaagaacggtaaaccacattacaatcaagccaaaagaataaaggtttcgcttttgtttttgtatttaattgttgtctttgtttctatctttgaaatgccatttaaaggtagatttctatcatgtaaaaataatctatctgaaaaacaaatgtaaagaacacacattaattactataattcatctttcaattttttcatggaatggaagttaattaagaagagtgtattggataactactttaatattggccaaaaagctagatatggcatcaggtagactagtggaaagttacaaaaattaataaaaaattgactaacattttaa

SEQ ID NO: 182664 - DNA, 8553 bp, Homo sapiens
  Payload ID: 15991
  Gene Symbol: SCN2A
  Gene Name: sodium channel, voltage gated, type II alpha subunit
  Uniprot ID: Q99250
  ENST ID: ENST00000375427
  CDS Start-End: 52-6069
cactttcttatgcaaggagctaaacagtgattaaaggagcaggatgaaaagatggcacagtcagtgctggtaccgccaggacctgacagcttccgcttctttaccagggaatcccttgctgctattgaacaacgcattgcagaagagaaagctaagagacccaaacaggaacgcaaggatgaggatgatgaaaatggcccaaagccaaacagtgacttggaagcaggaaaatctcttccatttatttatggagacattcctccagagatggtgtcagtgcccctggaggatctggacccctactatatcaataagaaaacgtttatagtattgaataaagggaaagcaatctctcgattcagtgccacccctgccctttacattttaactcccttcaaccctattagaaaattagctattaagattttggtacattctttattcaatatgctcattatgtgcacgattcttaccaactgtgtatttatgaccatgagtaaccctccagactggacaaagaatgtggagtatacctttacaggaatttatacttttgaatcacttattaaaatacttgcaaggggcttttgtttagaagatttcacatttttacgggatccatggaattggttggatttcacagtcattacttttgcgtatgtaacagaatttgtaaacctaggcaatgtttcagctcttcgaactttcagagtcttgagagctttgaaaactatttctgtaattccaggcctgaagaccattgtgggggccctgatccagtcagtgaagaagctttctgatgtcatgatcttgactgtgttctgtctaagcgtgtttgcgctaataggattgcagttgttcatgggcaacctacgaaataaatgtttgcaatggcctccagataattcttcctttgaaataaatatcacttccttctttaacaattcattggatgggaatggtactactttcaataggacagtgagcatatttaactgggatgaatatattgaggataaaagtcacttttattttttagaggggcaaaatgatgctctgctttgtggcaacagctcagatgcaggccagtgtcctgaaggatacatctgtgtgaaggctggtagaaaccccaactatggctacacgagctttgacacctttagttgggcctttttgtccttatttcgtctcatgactcaagacttctgggaaaacctttatcaactgacactacgtgctgctgggaaaacgtacatgatattttttgtgctggtcattttcttgggctcattctatctaataaatttgatcttggctgtggtggccatggcctatgaggaacagaatcaggccacattggaagaggctgaacagaaggaagctgaatttcagcagatgctcgaacagttgaaaaagcaacaagaagaagctcaggcggcagctgcagccgcatctgctgaatcaagagacttcagtggtgctggtgggataggagttttttcagagagttcttcagtagcatctaagttgagctccaaaagtgaaaaagagctgaaaaacagaagaaagaaaaagaaacagaaagaacagtctggagaagaagagaaaaatgacagagtccgaaaatcggaatctgaagacagcataagaagaaaaggtttccgtttttccttggaaggaagtaggctgacatatgaaaagagattttcttctccacaccagtccttactgagcatccgtggctcccttttctctccaagacgcaacagtagggcgagccttttcagcttcagaggtcgagcaaaggacattggctctgagaatgactttgctgatgatgagcacagcacctttgaggacaatgacagccgaagagactctctgttcgtgccgcacagacatggagaacggcgccacagcaatgtcagccaggccagccgtgcctccagggtgctccccatcctgcccatgaatgggaagatgcatagcgctgtggactgcaatggtgtggtctccctggtcgggggcccttctaccctcacatctgctgggcagctcctaccagagggcacaactactgaaacagaaataagaaagagacggtccagttcttatcatgtttccatggatttattggaagatcctacatcaaggcaaagagcaatgagtatagccagtattttgaccaacaccatggaagaacttgaagaatccagacagaaatgcccaccatgctggtataaatttgctaatatgtgtttgatttgggactgttgtaaaccatggttaaaggtgaaacaccttgtcaacctggttgtaatggacccatttgttgacctggccatcaccatctgcattgtcttaaatacactcttcatggctatggagcactatcccatgacggagcagttcagcagtgtactgtctgttggaaacctggtcttcacagggatcttcacagcagaaatgtttctcaagataattgccatggatccatattattactttcaagaaggctggaatatttttgatggttttattgtgagccttagtttaatggaacttggtttggcaaatgtggaaggattgtcagttctccgatcattccggctgctccgagttttcaagttggcaaaatcttggccaactctaaatatgctaattaagatcattggcaattctgtgggggctctaggaaacctcaccttggtattggccatcatcgtcttcatttttgctgtggtcggcatgcagctctttggtaagagctacaaagaatgtgtctgcaagatttccaatgattgtgaactcccacgctggcacatgcatgactttttccactccttcctgatcgtgttccgcgtgctgtgtggagagtggatagagaccatgtgggactgtatggaggtcgctggccaaaccatgtgccttactgtcttcatgatggtcatggtgattggaaatctagtggttctgaacctcttcttggccttgcttttgagttccttcagttctgacaatcttgctgccactgatgatgataacgaaatgaataatctccagattgctgtgggaaggatgcagaaaggaatcgattttgttaaaagaaaaatacgtgaatttattcagaaagcctttgttaggaagcagaaagctttagatgaaattaaaccgcttgaagatctaaataataaaaaagacagctgtatttccaaccataccaccatagaaataggcaaagacctcaattatctcaaagacggaaatggaactactagtggcataggcagcagtgtagaaaaatatgtcgtggatgaaagtgattacatgtcatttataaacaaccctagcctcactgtgacagtaccaattgctgttggagaatctgactttgaaaatttaaatactgaagaattcagcagcgagtcagatatggaggaaagcaaagagaagctaaatgcaactagttcatctgaaggcagcacggttgatattggagctcccgccgagggagaacagcctgaggttgaacctgaggaatcccttgaacctgaagcctgttttacagaagactgtgtacggaagttcaagtgttgtcagataagcatagaagaaggcaaagggaaactctggtggaatttgaggaaaacatgctataagatagtggagcacaattggttcgaaaccttcattgtcttcatgattctgctgagcagtggggctctggcctttgaagatatatacattgagcagcgaaaaaccattaagaccatgttagaatatgctgacaaggttttcacttacatattcattctggaaatgctgctaaagtgggttgcatatggttttcaagtgtattttaccaatgcctggtgctggctagacttcctgattgttgatgtctcactggttagcttaactgcaaatgccttgggttactcagaacttggtgccatcaaatccctcagaacactaagagctctgaggccactgagagctttgtcccggtttgaaggaatgagggttgttgtaaatgctcttttaggagccattccatctatcatgaatgtacttctggtttgtctgatcttttggctaatattcagtatcatgggagtgaatctctttgctggcaagttttaccattgtattaattacaccactggagagatgtttgatgtaagcgtggtcaacaactacagtgagtgcaaagctctcattgagagcaatcaaactgccaggtggaaaaatgtgaaagtaaactttgataacgtaggacttggatatctgtctctacttcaagtagccacgtttaagggatggatggatattatgtatgcagctgttgattcacgaaatgtagaattacaacccaagtatgaagacaacctgtacatgtatctttattttgtcatctttattatttttggttcattctttaccttgaatcttttcattggtgtcatcatagataacttcaaccaacagaaaaagaagtttggaggtcaagacatttttatgacagaagaacagaagaaatactacaatgcaatgaaaaaactgggttcaaagaaaccacaaaaacccatacctcgacctgctaacaaattccaaggaatggtctttgattttgtaaccaaacaagtctttgatatcagcatcatgatcctcatctgccttaacatggtcaccatgatggtggaaaccgatgaccagagtcaagaaatgacaaacattctgtactggattaatctggtgtttattgttctgttcactggagaatgtgtgctgaaactgatctctcttcgttactactatttcactattggatggaatatttttgattttgtggtggtcattctctccattgtaggaatgtttctggctgaactgatagaaaagtattttgtgtcccctaccctgttccgagtgatccgtcttgccaggattggccgaatcctacgtctgatcaaaggagcaaaggggatccgcacgctgctctttgctttgatgatgtcccttcctgcgttgtttaacatcggcctccttcttttcctggtcatgttcatctacgccatctttgggatgtccaattttgcctatgttaagagggaagttgggatcgatgacatgttcaactttgagacctttggcaacagcatgatctgcctgttccaaattacaacctctgctggctgggatggattgctagcacctattcttaatagtggacctccagactgtgaccctgacaaagatcaccctggaagctcagttaaaggagactgtgggaacccatctgttgggattttcttttttgtcagttacatcatcatatccttcctggttgtggtgaacatgtacatcgcggtcatcctggagaacttcagtgttgctactgaagaaagtgcagagcctctgagtgaggatgactttgagatgttctatgaggtttgggagaagtttgatcccgatgcgacccagtttatagagtttgccaaactttctgattttgcagatgccctggatcctcctcttctcatagcaaaacccaacaaagtccagctcattgccatggatctgcccatggtgagtggtgaccggatccactgtcttgacatcttatttgcttttacaaagcgtgttttgggtgagagtggagagatggatgcccttcgaatacagatggaagagcgattcatggcatcaaacccctccaaagtctcttatgagcccattacgaccacgttgaaacgcaaacaagaggaggtgtctgctattattatccagagggcttacagacgctacctcttgaagcaaaaagttaaaaaggtatcaagtatatacaagaaagacaaaggcaaagaatgtgatggaacacccatcaaagaagatactctcattgataaactgaatgagaattcaactccagagaaaaccgatatgacgccttccaccacgtctccaccctcgtatgatagtgtgaccaaaccagaaaaagaaaaatttgaaaaagacaaatcagaaaaggaagacaaagggaaagatatcagggaaagtaaaaagtaaaaagaaaccaagaattttccattttgtgatcaattgtttacagcccgtgatggtgatgtgtttgtgtcaacaggactcccacaggaggtctatgccaaactgactgtttttacaaatgtatacttaaggtcagtgcctataacaagacagagacctctggtcagcaaactggaactcagtaaactggagaaatagtatcgatgggaggtttctattttcacaaccagctgacactgctgaagagcagaggcgtaatggctactcagacgataggaaccaatttaaaggggggagggaagttaaatttttatgtaaattcaacatgtgacacttgataatagtaattgtcaccagtgtttatgttttaactgccacacctgccatatttttacaaaacgtgtgctgtgaatttatcacttttctttttaattcacaggttgtttactattatatgtgactatttttgtaaatgggtttgtgtttggggagagggattaaagggagggaattctacatttctctattgtattgtataactggatatattttaaatggaggcatgctgcaattctcattcacacataaaaaaatcacatcacaaaagggaagagtttacttcttgtttcaggatgtttttagatttttgaggtgcttaaatagctattcgtatttttaaggtgtctcatccagaaaaaatttaatgtgcctgtaaatgttccatagaatcacaagcattaaagagttgttttatttttacataacccattaaatgtacatgtatatatgtatatatgtatatgtgcgtgtatatacatatatatgtatacacacatgcacacacagagatatacacataccattacattgtcattcacagtcccagcagcatgactatcacatttttgataagtgtcctttggcataaaataaaaatatcctatcagtcctttctaagaagcctgaattgaccaaaaaacatccccaccaccactttataaagttgattctgctttatcctgcagtattgtttagccatcttctgctcttggtaaggttgacatagtatatgtcaatttaaaaaataaaagtctgctttgtaaatagtaattttacccagtggtgcatgtttgagcaaacaaaaatgatgatttaagcacactacttattgcatcaaatatgtaccacagtaagtatagtttgcaagctttcaacaggtaatatgatgtaattggttccattatagtttgaagctgtcactgctgcatgtttatcttgcctatgctgctgtatcttattccttccactgttcagaagtctaatatgggaagccatatatcagtggtaaagtgaagcaaattgttctaccaagacctcattcttcatgtcattaagcaataggttgcagcaaacaaggaagagcttcttgctttttattcttccaaccttaattgaacactcaatgatgaaaagcccgactgtacaaacatgttgcaagctgcttaaatctgtttaaaatatatggttagagttttctaagaaaatataaatactgtaaaaagttcattttattttatttttcagccttttgtacgtaaaatgagaaattaaaagtatcttcaggtggatgtcacagtcactattgttagtttctgttcctagcacttttaaattgaagcacttcacaaaataagaagcaaggactaggatgcagtgtaggtttctgcttttttattagtactgtaaacttgcacacatttcaatgtgaaacaaatctcaaactgagttcaatgtttatttgctttcaatagtaatgccttatcattgaaagaggcttaaagaaaaaaaaaatcagctgatactcttggcattgcttgaatccaatgtttccacctagtctttttattcagtaatcatcagtcttttccaatgtttgtttacacagatagatcttattgacccatatggcactagaactgtatcagatataatatgggatcccagctttttttcctctcccacaaaaccaggtagtgaagttatattaccagttacagcaaaatactttgtgtttcacaagcaacaataaatgtagattctttatactgaagctattgacttgtagtgtgttggtgaaatgcatgcaggaaaatgctgttaccataaagaacggtaaaccacattacaatcaagccaaaagaataaaggtttcgcttttgtttttgtatttaattgttgtctttgtttctatctttgaaatgccatttaaaggtagatttctatcatgtaaaaataatctatctgaaaaacaaatgtaaagaacacacattaattactataattcatctttcaattttttcatggaatggaagttaattaagaagagtgtattggataactactttaatattggccaaaaagctagatatggcatcaggtagactagtggaaagttacaaaaattaataaaaaattgactaacatttt

SEQ ID NO: 182665 - DNA, 8792 bp, Homo sapiens
  Payload ID: 15991
  Gene Symbol: SCN2A
  Gene Name: sodium channel, voltage gated, type II alpha subunit
  Uniprot ID: Q99250
  ENST ID: ENST00000375437
  CDS Start-End: 291-6308
atgctgttttctaacagacattgggtaccatcgaatgactgtcagaacagaaagctaaggcaaaggagggaggatgctgtggtcatcctttcttgtttttttcttctttaatgaggatagagcacatgtgagattttactttctactccagtaaaaattctgaagaattgcattggagactgttatattcaacacatacgtggattctgtgttatgatttacatttttctttatttcagcactttcttatgcaaggagctaaacagtgattaaaggagcaggatgaaaagatggcacagtcagtgctggtaccgccaggacctgacagcttccgcttctttaccagggaatcccttgctgctattgaacaacgcattgcagaagagaaagctaagagacccaaacaggaacgcaaggatgaggatgatgaaaatggcccaaagccaaacagtgacttggaagcaggaaaatctcttccatttatttatggagacattcctccagagatggtgtcagtgcccctggaggatctggacccctactatatcaataagaaaacgtttatagtattgaataaagggaaagcaatctctcgattcagtgccacccctgccctttacattttaactcccttcaaccctattagaaaattagctattaagattttggtacattctttattcaatatgctcattatgtgcacgattcttaccaactgtgtatttatgaccatgagtaaccctccagactggacaaagaatgtggagtatacctttacaggaatttatacttttgaatcacttattaaaatacttgcaaggggcttttgtttagaagatttcacatttttacgggatccatggaattggttggatttcacagtcattacttttgcatatgtgacagagtttgtggacctgggcaatgtctcagcgttgagaacattcagagttctccgagcattgaaaacaatttcagtcattccaggcctgaagaccattgtgggggccctgatccagtcagtgaagaagctttctgatgtcatgatcttgactgtgttctgtctaagcgtgtttgcgctaataggattgcagttgttcatgggcaacctacgaaataaatgtttgcaatggcctccagataattcttcctttgaaataaatatcacttccttctttaacaattcattggatgggaatggtactactttcaataggacagtgagcatatttaactgggatgaatatattgaggataaaagtcacttttattttttagaggggcaaaatgatgctctgctttgtggcaacagctcagatgcaggccagtgtcctgaaggatacatctgtgtgaaggctggtagaaaccccaactatggctacacgagctttgacacctttagttgggcctttttgtccttatttcgtctcatgactcaagacttctgggaaaacctttatcaactgacactacgtgctgctgggaaaacgtacatgatattttttgtgctggtcattttcttgggctcattctatctaataaatttgatcttggctgtggtggccatggcctatgaggaacagaatcaggccacattggaagaggctgaacagaaggaagctgaatttcagcagatgctcgaacagttgaaaaagcaacaagaagaagctcaggcggcagctgcagccgcatctgctgaatcaagagacttcagtggtgctggtgggataggagttttttcagagagttcttcagtagcatctaagttgagctccaaaagtgaaaaagagctgaaaaacagaagaaagaaaaagaaacagaaagaacagtctggagaagaagagaaaaatgacagagtccgaaaatcggaatctgaagacagcataagaagaaaaggtttccgtttttccttggaaggaagtaggctgacatatgaaaagagattttcttctccacaccagtccttactgagcatccgtggctcccttttctctccaagacgcaacagtagggcgagccttttcagcttcagaggtcgagcaaaggacattggctctgagaatgactttgctgatgatgagcacagcacctttgaggacaatgacagccgaagagactctctgttcgtgccgcacagacatggagaacggcgccacagcaatgtcagccaggccagccgtgcctccagggtgctccccatcctgcccatgaatgggaagatgcatagcgctgtggactgcaatggtgtggtctccctggtcgggggcccttctaccctcacatctgctgggcagctcctaccagagggcacaactactgaaacagaaataagaaagagacggtccagttcttatcatgtttccatggatttattggaagatcctacatcaaggcaaagagcaatgagtatagccagtattttgaccaacaccatggaagaacttgaagaatccagacagaaatgcccaccatgctggtataaatttgctaatatgtgtttgatttgggactgttgtaaaccatggttaaaggtgaaacaccttgtcaacctggttgtaatggacccatttgttgacctggccatcaccatctgcattgtcttaaatacactcttcatggctatggagcactatcccatgacggagcagttcagcagtgtactgtctgttggaaacctggtcttcacagggatcttcacagcagaaatgtttctcaagataattgccatggatccatattattactttcaagaaggctggaatatttttgatggttttattgtgagccttagtttaatggaacttggtttggcaaatgtggaaggattgtcagttctccgatcattccggctgctccgagttttcaagttggcaaaatcttggccaactctaaatatgctaattaagatcattggcaattctgtgggggctctaggaaacctcaccttggtattggccatcatcgtcttcatttttgctgtggtcggcatgcagctctttggtaagagctacaaagaatgtgtctgcaagatttccaatgattgtgaactcccacgctggcacatgcatgactttttccactccttcctgatcgtgttccgcgtgctgtgtggagagtggatagagaccatgtgggactgtatggaggtcgctggccaaaccatgtgccttactgtcttcatgatggtcatggtgattggaaatctagtggttctgaacctcttcttggccttgcttttgagttccttcagttctgacaatcttgctgccactgatgatgataacgaaatgaataatctccagattgctgtgggaaggatgcagaaaggaatcgattttgttaaaagaaaaatacgtgaatttattcagaaagcctttgttaggaagcagaaagctttagatgaaattaaaccgcttgaagatctaaataataaaaaagacagctgtatttccaaccataccaccatagaaataggcaaagacctcaattatctcaaagacggaaatggaactactagtggcataggcagcagtgtagaaaaatatgtcgtggatgaaagtgattacatgtcatttataaacaaccctagcctcactgtgacagtaccaattgctgttggagaatctgactttgaaaatttaaatactgaagaattcagcagcgagtcagatatggaggaaagcaaagagaagctaaatgcaactagttcatctgaaggcagcacggttgatattggagctcccgccgagggagaacagcctgaggttgaacctgaggaatcccttgaacctgaagcctgttttacagaagactgtgtacggaagttcaagtgttgtcagataagcatagaagaaggcaaagggaaactctggtggaatttgaggaaaacatgctataagatagtggagcacaattggttcgaaaccttcattgtcttcatgattctgctgagcagtggggctctggcctttgaagatatatacattgagcagcgaaaaaccattaagaccatgttagaatatgctgacaaggttttcacttacatattcattctggaaatgctgctaaagtgggttgcatatggttttcaagtgtattttaccaatgcctggtgctggctagacttcctgattgttgatgtctcactggttagcttaactgcaaatgccttgggttactcagaacttggtgccatcaaatccctcagaacactaagagctctgaggccactgagagctttgtcccggtttgaaggaatgagggttgttgtaaatgctcttttaggagccattccatctatcatgaatgtacttctggtttgtctgatcttttggctaatattcagtatcatgggagtgaatctctttgctggcaagttttaccattgtattaattacaccactggagagatgtttgatgtaagcgtggtcaacaactacagtgagtgcaaagctctcattgagagcaatcaaactgccaggtggaaaaatgtgaaagtaaactttgataacgtaggacttggatatctgtctctacttcaagtagccacgtttaagggatggatggatattatgtatgcagctgttgattcacgaaatgtagaattacaacccaagtatgaagacaacctgtacatgtatctttattttgtcatctttattatttttggttcattctttaccttgaatcttttcattggtgtcatcatagataacttcaaccaacagaaaaagaagtttggaggtcaagacatttttatgacagaagaacagaagaaatactacaatgcaatgaaaaaactgggttcaaagaaaccacaaaaacccatacctcgacctgctaacaaattccaaggaatggtctttgattttgtaaccaaacaagtctttgatatcagcatcatgatcctcatctgccttaacatggtcaccatgatggtggaaaccgatgaccagagtcaagaaatgacaaacattctgtactggattaatctggtgtttattgttctgttcactggagaatgtgtgctgaaactgatctctcttcgttactactatttcactattggatggaatatttttgattttgtggtggtcattctctccattgtaggaatgtttctggctgaactgatagaaaagtattttgtgtcccctaccctgttccgagtgatccgtcttgccaggattggccgaatcctacgtctgatcaaaggagcaaaggggatccgcacgctgctctttgctttgatgatgtcccttcctgcgttgtttaacatcggcctccttcttttcctggtcatgttcatctacgccatctttgggatgtccaattttgcctatgttaagagggaagttgggatcgatgacatgttcaactttgagacctttggcaacagcatgatctgcctgttccaaattacaacctctgctggctgggatggattgctagcacctattcttaatagtggacctccagactgtgaccctgacaaagatcaccctggaagctcagttaaaggagactgtgggaacccatctgttgggattttcttttttgtcagttacatcatcatatccttcctggttgtggtgaacatgtacatcgcggtcatcctggagaacttcagtgttgctactgaagaaagtgcagagcctctgagtgaggatgactttgagatgttctatgaggtttgggagaagtttgatcccgatgcgacccagtttatagagtttgccaaactttctgattttgcagatgccctggatcctcctcttctcatagcaaaacccaacaaagtccagctcattgccatggatctgcccatggtgagtggtgaccggatccactgtcttgacatcttatttgcttttacaaagcgtgttttgggtgagagtggagagatggatgcccttcgaatacagatggaagagcgattcatggcatcaaacccctccaaagtctcttatgagcccattacgaccacgttgaaacgcaaacaagaggaggtgtctgctattattatccagagggcttacagacgctacctcttgaagcaaaaagttaaaaaggtatcaagtatatacaagaaagacaaaggcaaagaatgtgatggaacacccatcaaagaagatactctcattgataaactgaatgagaattcaactccagagaaaaccgatatgacgccttccaccacgtctccaccctcgtatgatagtgtgaccaaaccagaaaaagaaaaatttgaaaaagacaaatcagaaaaggaagacaaagggaaagatatcagggaaagtaaaaagtaaaaagaaaccaagaattttccattttgtgatcaattgtttacagcccgtgatggtgatgtgtttgtgtcaacaggactcccacaggaggtctatgccaaactgactgtttttacaaatgtatacttaaggtcagtgcctataacaagacagagacctctggtcagcaaactggaactcagtaaactggagaaatagtatcgatgggaggtttctattttcacaaccagctgacactgctgaagagcagaggcgtaatggctactcagacgataggaaccaatttaaaggggggagggaagttaaatttttatgtaaattcaacatgtgacacttgataatagtaattgtcaccagtgtttatgttttaactgccacacctgccatatttttacaaaacgtgtgctgtgaatttatcacttttctttttaattcacaggttgtttactattatatgtgactatttttgtaaatgggtttgtgtttggggagagggattaaagggagggaattctacatttctctattgtattgtataactggatatattttaaatggaggcatgctgcaattctcattcacacataaaaaaatcacatcacaaaagggaagagtttacttcttgtttcaggatgtttttagatttttgaggtgcttaaatagctattcgtatttttaaggtgtctcatccagaaaaaatttaatgtgcctgtaaatgttccatagaatcacaagcattaaagagttgttttatttttacataacccattaaatgtacatgtatatatgtatatatgtatatgtgcgtgtatatacatatatatgtatacacacatgcacacacagagatatacacataccattacattgtcattcacagtcccagcagcatgactatcacatttttgataagtgtcctttggcataaaataaaaatatcctatcagtcctttctaagaagcctgaattgaccaaaaaacatccccaccaccactttataaagttgattctgctttatcctgcagtattgtttagccatcttctgctcttggtaaggttgacatagtatatgtcaatttaaaaaataaaagtctgctttgtaaatagtaattttacccagtggtgcatgtttgagcaaacaaaaatgatgatttaagcacactacttattgcatcaaatatgtaccacagtaagtatagtttgcaagctttcaacaggtaatatgatgtaattggttccattatagtttgaagctgtcactgctgcatgtttatcttgcctatgctgctgtatcttattccttccactgttcagaagtctaatatgggaagccatatatcagtggtaaagtgaagcaaattgttctaccaagacctcattcttcatgtcattaagcaataggttgcagcaaacaaggaagagcttcttgctttttattcttccaaccttaattgaacactcaatgatgaaaagcccgactgtacaaacatgttgcaagctgcttaaatctgtttaaaatatatggttagagttttctaagaaaatataaatactgtaaaaagttcattttattttatttttcagccttttgtacgtaaaatgagaaattaaaagtatcttcaggtggatgtcacagtcactattgttagtttctgttcctagcacttttaaattgaagcacttcacaaaataagaagcaaggactaggatgcagtgtaggtttctgcttttttattagtactgtaaacttgcacacatttcaatgtgaaacaaatctcaaactgagttcaatgtttatttgctttcaatagtaatgccttatcattgaaagaggcttaaagaaaaaaaaaatcagctgatactcttggcattgcttgaatccaatgtttccacctagtctttttattcagtaatcatcagtcttttccaatgtttgtttacacagatagatcttattgacccatatggcactagaactgtatcagatataatatgggatcccagctttttttcctctcccacaaaaccaggtagtgaagttatattaccagttacagcaaaatactttgtgtttcacaagcaacaataaatgtagattctttatactgaagctattgacttgtagtgtgttggtgaaatgcatgcaggaaaatgctgttaccataaagaacggtaaaccacattacaatcaagccaaaagaataaaggtttcgcttttgtttttgtatttaattgttgtctttgtttctatctttgaaatgccatttaaaggtagatttctatcatgtaaaaataatctatctgaaaaacaaatgtaaagaacacacattaattactataattcatctttcaattttttcatggaatggaagttaattaagaagagtgtattggataactactttaatattggccaaaaagctagatatggcatcaggtagactagtggaaagttacaaaaattaataaaaaattgactaacatttt

SEQ ID NO: 182666 - DNA, 1807 bp, Homo sapiens
  Payload ID: 15991
  Gene Symbol: SCN2A
  Gene Name: sodium channel, voltage gated, type II alpha subunit
  ENST ID: ENST00000424833
  CDS Start-End: 291-1807
atgctgttttctaacagacattgggtaccatcgaatgactgtcagaacagaaagctaaggcaaaggagggaggatgctgtggtcatcctttcttgtttttttcttctttaatgaggatagagcacatgtgagattttactttctactccagtaaaaattctgaagaattgcattggagactgttatattcaacacatacgtggattctgtgttatgatttacatttttctttatttcagcactttcttatgcaaggagctaaacagtgattaaaggagcaggatgaaaagatggcacagtcagtgctggtaccgccaggacctgacagcttccgcttctttaccagggaatcccttgctgctattgaacaacgcattgcagaagagaaagctaagagacccaaacaggaacgcaaggatgaggatgatgaaaatggcccaaagccaaacagtgacttggaagcaggaaaatctcttccatttatttatggagacattcctccagagatggtgtcagtgcccctggaggatctggacccctactatatcaataagaaaacgtttatagtattgaataaagggaaagcaatctctcgattcagtgccacccctgccctttacattttaactcccttcaaccctattagaaaattagctattaagattttggtacattctttattcaatatgctcattatgtgcacgattcttaccaactgtgtatttatgaccatgagtaaccctccagactggacaaagaatgtggagtatacctttacaggaatttatacttttgaatcacttattaaaatacttgcaaggggcttttgtttagaagatttcacatttttacgggatccatggaattggttggatttcacagtcattacttttgcatatgtgacagagtttgtggacctgggcaatgtctcagcgttgagaacattcagagttctccgagcattgaaaacaatttcagtcattccaggcctgaagaccattgtgggggccctgatccagtcagtgaagaagctttctgatgtcatgatcttgactgtgttctgtctaagcgtgtttgcgctaataggattgcagttgttcatgggcaacctacgaaataaatgtttgcaatggcctccagataattcttcctttgaaataaatatcacttccttctttaacaattcattggatgggaatggtactactttcaataggacagtgagcatatttaactgggatgaatatattgaggataaaagtcacttttattttttagaggggcaaaatgatgctctgctttgtggcaacagctcagatgcaggccagtgtcctgaaggatacatctgtgtgaaggctggtagaaaccccaactatggctacacgagctttgacacctttagttgggcctttttgtccttatttcgtctcatgactcaagacttctgggaaaacctttatcaactgacactacgtgctgctgggaaaacgtacatgatattttttgtgctggtcattttcttgggctcattctatctaataaatttgatcttggctgtggtggccatggcctatgaggaacagaatcaggccacattggaagaggctgaacagaaggaagctgaatttcagcagatgctcgaacagttgaaaaagcaacaagaagaagctcaggcggcagctgcagccgcatctgctgaatcaagagacttcagtggtgctggtgggataggagttttttcagagagttcttcagtagcatctaagttgagctccaaaagtgaaaaagagctgaaaaacagaagaaa

SEQ ID NO: 182667 - DNA, 8430 bp, Homo sapiens
  Payload ID: 15991
  Gene Symbol: SCN2A
  Gene Name: sodium channel, voltage gated, type II alpha subunit
  Uniprot ID: Q99250
  ENST ID: ENST00000631182
  CDS Start-End: 205-6222
cctttcttgtttttttcttctttaatgaggatagagcacatgtgagattttactttctactccagtaaaaattctgaagaattgcattggagactgttatattcaacacatacgtggattctgtgttatgatttacatttttctttatttcagcactttcttatgcaaggagctaaacagtgattaaaggagcaggatgaaaagatggcacagtcagtgctggtaccgccaggacctgacagcttccgcttctttaccagggaatcccttgctgctattgaacaacgcattgcagaagagaaagctaagagacccaaacaggaacgcaaggatgaggatgatgaaaatggcccaaagccaaacagtgacttggaagcaggaaaatctcttccatttatttatggagacattcctccagagatggtgtcagtgcccctggaggatctggacccctactatatcaataagaaaacgtttatagtattgaataaagggaaagcaatctctcgattcagtgccacccctgccctttacattttaactcccttcaaccctattagaaaattagctattaagattttggtacattctttattcaatatgctcattatgtgcacgattcttaccaactgtgtatttatgaccatgagtaaccctccagactggacaaagaatgtggagtatacctttacaggaatttatacttttgaatcacttattaaaatacttgcaaggggcttttgtttagaagatttcacatttttacgggatccatggaattggttggatttcacagtcattacttttgcgtatgtaacagaatttgtaaacctaggcaatgtttcagctcttcgaactttcagagtcttgagagctttgaaaactatttctgtaattccaggcctgaagaccattgtgggggccctgatccagtcagtgaagaagctttctgatgtcatgatcttgactgtgttctgtctaagcgtgtttgcgctaataggattgcagttgttcatgggcaacctacgaaataaatgtttgcaatggcctccagataattcttcctttgaaataaatatcacttccttctttaacaattcattggatgggaatggtactactttcaataggacagtgagcatatttaactgggatgaatatattgaggataaaagtcacttttattttttagaggggcaaaatgatgctctgctttgtggcaacagctcagatgcaggccagtgtcctgaaggatacatctgtgtgaaggctggtagaaaccccaactatggctacacgagctttgacacctttagttgggcctttttgtccttatttcgtctcatgactcaagacttctgggaaaacctttatcaactgacactacgtgctgctgggaaaacgtacatgatattttttgtgctggtcattttcttgggctcattctatctaataaatttgatcttggctgtggtggccatggcctatgaggaacagaatcaggccacattggaagaggctgaacagaaggaagctgaatttcagcagatgctcgaacagttgaaaaagcaacaagaagaagctcaggcggcagctgcagccgcatctgctgaatcaagagacttcagtggtgctggtgggataggagttttttcagagagttcttcagtagcatctaagttgagctccaaaagtgaaaaagagctgaaaaacagaagaaagaaaaagaaacagaaagaacagtctggagaagaagagaaaaatgacagagtccgaaaatcggaatctgaagacagcataagaagaaaaggtttccgtttttccttggaaggaagtaggctgacatatgaaaagagattttcttctccacaccagtccttactgagcatccgtggctcccttttctctccaagacgcaacagtagggcgagccttttcagcttcagaggtcgagcaaaggacattggctctgagaatgactttgctgatgatgagcacagcacctttgaggacaatgacagccgaagagactctctgttcgtgccgcacagacatggagaacggcgccacagcaatgtcagccaggccagccgtgcctccagggtgctccccatcctgcccatgaatgggaagatgcatagcgctgtggactgcaatggtgtggtctccctggtcgggggcccttctaccctcacatctgctgggcagctcctaccagagggcacaactactgaaacagaaataagaaagagacggtccagttcttatcatgtttccatggatttattggaagatcctacatcaaggcaaagagcaatgagtatagccagtattttgaccaacaccatggaagaacttgaagaatccagacagaaatgcccaccatgctggtataaatttgctaatatgtgtttgatttgggactgttgtaaaccatggttaaaggtgaaacaccttgtcaacctggttgtaatggacccatttgttgacctggccatcaccatctgcattgtcttaaatacactcttcatggctatggagcactatcccatgacggagcagttcagcagtgtactgtctgttggaaacctggtcttcacagggatcttcacagcagaaatgtttctcaagataattgccatggatccatattattactttcaagaaggctggaatatttttgatggttttattgtgagccttagtttaatggaacttggtttggcaaatgtggaaggattgtcagttctccgatcattccggctgctccgagttttcaagttggcaaaatcttggccaactctaaatatgctaattaagatcattggcaattctgtgggggctctaggaaacctcaccttggtattggccatcatcgtcttcatttttgctgtggtcggcatgcagctctttggtaagagctacaaagaatgtgtctgcaagatttccaatgattgtgaactcccacgctggcacatgcatgactttttccactccttcctgatcgtgttccgcgtgctgtgtggagagtggatagagaccatgtgggactgtatggaggtcgctggccaaaccatgtgccttactgtcttcatgatggtcatggtgattggaaatctagtggttctgaacctcttcttggccttgcttttgagttccttcagttctgacaatcttgctgccactgatgatgataacgaaatgaataatctccagattgctgtgggaaggatgcagaaaggaatcgattttgttaaaagaaaaatacgtgaatttattcagaaagcctttgttaggaagcagaaagctttagatgaaattaaaccgcttgaagatctaaataataaaaaagacagctgtatttccaaccataccaccatagaaataggcaaagacctcaattatctcaaagacggaaatggaactactagtggcataggcagcagtgtagaaaaatatgtcgtggatgaaagtgattacatgtcatttataaacaaccctagcctcactgtgacagtaccaattgctgttggagaatctgactttgaaaatttaaatactgaagaattcagcagcgagtcagatatggaggaaagcaaagagaagctaaatgcaactagttcatctgaaggcagcacggttgatattggagctcccgccgagggagaacagcctgaggttgaacctgaggaatcccttgaacctgaagcctgttttacagaagactgtgtacggaagttcaagtgttgtcagataagcatagaagaaggcaaagggaaactctggtggaatttgaggaaaacatgctataagatagtggagcacaattggttcgaaaccttcattgtcttcatgattctgctgagcagtggggctctggcctttgaagatatatacattgagcagcgaaaaaccattaagaccatgttagaatatgctgacaaggttttcacttacatattcattctggaaatgctgctaaagtgggttgcatatggttttcaagtgtattttaccaatgcctggtgctggctagacttcctgattgttgatgtctcactggttagcttaactgcaaatgccttgggttactcagaacttggtgccatcaaatccctcagaacactaagagctctgaggccactgagagctttgtcccggtttgaaggaatgagggttgttgtaaatgctcttttaggagccattccatctatcatgaatgtacttctggtttgtctgatcttttggctaatattcagtatcatgggagtgaatctctttgctggcaagttttaccattgtattaattacaccactggagagatgtttgatgtaagcgtggtcaacaactacagtgagtgcaaagctctcattgagagcaatcaaactgccaggtggaaaaatgtgaaagtaaactttgataacgtaggacttggatatctgtctctacttcaagtagccacgtttaagggatggatggatattatgtatgcagctgttgattcacgaaatgtagaattacaacccaagtatgaagacaacctgtacatgtatctttattttgtcatctttattatttttggttcattctttaccttgaatcttttcattggtgtcatcatagataacttcaaccaacagaaaaagaagtttggaggtcaagacatttttatgacagaagaacagaagaaatactacaatgcaatgaaaaaactgggttcaaagaaaccacaaaaacccatacctcgacctgctaacaaattccaaggaatggtctttgattttgtaaccaaacaagtctttgatatcagcatcatgatcctcatctgccttaacatggtcaccatgatggtggaaaccgatgaccagagtcaagaaatgacaaacattctgtactggattaatctggtgtttattgttctgttcactggagaatgtgtgctgaaactgatctctcttcgttactactatttcactattggatggaatatttttgattttgtggtggtcattctctccattgtaggaatgtttctggctgaactgatagaaaagtattttgtgtcccctaccctgttccgagtgatccgtcttgccaggattggccgaatcctacgtctgatcaaaggagcaaaggggatccgcacgctgctctttgctttgatgatgtcccttcctgcgttgtttaacatcggcctccttcttttcctggtcatgttcatctacgccatctttgggatgtccaattttgcctatgttaagagggaagttgggatcgatgacatgttcaactttgagacctttggcaacagcatgatctgcctgttccaaattacaacctctgctggctgggatggattgctagcacctattcttaatagtggacctccagactgtgaccctgacaaagatcaccctggaagctcagttaaaggagactgtgggaacccatctgttgggattttcttttttgtcagttacatcatcatatccttcctggttgtggtgaacatgtacatcgcggtcatcctggagaacttcagtgttgctactgaagaaagtgcagagcctctgagtgaggatgactttgagatgttctatgaggtttgggagaagtttgatcccgatgcgacccagtttatagagtttgccaaactttctgattttgcagatgccctggatcctcctcttctcatagcaaaacccaacaaagtccagctcattgccatggatctgcccatggtgagtggtgaccggatccactgtcttgacatcttatttgcttttacaaagcgtgttttgggtgagagtggagagatggatgcccttcgaatacagatggaagagcgattcatggcatcaaacccctccaaagtctcttatgagcccattacgaccacgttgaaacgcaaacaagaggaggtgtctgctattattatccagagggcttacagacgctacctcttgaagcaaaaagttaaaaaggtatcaagtatatacaagaaagacaaaggcaaagaatgtgatggaacacccatcaaagaagatactctcattgataaactgaatgagaattcaactccagagaaaaccgatatgacgccttccaccacgtctccaccctcgtatgatagtgtgaccaaaccagaaaaagaaaaatttgaaaaagacaaatcagaaaaggaagacaaagggaaagatatcagggaaagtaaaaagtaaaaagaaaccaagaattttccattttgtgatcaattgtttacagcccgtgatggtgatgtgtttgtgtcaacaggactcccacaggaggtctatgccaaactgactgtttttacaaatgtatacttaaggtcagtgcctataacaagacagagacctctggtcagcaaactggaactcagtaaactggagaaatagtatcgatgggaggtttctattttcacaaccagctgacactgctgaagagcagaggcgtaatggctactcagacgataggaaccaatttaaaggggggagggaagttaaatttttatgtaaattcaacatgtgacacttgataatagtaattgtcaccagtgtttatgttttaactgccacacctgccatatttttacaaaacgtgtgctgtgaatttatcacttttctttttaattcacaggttgtttactattatatgtgactatttttgtaaatgggtttgtgtttggggagagggattaaagggagggaattctacatttctctattgtattgtataactggatatattttaaatggaggcatgctgcaattctcattcacacataaaaaaatcacatcacaaaagggaagagtttacttcttgtttcaggatgtttttagatttttgaggtgcttaaatagctattcgtatttttaaggtgtctcatccagaaaaaatttaatgtgcctgtaaatgttccatagaatcacaagcattaaagagttgttttatttttacataacccattaaatgtacatgtatatatgtatatatgtatatgtgcgtgtatatacatatatatgtatacacacatgcacacacagagatatacacataccattacattgtcattcacagtcccagcagcatgactatcacatttttgataagtgtcctttggcataaaataaaaatatcctatcagtcctttctaagaagcctgaattgaccaaaaaacatccccaccaccactttataaagttgattctgctttatcctgcagtattgtttagccatcttctgctcttggtaaggttgacatagtatatgtcaatttaaaaaataaaagtctgctttgtaaatagtaattttacccagtggtgcatgtttgagcaaacaaaaatgatgatttaagcacactacttattgcatcaaatatgtaccacagtaagtatagtttgcaagctttcaacaggtaatatgatgtaattggttccattatagtttgaagctgtcactgctgcatgtttatcttgcctatgctgctgtatcttattccttccactgttcagaagtctaatatgggaagccatatatcagtggtaaagtgaagcaaattgttctaccaagacctcattcttcatgtcattaagcaataggttgcagcaaacaaggaagagcttcttgctttttattcttccaaccttaattgaacactcaatgatgaaaagcccgactgtacaaacatgttgcaagctgcttaaatctgtttaaaatatatggttagagttttctaagaaaatataaatactgtaaaaagttcattttattttatttttcagccttttgtacgtaaaatgagaaattaaaagtatcttcaggtggatgtcacagtcactattgttagtttctgttcctagcacttttaaattgaagcacttcacaaaataagaagcaaggactaggatgcagtgtaggtttctgcttttttattagtactgtaaacttgcacacatttcaatgtgaaacaaatctcaaactgagttcaatgtttatttgctttcaatagtaatgccttatcattgaaagaggcttaaagaaaaaaaaaatcagctgatactcttggcattgcttgaatccaatgtttccacctagtctttttattcagtaatcatcagtcttttccaatgtttgtttacacagatagatcttattgacccatatggcactagaactgtatcagatataatatgggatcccagctttttttcctctcccacaaaaccaggtagtgaagttatattaccagttacagcaaaatactttgtgtttcacaagcaacaataaatgtagattctttatactgaagctattgacttgtagtgtgttggtgaaatgcatgcaggaaaatgctgttaccataaagaacggtaaaccacattacaatcaagccaaaagaataaaggttt

SEQ ID NO: 182668 - DNA, 661 bp, Homo sapiens
  Payload ID: 15991
  Gene Symbol: SCN2A
  Gene Name: sodium channel, voltage gated, type II alpha subunit
  ENST ID: ENST00000486878
  CDS Start-End: 1-537
tggacaaagaatgtggagtatacctttacaggaatttatacttttgaatcacttattaaaatacttgcaaggggcttttgtttagaagatttcacatttttacgggatccatggaattggttggatttcacagtcattacttttgcatatgtgacagagtttgtggacctgggcaatgtctcagcgttgagaacattcagagttctccgagcattgaaaacaatttcagtcattccaggcctgaagaccattgtgggggccctgatccagtcagtgaagaagctttctgatgtcatgatcttgactgtgttctgtctaagcgtgtttgcgctaataggattgcagttgttcatgggcaacctacgaaataaatgtttgcaatggcctccagataattcttcctttgaaataaatatcacttccttctttaacaattcattggatgggaatggtactactttcaataggacagtgagcatatttaactgggatgaatatattgaggataaaagtaagatatactctataaaccattaagttgtttagttctctaaatattaaatattatatataatggaaattatctcaatttagatgtgaatcaagtgacttagactaatttaagatgatttaatacatataaaagagatatcaaatgata

SEQ ID NO: 182669 - DNA, 5826 bp, Homo sapiens
  Payload ID: 15992
  Gene Symbol: SCN2B
  Gene Name: sodium channel, voltage gated, type II beta subunit
  Uniprot ID: O60939
  ENST ID: ENST00000278947
  CDS Start-End: 243-890
ttttctctcccccccatctctctctctctcctttacacactccctctctctctctttttagcagcaacatacaagccggccatattagagagatggaaataaagcttccttaatgttgtatatgtctttgaagtacatccgtgcatttttttttagcatccaaccattcctcccttgtagttctcgccccctcaaatcaccctctcccgtagcccacccgactaacatctcagtctctgaaaatgcacagagatgcctggctacctcgccctgccttcagcctcacggggctcagtctctttttctctttggtgccaccaggacggagcatggaggtcacagtacctgccaccctcaacgtcctcaatggctctgacgcccgcctgccctgcaccttcaactcctgctacacagtgaaccacaaacagttctccctgaactggacttaccaggagtgcaacaactgctctgaggagatgttcctccagttccgcatgaagatcattaacctgaagctggagcggtttcaagaccgcgtggagttctcagggaaccccagcaagtacgatgtgtcggtgatgctgagaaacgtgcagccggaggatgaggggatttacaactgctacatcatgaacccccctgaccgccaccgtggccatggcaagatccatctgcaggtcctcatggaagagccccctgagcgggactccacggtggccgtgattgtgggtgcctccgtcgggggcttcctggctgtggtcatcttggtgctgatggtggtcaagtgtgtgaggagaaaaaaagagcagaagctgagcacagatgacctgaagaccgaggaggagggcaagacggacggtgaaggcaacccggatgatggcgccaagtagtgggtggccggccctgcagcctcccgtgtcccgtctcctcccctctccgccctgtacagtgaccctgcctgctcgctcttggtgtgcttcccgtgacctaggaccccagggcccacctggggcctcctgaacccccgacttcgtatctcccaccctgcaccaagagtgacccactctcttccatccgagaaacctgccatgctctgggacgtgtgggccctggggagaggagagaaagggctcccacctgccagtccctggggggaggcaggaggcacatgtgagggtccccagagagaagggagtgggtgggcaggggtagaggagggggccgctgtccacctgcccagtgcttggcctggcagtggcttcagagaggacctggtggggagggagggctttcctgtgctgacagcgctccctcaggagggccttggcctggcacggctgtgctcctcccctgctcccagcccagagcagccatcaggctggaggtgacgatgagttcctgaaacttggaggggcatgttaaagggatgactgtgcattccagggcactgacggaaagccagggctgcaggcaaagctggacatgtgccctggcccaggaggccatgttgggccctcgtttccattgctagtggcctccttggggctcccgttggctcctaatcccttaggactgtggatgaggccagactggaagagcagctccaggtagggggccatgtttcccagcggggacccaccaacagaggccagtttcaaagtcagctgaggggctgaggggtggggctccatggtgaatgcaggttgctgcaggctctgccttctccatggggtaaccaccctcgcctgggcaggggcagccaaggctgggaaatgaggaggccatgcacagggtggggcagctttctttggggcttcagtgagaactctcccagttgcccttggtggggtttccacctggcttttggctacagagagggaagggaaagcctgaggccggcataaggggaggccttggaacctgagctgccaatgccagccctgtcccatctgcagccacactactcgctcctctcccaacaactcccttcgtggggacaaaagtgacaattgtaggccaggcacagtggctcacgcctgtaatcccagcactttgggaggccaaggcgggtggattacctccatctgtttagtagaaatgggcaaaaccccatctctactaaaaatacaagaattagctgggcgtggtggcgtgtgcctgtaatcccagctatttgggaggctgaggcaggagaatcgcttgagcccgggaagcagaggttgcagtgaactgagatagtgatagtgccactgcaattcagcctgggtgacatagagagactccatctcaaaaaaaaaaaaaaaaaaaaaaaaaggcaattgtgcggagccaaccatcactgccattacactcacattcaatggaaattgattaggcctgagagaaggagcaagaggcagaaacactgactctgagaccatgaccttggaagatcctcagagatcaactagccaagtcactcacttaaaatggggaaactgaggttccaactgacagaaactgagggtcctgccctcttctctggctcctcagtctccagtttgaagcaacagagccatcattttcccagtgggaggggcctctgtgtcctggtctatgatggggcgagttggaggggtgggcttctctagccctgccccctcccaggagcccagcccctctggccaggactgaggaggagtggagggaagcagggagggagggagcaagtgtgaagggcacagctgctggcaaatgccccattccctgccccagcacttcccagcctttccaggagctctgccccacccctactcaaggagtcaggtgcccagggtagggaataagtctaggaaagggggtggagacaggaccgtgacagtctcagggaccaatccctgcctctgcccatcagattgccaatttggggagacagcaatatcatctgggagattcagcttaatttgcttcaattcagcaaccatttattgagcatctattatgtgccaggcactgtgccgggcactggggatatacacaaagccataagcactggggactgccaggttggcactgtagggaccaagattaactttttggtgcatctaattccacctctgcaagacactgcttccaaggctacagttggggaagatgaagagattctagaatctgtgccctgggaagggagaaacagcagggaagaggggcaatacaacagggtcaagggtgcagaggccaggcagagtgggtgcagagtgggggatgggcaaccagcctggtaacacctgggtgaggtgagcgagtcaagcccatctggaaatgctaaactcatcagctcagtacctaactgccaatcaacacactgccaatgcgggtgggctaagccgccaggatgcctgcagcagatggacgctgcccatccttgagccagccagctgggggcagagaggtgggtggcgggcacctcatgccagctgagaccaagagtggttgtatacatttctgcagcttgcagatttcatttttttggtcaccctttaagtgtccttctctcccaggatgagtgaggagctgtgctgatgttgggaacttatctttttccaggatccataacatttaggggaattatttgcgggctttcctagtgtattctaagaagttctaactctccatcaagaagcccaagattcctggagtctttttttcctctgccctgatcaactggggcccaggaaaagcaatgtctcttcacgggcctcagggccccagcagatggggctgggtcaggaaccatctctgtcccaggtgctcagccctcatatgcattttcttctggagcctcttagaatctcctccagaggactcatagagctgcctcccccaggatggtgaagttgggagcaaaatggggcttctgtaagtagaggtggaaaaccagagagatgtttccacagcagccatttccctaccctgtttcctaacttatgctgacaagttcttcctcttcctaccgtggggttcgagccccacttctggttgcatgttcccaccaccacgctctgctggttttagtcggctgactttctcaactgccccagcctctcctgctctctcagaacctccctctgcccccaccccccatctgtctcttcctcctaattaagggccactgcaaagagagacgggctggctaacccatgggatttagcttataagaacaaagcacaattattcaggactgaactgctttgaggtgccttggaactggctttggaaatagctatctgccccctagctatggactcttcacagttatttccagtttataaaaaggaaaagctgatcggatccatgtttctctctgcgagtctccttggggaggttgggctggtaaatatttgcaaggtcaggttaagcagacagacaattgaaaatactgggcaggtccaaaaggatagttccaggccataggaatggcttggtgcagttaacgggtgatgaagcaagaaatcttccttcctacttatgtcttaaagatggacagcctgtgtctcttgctgtgcctcttgctggcgtcttcctttattgaagcttgctgatgcactgtacatagtctctctctctaggtatagatatattatatatacaaatatcaaacatctcaccacacccaccccaaaagttacactgtgtgtgtgtggggaggtgtaataacttctcagtgttttgagttgattcaccaaaggcaaattttggaatgttcttgcgctttgtgcacttggaggggaaaacccaactacatatgcactttcttggttgtgtgtgctatagagaggttggaaggggtggttggaaggggagagaaactgagatggccctctgtgactcgactgctgggatgtatctgcttttgggagcagactgagtttcttttgcaatttgtcttattgtttgggtctactggcaacaataaactatctcccctgaaaatccctcgagtgtggctttattcaggggttcagggcagggtaggctgatgcttcaccaggatcttaactggaaccctaggtgctcctttcctggtaatcccattggcgctgccagatctccagcatctgagggcctcaatgcccctgcctcacaaggggaaggttgtctaccccacacttgtgcccccacagatgtttcatccctttgccttccccaaccccctggggactccgctcaccctggaacagagtggctgaacacctacttcttggagggctctcgattattttggggatgaagacaaccccggaagctcccaaggctgactgtcatgcggatgttgcctgtcctttgcatgggcagacaggccatccttcctgctctgttccccaaaggtgttggattagacatttcttttgcctcctctggactcagaaagaatagatgacagctggtcagagtctgccctcatgcagttcatggagaagggtggctgtgggaaggttcaggtggctcatgtcccatctacatactgctggatcctatatatatgtgccaaagcagccctaagaagtttaggaccaagggcaacctcctggctaggggctccactgtcccagacaggcctttttttctcccttgctcttcattcttccgtctctttgcatttctccctctctcccttgcaccgctctctctctctctctctctctctctctgtctgtctgtctctctctctcttgcctaggaggcttaccaggcttaccttcctcttcctactctggggttcgagccccacttctggctgcatgctccggccaccacgctctggtggtttcagtctgctgactttct

SEQ ID NO: 182670 - DNA, 9091 bp, Homo sapiens
  Payload ID: 15993
  Gene Symbol: SCN3A
  Gene Name: sodium channel, voltage gated, type III alpha subunit
  Uniprot ID: Q9NY46
  ENST ID: ENST00000283254
  CDS Start-End: 469-6471
gaagcggaggcataagcagagaggattctggaaaggtctctttgttttcttatccacagagaaagaaagaaaaaaaattgtaactaatttgtaaacctctgtggtcaaaaaaaaaaaaaaaaaaaaaagctgaacagctgcagaggaagacacgttataccctaaccatcttggatgctgggctttgttatgctgtaattcataaggctctgttttatcagagattatggagcaagaaaactgaagccaagccacatcaaggtttgacagggatgagatacctgtcaaggattcatagtagagtggcttactgggaaaggagcaaagaatctcttctagggatattgtaagaataaatgagataattcacagaagggacctggagcttttccggaaaaaggtgctgtgactatctaaggtaattcgtatgcaagaagctacacgtaattaaatgtgcaggatgaaaagatggcacaggcactgttggtacccccaggacctgaaagcttccgcctttttactagagaatctcttgctgctatcgaaaaacgtgctgcagaagagaaagccaagaagcccaaaaaggaacaagataatgatgatgagaacaaaccaaagccaaatagtgacttggaagctggaaagaaccttccatttatttatggagacattcctccagagatggtgtcagagcccctggaggacctggatccctactatatcaataagaaaacttttatagtaatgaataaaggaaaggcaattttccgattcagtgccacctctgccttgtatattttaactccactaaaccctgttaggaaaattgctatcaagattttggtacattctttattcagcatgcttatcatgtgcactattttgaccaactgtgtatttatgaccttgagcaaccctcctgactggacaaagaatgtagagtacacattcactggaatctatacctttgagtcacttataaaaatcttggcaagagggttttgcttagaagattttacgtttcttcgtgatccatggaactggctggatttcagtgtcattgtgatggcatatgtgacagagtttgtggacctgggcaatgtctcagcgttgagaacattcagagttctccgagcactgaaaacaatttcagtcattccaggtttaaagaccattgtgggggccctgatccagtcggtaaagaagctttctgatgtgatgatcctgactgtgttctgtctgagcgtgtttgctctcattgggctgcagctgttcatgggcaatctgaggaataaatgtttgcagtggcccccaagcgattctgcttttgaaaccaacaccacttcctactttaatggcacaatggattcaaatgggacatttgttaatgtaacaatgagcacatttaactggaaggattacattggagatgacagtcacttttatgttttggatgggcaaaaagaccctttactctgtggaaatggctcagatgcaggccagtgtccagaaggatacatctgtgtgaaggctggtcgaaaccccaactatggctacacaagctttgacacctttagctgggctttcctgtctctatttcgactcatgactcaagactactgggaaaatctttaccagttgacattacgtgctgctgggaaaacatacatgatattttttgtcctggtcattttcttgggctcattttatttggtgaatttgatcctggctgtggtggccatggcctatgaggagcagaatcaggccaccttggaagaagcagaacaaaaagaggccgaatttcagcagatgctcgaacagcttaaaaagcaacaggaagaagctcaggcagttgcggcagcatcagctgcttcaagagatttcagtggaataggtgggttaggagagctgttggaaagttcttcagaagcatcaaagttgagttccaaaagtgctaaagaatggaggaaccgaaggaagaaaagaagacagagagagcaccttgaaggaaacaacaaaggagagagagacagctttcccaaatccgaatctgaagacagcgtcaaaagaagcagcttccttttctccatggatggaaacagactgaccagtgacaaaaaattctgctcccctcatcagtctctcttgagtatccgtggctccctgttttccccaagacgcaatagcaaaacaagcattttcagtttcagaggtcgggcaaaggatgttggatctgaaaatgactttgctgatgatgaacacagcacatttgaagacagcgaaagcaggagagactcactgtttgtgccgcacagacatggagagcgacgcaacagtaacgttagtcaggccagtatgtcatccaggatggtgccagggcttccagcaaatgggaagatgcacagcactgtggattgcaatggtgtggtttccttggtgggtggaccttcagctctaacgtcacctactggacaacttcccccagagggcaccaccacagaaacggaagtcagaaagagaaggttaagctcttaccagatttcaatggagatgctggaggattcctctggaaggcaaagagccgtgagcatagccagcattctgaccaacacaatggaagaacttgaagaatctagacagaaatgtccgccatgctggtatagatttgccaatgtgttcttgatctgggactgctgtgatgcatggttaaaagtaaaacatcttgtgaatttaattgttatggatccatttgttgatcttgccatcactatttgcattgtcttaaataccctctttatggccatggagcactaccccatgactgagcaattcagtagtgtgttgactgtaggaaacctggtctttactgggattttcacagcagaaatggttctcaagatcattgccatggatccttattactatttccaagaaggctggaatatctttgatggaattattgtcagcctcagtttaatggagcttggtctgtcaaatgtggagggattgtctgtactgcgatcattcagactgcttagagttttcaagttggcaaaatcctggcccacactaaatatgctaattaagatcattggcaattctgtgggggctctaggaaacctcaccttggtgttggccatcatcgtcttcatttttgctgtggtcggcatgcagctctttggtaagagctacaaagaatgtgtctgcaagatcaatgatgactgtacgctcccacggtggcacatgaacgacttcttccactccttcctgattgtgttccgcgtgctgtgtggagagtggatagagaccatgtgggactgtatggaggtcgctggccaaaccatgtgccttattgttttcatgttggtcatggtcattggaaaccttgtggttctgaacctctttctggccttattgttgagttcatttagctcagacaaccttgctgctactgatgatgacaatgaaatgaataatctgcagattgcagtaggaagaatgcaaaagggaattgattatgtgaaaaataagatgcgggagtgtttccaaaaagccttttttagaaagccaaaagttatagaaatccatgaaggcaataagatagacagctgcatgtccaataatactggaattgaaataagcaaagagcttaattatcttagagatgggaatggaaccaccagtggtgtaggtactggaagcagtgttgaaaaatacgtaatcgatgaaaatgattatatgtcattcataaacaaccccagcctcaccgtcacagtgccaattgctgttggagagtctgactttgaaaacttaaatactgaagagttcagcagtgagtcagaactagaagaaagcaaagagaaattaaatgcaaccagctcatctgaaggaagcacagttgatgttgttctaccccgagaaggtgaacaagctgaaactgaacccgaagaagaccttaaaccggaagcttgttttactgaaggatgtattaaaaagtttccattctgtcaagtaagtacagaagaaggcaaagggaagatctggtggaatcttcgaaaaacctgctacagtattgttgagcacaactggtttgagactttcattgtgttcatgatccttctcagtagtggtgcattggcctttgaagatatatacattgaacagcgaaagactatcaaaaccatgctagaatatgctgacaaagtctttacctatatattcattctggaaatgcttctcaaatgggttgcttatggatttcaaacatatttcactaatgcctggtgctggctagatttcttgatcgttgatgtttctttggttagcctggtagccaatgctcttggctactcagaactcggtgccatcaaatcattacggacattaagagctttaagacctctaagagccttatcccggtttgaaggcatgagggtggttgtgaatgctcttgttggagcaattccctctatcatgaatgtgctgttggtctgtctcatcttctggttgatctttagcatcatgggtgtgaatttgtttgctggcaagttctaccactgtgttaacatgacaacgggtaacatgtttgacattagtgatgttaacaatttgagtgactgtcaggctcttggcaagcaagctcggtggaaaaacgtgaaagtaaactttgataatgttggcgctggctatcttgcactgcttcaagtggccacatttaaaggctggatggatattatgtatgcagctgttgattcacgagatgttaaacttcagcctgtatatgaagaaaatctgtacatgtatttatactttgtcatctttatcatctttgggtcattcttcactctgaatctattcattggtgtcatcatagataacttcaaccagcagaaaaagaagtttggaggtcaagacatctttatgacagaggaacagaaaaaatattacaatgcaatgaagaaacttggatccaagaaacctcagaaacccatacctcgcccagcaaacaaattccaaggaatggtctttgattttgtaaccagacaagtctttgatatcagcatcatgatcctcatctgcctcaacatggtcaccatgatggtggaaacggatgaccagggcaaatacatgaccctagttttgtcccggatcaacctagtgttcattgttctgttcactggagaatttgtgctgaagctcgtctccctcagacactactacttcactataggctggaacatctttgactttgtggtggtgattctctccattgtaggtatgtttctggctgagatgatagaaaagtattttgtgtcccctaccttgttccgagtgatccgtcttgccaggattggccgaatcctacgtctgatcaaaggagcaaaggggatccgcacgctgctctttgctttgatgatgtcccttcctgcgttgtttaacatcggcctcctgctcttcctggtcatgtttatctatgccatctttgggatgtccaactttgcctatgttaaaaaggaagctggaattgatgacatgttcaactttgagacctttggcaacagcatgatctgcttgttccaaattacaacctctgctggctgggatggattgctagcacctattcttaatagtgcaccacccgactgtgaccctgacacaattcaccctggcagctcagttaagggagactgtgggaacccatctgttgggattttcttttttgtcagttacatcatcatatccttcctggttgtggtgaacatgtacatcgcggtcatcctggagaacttcagtgttgctactgaagaaagtgcagagcccctgagtgaggatgactttgagatgttctatgaggtttgggaaaagtttgatcccgatgcgacccagtttatagagttctctaaactctctgattttgcagctgccctggatcctcctcttctcatagcaaaacccaacaaagtccagcttattgccatggatctgcccatggtcagtggtgaccggatccactgtcttgatattttatttgcctttacaaagcgtgttttgggtgagagtggagagatggatgcccttcgaatacagatggaagacaggtttatggcatcaaacccctccaaagtctcttatgagcctattacaaccactttgaaacgtaaacaagaggaggtgtctgccgctatcattcagcgtaatttcagatgttatcttttaaagcaaaggttaaaaaatatatcaagtaactataacaaagaggcaattaaagggaggattgacttacctataaaacaagacatgattattgacaaactaaatgggaactccactccagaaaaaacagatgggagttcctctaccacctctcctccttcctatgatagtgtaacaaaaccagacaaggaaaagtttgagaaagacaaaccagaaaaagaaagcaaaggaaaagaggtcagagaaaatcaaaagtaaaaagaaacaaagaattatctttgtgatcaattgtttacagcctatgaaggtaaagtatatgtgtcaactggacttcaagaggaggtccatgccaaactgactgttttaacaaatactcatagtcagtgcctatacaagacagtgaagtgacctctctgtcactgcaactctgtgaagcagggtatcaacattgacaagaggttgctgtttttattaccagctgacactgctgaggagaaacccaatggctacctagactatagggatagttgtgcaaagtgaacattgtaactacaccaaacacctttagtacagtccttgcatccattctatttttaacttccatatctgccatatttttacaaaatttgttctagtgcatttccatggtccccaattcatagtttattcataatgctatgtcactatttttgtaaatgaggtttacgttgaagaaacagtatacaagaaccctgtctctcaaatgatcagacaaaggtgttttgccagagagataaaatttttgctcaaaaccagaaaaagaattgtaatggctacagtttcagttacttccattttctagatggctttaattttgaaagtattttagtctgttatgtttgtttctatctgaacagttatgtgcctgtaaagtctcctctaatatttaaaggattatttttatgcaaagtattctgtttcagcaagtgcaaattttattctaagtttcagagctctatatttaatttaggtcaaatgctttccaaaaagtaatctaataaatccattctagaaaaatatatctaaagtattgctttagaatagttgttccactttctgctgcagtattgctttgccatcttctgctctcagcaaagctgatagtctatgtcaattaaataccctatgttatgtaaatagttattttatcctgtggtgcatgtttgggcaaatatatatatagcctgataaacaacttctattaaatcaaatatgtaccacagtgtatgtgtcttttgcaagcttccaacagggatgtatcctgtatcattcattaaacatagtttaaaggctatcactaatgcatgttaatattgcctatgctgctctattttactcaatccattcttcacaagtcttggttaaagaatgtcacatattggtgatagaatgaattcaacctgctctgtccattatgtcaagcagaataatttgaagctatttacaaacacctttacttttgcacttttaattcaacatgagtatcatatggtatctctctagatttcaaggaaacacactggatactgcctactgacaaaacctattcttcatattttgctaaaaatatgtctaaaacttgtttaaatataaataatgtaaaaatataatcaactttatttgtcagcattttgtacataagaaaattattttcaggttgatgacatcacaatttattttactttatgcttttgcttttgatttttaatcacaattccaaacttttgaatccataagatttttcaatggataatttcctaaaataaaagttagataatgggttttatggatttctttgttataatatattttctaccattccaataggagatacattggtcaaacactcaaacctagatcattttctaccaactatggttgcctcaatataaccttttattcatagatgtttttttttattcaacttttgtagtatttacgtatgcagactagtcttatttttttaattcctgctgcactaaagctattacaaatataacatggactttgttctttttagccatgaacaaagtggcaaagttgtgcaattacctaacatgatataaatttttgttttttgcacaaaccaaaagtttaatgttaattctttttacaaaactatttactgtagtgtattgaagaactgcatgcagggaattgctattgctaaaaagaatggtgagctacgtcattattgagccaaaagaataaatttcattttttattgcatttcacttattggcctctggggttttttgtttttgttttttgctgttggcagtttaaaatatatataattaataaaacctgtgcttgatctgacatttgtatacataaaagtttacatgaattttacaacaaactagtgcatgattcaccaagcagtactacagaacaaaggcaaattaaaagcagctttgtgaacttttatgtgtgcaaaggatcaagttcacatgttccaactttcaggtttgataataatagtagtaaccacctacaatagctttcaatttcaattaactcccttggctataagcatctaaactcatcttctttcaatataattgatgctatctcctaattacttggtggctaataaatgttacattctttgttacttaaatgcattatataaactcctatgtatacataaggtattaatgatatagttattgagaatttatattaacttttttttcaagaacccttggatttatgtgaggtcaaaaccaaactcttattctcagtggaaaactccagttgtaatgcatatttttaaagacaatttggatctaaatatgtatttcataattctcccataataaattatataaggtgg

SEQ ID NO: 182671 - DNA, 9123 bp, Homo sapiens
  Payload ID: 15993
  Gene Symbol: SCN3A
  Gene Name: sodium channel, voltage gated, type III alpha subunit
  Uniprot ID: Q9NY46
  ENST ID: ENST00000360093
  CDS Start-End: 493-6495
accatagagtgaatctcagaacaggaagcggaggcataagcagagaggattctggaaaggtctctttgttttcttatccacagagaaagaaagaaaaaaaattgtaactaatttgtaaacctctgtggtcaaaaaaaaaaaaaaaaaaaaaagctgaacagctgcagaggaagacacgttataccctaaccatcttggatgctgggctttgttatgctgtaattcataaggctctgttttatcagagattatggagcaagaaaactgaagccaagccacatcaaggtttgacagggatgagatacctgtcaaggattcatagtagagtggcttactgggaaaggagcaaagaatctcttctagggatattgtaagaataaatgagataattcacagaagggacctggagcttttccggaaaaaggtgctgtgactatctaaggtaattcgtatgcaagaagctacacgtaattaaatgtgcaggatgaaaagatggcacaggcactgttggtacccccaggacctgaaagcttccgcctttttactagagaatctcttgctgctatcgaaaaacgtgctgcagaagagaaagccaagaagcccaaaaaggaacaagataatgatgatgagaacaaaccaaagccaaatagtgacttggaagctggaaagaaccttccatttatttatggagacattcctccagagatggtgtcagagcccctggaggacctggatccctactatatcaataagaaaacttttatagtaatgaataaaggaaaggcaattttccgattcagtgccacctctgccttgtatattttaactccactaaaccctgttaggaaaattgctatcaagattttggtacattctttattcagcatgcttatcatgtgcactattttgaccaactgtgtatttatgaccttgagcaaccctcctgactggacaaagaatgtagagtacacattcactggaatctatacctttgagtcacttataaaaatcttggcaagagggttttgcttagaagattttacgtttcttcgtgatccatggaactggctggatttcagtgtcattgtgatggcgtatgtaacagaatttgtaagcctaggcaatgtttcagcccttcgaactttcagagtcttgagagctctgaaaactatttctgtaattccaggtttaaagaccattgtgggggccctgatccagtcggtaaagaagctttctgatgtgatgatcctgactgtgttctgtctgagcgtgtttgctctcattgggctgcagctgttcatgggcaatctgaggaataaatgtttgcagtggcccccaagcgattctgcttttgaaaccaacaccacttcctactttaatggcacaatggattcaaatgggacatttgttaatgtaacaatgagcacatttaactggaaggattacattggagatgacagtcacttttatgttttggatgggcaaaaagaccctttactctgtggaaatggctcagatgcaggccagtgtccagaaggatacatctgtgtgaaggctggtcgaaaccccaactatggctacacaagctttgacacctttagctgggctttcctgtctctatttcgactcatgactcaagactactgggaaaatctttaccagttgacattacgtgctgctgggaaaacatacatgatattttttgtcctggtcattttcttgggctcattttatttggtgaatttgatcctggctgtggtggccatggcctatgaggagcagaatcaggccaccttggaagaagcagaacaaaaagaggccgaatttcagcagatgctcgaacagcttaaaaagcaacaggaagaagctcaggcagttgcggcagcatcagctgcttcaagagatttcagtggaataggtgggttaggagagctgttggaaagttcttcagaagcatcaaagttgagttccaaaagtgctaaagaatggaggaaccgaaggaagaaaagaagacagagagagcaccttgaaggaaacaacaaaggagagagagacagctttcccaaatccgaatctgaagacagcgtcaaaagaagcagcttccttttctccatggatggaaacagactgaccagtgacaaaaaattctgctcccctcatcagtctctcttgagtatccgtggctccctgttttccccaagacgcaatagcaaaacaagcattttcagtttcagaggtcgggcaaaggatgttggatctgaaaatgactttgctgatgatgaacacagcacatttgaagacagcgaaagcaggagagactcactgtttgtgccgcacagacatggagagcgacgcaacagtaacgttagtcaggccagtatgtcatccaggatggtgccagggcttccagcaaatgggaagatgcacagcactgtggattgcaatggtgtggtttccttggtgggtggaccttcagctctaacgtcacctactggacaacttcccccagagggcaccaccacagaaacggaagtcagaaagagaaggttaagctcttaccagatttcaatggagatgctggaggattcctctggaaggcaaagagccgtgagcatagccagcattctgaccaacacaatggaagaacttgaagaatctagacagaaatgtccgccatgctggtatagatttgccaatgtgttcttgatctgggactgctgtgatgcatggttaaaagtaaaacatcttgtgaatttaattgttatggatccatttgttgatcttgccatcactatttgcattgtcttaaataccctctttatggccatggagcactaccccatgactgagcaattcagtagtgtgttgactgtaggaaacctggtctttactgggattttcacagcagaaatggttctcaagatcattgccatggatccttattactatttccaagaaggctggaatatctttgatggaattattgtcagcctcagtttaatggagcttggtctgtcaaatgtggagggattgtctgtactgcgatcattcagactgcttagagttttcaagttggcaaaatcctggcccacactaaatatgctaattaagatcattggcaattctgtgggggctctaggaaacctcaccttggtgttggccatcatcgtcttcatttttgctgtggtcggcatgcagctctttggtaagagctacaaagaatgtgtctgcaagatcaatgatgactgtacgctcccacggtggcacatgaacgacttcttccactccttcctgattgtgttccgcgtgctgtgtggagagtggatagagaccatgtgggactgtatggaggtcgctggccaaaccatgtgccttattgttttcatgttggtcatggtcattggaaaccttgtggttctgaacctctttctggccttattgttgagttcatttagctcagacaaccttgctgctactgatgatgacaatgaaatgaataatctgcagattgcagtaggaagaatgcaaaagggaattgattatgtgaaaaataagatgcgggagtgtttccaaaaagccttttttagaaagccaaaagttatagaaatccatgaaggcaataagatagacagctgcatgtccaataatactggaattgaaataagcaaagagcttaattatcttagagatgggaatggaaccaccagtggtgtaggtactggaagcagtgttgaaaaatacgtaatcgatgaaaatgattatatgtcattcataaacaaccccagcctcaccgtcacagtgccaattgctgttggagagtctgactttgaaaacttaaatactgaagagttcagcagtgagtcagaactagaagaaagcaaagagaaattaaatgcaaccagctcatctgaaggaagcacagttgatgttgttctaccccgagaaggtgaacaagctgaaactgaacccgaagaagaccttaaaccggaagcttgttttactgaaggatgtattaaaaagtttccattctgtcaagtaagtacagaagaaggcaaagggaagatctggtggaatcttcgaaaaacctgctacagtattgttgagcacaactggtttgagactttcattgtgttcatgatccttctcagtagtggtgcattggcctttgaagatatatacattgaacagcgaaagactatcaaaaccatgctagaatatgctgacaaagtctttacctatatattcattctggaaatgcttctcaaatgggttgcttatggatttcaaacatatttcactaatgcctggtgctggctagatttcttgatcgttgatgtttctttggttagcctggtagccaatgctcttggctactcagaactcggtgccatcaaatcattacggacattaagagctttaagacctctaagagccttatcccggtttgaaggcatgagggtggttgtgaatgctcttgttggagcaattccctctatcatgaatgtgctgttggtctgtctcatcttctggttgatctttagcatcatgggtgtgaatttgtttgctggcaagttctaccactgtgttaacatgacaacgggtaacatgtttgacattagtgatgttaacaatttgagtgactgtcaggctcttggcaagcaagctcggtggaaaaacgtgaaagtaaactttgataatgttggcgctggctatcttgcactgcttcaagtggccacatttaaaggctggatggatattatgtatgcagctgttgattcacgagatgttaaacttcagcctgtatatgaagaaaatctgtacatgtatttatactttgtcatctttatcatctttgggtcattcttcactctgaatctattcattggtgtcatcatagataacttcaaccagcagaaaaagaagtttggaggtcaagacatctttatgacagaggaacagaaaaaatattacaatgcaatgaagaaacttggatccaagaaacctcagaaacccatacctcgcccagcaaacaaattccaaggaatggtctttgattttgtaaccagacaagtctttgatatcagcatcatgatcctcatctgcctcaacatggtcaccatgatggtggaaacggatgaccagggcaaatacatgaccctagttttgtcccggatcaacctagtgttcattgttctgttcactggagaatttgtgctgaagctcgtctccctcagacactactacttcactataggctggaacatctttgactttgtggtggtgattctctccattgtaggtatgtttctggctgagatgatagaaaagtattttgtgtcccctaccttgttccgagtgatccgtcttgccaggattggccgaatcctacgtctgatcaaaggagcaaaggggatccgcacgctgctctttgctttgatgatgtcccttcctgcgttgtttaacatcggcctcctgctcttcctggtcatgtttatctatgccatctttgggatgtccaactttgcctatgttaaaaaggaagctggaattgatgacatgttcaactttgagacctttggcaacagcatgatctgcttgttccaaattacaacctctgctggctgggatggattgctagcacctattcttaatagtgcaccacccgactgtgaccctgacacaattcaccctggcagctcagttaagggagactgtgggaacccatctgttgggattttcttttttgtcagttacatcatcatatccttcctggttgtggtgaacatgtacatcgcggtcatcctggagaacttcagtgttgctactgaagaaagtgcagagcccctgagtgaggatgactttgagatgttctatgaggtttgggaaaagtttgatcccgatgcgacccagtttatagagttctctaaactctctgattttgcagctgccctggatcctcctcttctcatagcaaaacccaacaaagtccagcttattgccatggatctgcccatggtcagtggtgaccggatccactgtcttgatattttatttgcctttacaaagcgtgttttgggtgagagtggagagatggatgcccttcgaatacagatggaagacaggtttatggcatcaaacccctccaaagtctcttatgagcctattacaaccactttgaaacgtaaacaagaggaggtgtctgccgctatcattcagcgtaatttcagatgttatcttttaaagcaaaggttaaaaaatatatcaagtaactataacaaagaggcaattaaagggaggattgacttacctataaaacaagacatgattattgacaaactaaatgggaactccactccagaaaaaacagatgggagttcctctaccacctctcctccttcctatgatagtgtaacaaaaccagacaaggaaaagtttgagaaagacaaaccagaaaaagaaagcaaaggaaaagaggtcagagaaaatcaaaagtaaaaagaaacaaagaattatctttgtgatcaattgtttacagcctatgaaggtaaagtatatgtgtcaactggacttcaagaggaggtccatgccaaactgactgttttaacaaatactcatagtcagtgcctatacaagacagtgaagtgacctctctgtcactgcaactctgtgaagcagggtatcaacattgacaagaggttgctgtttttattaccagctgacactgctgaggagaaacccaatggctacctagactatagggatagttgtgcaaagtgaacattgtaactacaccaaacacctttagtacagtccttgcatccattctatttttaacttccatatctgccatatttttacaaaatttgttctagtgcatttccatggtccccaattcatagtttattcataatgctatgtcactatttttgtaaatgaggtttacgttgaagaaacagtatacaagaaccctgtctctcaaatgatcagacaaaggtgttttgccagagagataaaatttttgctcaaaaccagaaaaagaattgtaatggctacagtttcagttacttccattttctagatggctttaattttgaaagtattttagtctgttatgtttgtttctatctgaacagttatgtgcctgtaaagtctcctctaatatttaaaggattatttttatgcaaagtattctgtttcagcaagtgcaaattttattctaagtttcagagctctatatttaatttaggtcaaatgctttccaaaaagtaatctaataaatccattctagaaaaatatatctaaagtattgctttagaatagttgttccactttctgctgcagtattgctttgccatcttctgctctcagcaaagctgatagtctatgtcaattaaataccctatgttatgtaaatagttattttatcctgtggtgcatgtttgggcaaatatatatatagcctgataaacaacttctattaaatcaaatatgtaccacagtgtatgtgtcttttgcaagcttccaacagggatgtatcctgtatcattcattaaacatagtttaaaggctatcactaatgcatgttaatattgcctatgctgctctattttactcaatccattcttcacaagtcttggttaaagaatgtcacatattggtgatagaatgaattcaacctgctctgtccattatgtcaagcagaataatttgaagctatttacaaacacctttacttttgcacttttaattcaacatgagtatcatatggtatctctctagatttcaaggaaacacactggatactgcctactgacaaaacctattcttcatattttgctaaaaatatgtctaaaacttgtttaaatataaataatgtaaaaatataatcaactttatttgtcagcattttgtacataagaaaattattttcaggttgatgacatcacaatttattttactttatgcttttgcttttgatttttaatcacaattccaaacttttgaatccataagatttttcaatggataatttcctaaaataaaagttagataatgggttttatggatttctttgttataatatattttctaccattccaataggagatacattggtcaaacactcaaacctagatcattttctaccaactatggttgcctcaatataaccttttattcatagatgtttttttttattcaacttttgtagtatttacgtatgcagactagtcttatttttttaattcctgctgcactaaagctattacaaatataacatggactttgttctttttagccatgaacaaagtggcaaagttgtgcaattacctaacatgatataaatttttgttttttgcacaaaccaaaagtttaatgttaattctttttacaaaactatttactgtagtgtattgaagaactgcatgcagggaattgctattgctaaaaagaatggtgagctacgtcattattgagccaaaagaataaatttcattttttattgcatttcacttattggcctctggggttttttgtttttgttttttgctgttggcagtttaaaatatatataattaataaaacctgtgcttgatctgacatttgtatacataaaagtttacatgaattttacaacaaactagtgcatgattcaccaagcagtactacagaacaaaggcaaattaaaagcagctttgtgaacttttatgtgtgcaaaggatcaagttcacatgttccaactttcaggtttgataataatagtagtaaccacctacaatagctttcaatttcaattaactcccttggctataagcatctaaactcatcttctttcaatataattgatgctatctcctaattacttggtggctaataaatgttacattctttgttacttaaatgcattatataaactcctatgtatacataaggtattaatgatatagttattgagaatttatattaacttttttttcaagaacccttggatttatgtgaggtcaaaaccaaactcttattctcagtggaaaactccagttgtaatgcatatttttaaagacaatttggatctaaatatgtatttcataattctcccataataaattatataaggtggctaattgg

SEQ ID NO: 182672 - DNA, 6599 bp, Homo sapiens
  Payload ID: 15993
  Gene Symbol: SCN3A
  Gene Name: sodium channel, voltage gated, type III alpha subunit
  Uniprot ID: Q9NY46
  ENST ID: ENST00000409101
  CDS Start-End: 312-6167
taccctaaccatcttggatgctgggctttgttatgctgtaattcataaggctctgttttatcagagattatggagcaagaaaactgaagccaagccacatcaaggtttgacagggatgagatacctgtcaaggattcatagtagagtggcttactgggaaaggagcaaagaatctcttctagggatattgtaagaataaatgagataattcacagaagggacctggagcttttccggaaaaaggtgctgtgactatctaaggtaattcgtatgcaagaagctacacgtaattaaatgtgcaggatgaaaagatggcacaggcactgttggtacccccaggacctgaaagcttccgcctttttactagagaatctcttgctgctatcgaaaaacgtgctgcagaagagaaagccaagaagcccaaaaaggaacaagataatgatgatgagaacaaaccaaagccaaatagtgacttggaagctggaaagaaccttccatttatttatggagacattcctccagagatggtgtcagagcccctggaggacctggatccctactatatcaataagaaaacttttatagtaatgaataaaggaaaggcaattttccgattcagtgccacctctgccttgtatattttaactccactaaaccctgttaggaaaattgctatcaagattttggtacattctttattcagcatgcttatcatgtgcactattttgaccaactgtgtatttatgaccttgagcaaccctcctgactggacaaagaatgtagagtacacattcactggaatctatacctttgagtcacttataaaaatcttggcaagagggttttgcttagaagattttacgtttcttcgtgatccatggaactggctggatttcagtgtcattgtgatggcgtatgtaacagaatttgtaagcctaggcaatgtttcagcccttcgaactttcagagtcttgagagctctgaaaactatttctgtaattccaggtttaaagaccattgtgggggccctgatccagtcggtaaagaagctttctgatgtgatgatcctgactgtgttctgtctgagcgtgtttgctctcattgggctgcagctgttcatgggcaatctgaggaataaatgtttgcagtggcccccaagcgattctgcttttgaaaccaacaccacttcctactttaatggcacaatggattcaaatgggacatttgttaatgtaacaatgagcacatttaactggaaggattacattggagatgacagtcacttttatgttttggatgggcaaaaagaccctttactctgtggaaatggctcagatgcaggccagtgtccagaaggatacatctgtgtgaaggctggtcgaaaccccaactatggctacacaagctttgacacctttagctgggctttcctgtctctatttcgactcatgactcaagactactgggaaaatctttaccagttgacattacgtgctgctgggaaaacatacatgatattttttgtcctggtcattttcttgggctcattttatttggtgaatttgatcctggctgtggtggccatggcctatgaggagcagaatcaggccaccttggaagaagcagaacaaaaagaggccgaatttcagcagatgctcgaacagcttaaaaagcaacaggaagaagctcaggcagttgcggcagcatcagctgcttcaagagatttcagtggaataggtgggttaggagagctgttggaaagttcttcagaagcatcaaagttgagttccaaaagtgctaaagaatggaggaaccgaaggaagaaaagaagacagagagagcaccttgaaggaaacaacaaaggagagagagacagctttcccaaatccgaatctgaagacagcgtcaaaagaagcagcttccttttctccatggatggaaacagactgaccagtgacaaaaaattctgctcccctcatcagtctctcttgagtatccgtggctccctgttttccccaagacgcaatagcaaaacaagcattttcagtttcagaggtcgggcaaaggatgttggatctgaaaatgactttgctgatgatgaacacagcacatttgaagacagcgaaagcaggagagactcactgtttgtgccgcacagacatggagagcgacgcaacagtaacggcaccaccacagaaacggaagtcagaaagagaaggttaagctcttaccagatttcaatggagatgctggaggattcctctggaaggcaaagagccgtgagcatagccagcattctgaccaacacaatggaagaacttgaagaatctagacagaaatgtccgccatgctggtatagatttgccaatgtgttcttgatctgggactgctgtgatgcatggttaaaagtaaaacatcttgtgaatttaattgttatggatccatttgttgatcttgccatcactatttgcattgtcttaaataccctctttatggccatggagcactaccccatgactgagcaattcagtagtgtgttgactgtaggaaacctggtctttactgggattttcacagcagaaatggttctcaagatcattgccatggatccttattactatttccaagaaggctggaatatctttgatggaattattgtcagcctcagtttaatggagcttggtctgtcaaatgtggagggattgtctgtactgcgatcattcagactgcttagagttttcaagttggcaaaatcctggcccacactaaatatgctaattaagatcattggcaattctgtgggggctctaggaaacctcaccttggtgttggccatcatcgtcttcatttttgctgtggtcggcatgcagctctttggtaagagctacaaagaatgtgtctgcaagatcaatgatgactgtacgctcccacggtggcacatgaacgacttcttccactccttcctgattgtgttccgcgtgctgtgtggagagtggatagagaccatgtgggactgtatggaggtcgctggccaaaccatgtgccttattgttttcatgttggtcatggtcattggaaaccttgtggttctgaacctctttctggccttattgttgagttcatttagctcagacaaccttgctgctactgatgatgacaatgaaatgaataatctgcagattgcagtaggaagaatgcaaaagggaattgattatgtgaaaaataagatgcgggagtgtttccaaaaagccttttttagaaagccaaaagttatagaaatccatgaaggcaataagatagacagctgcatgtccaataatactggaattgaaataagcaaagagcttaattatcttagagatgggaatggaaccaccagtggtgtaggtactggaagcagtgttgaaaaatacgtaatcgatgaaaatgattatatgtcattcataaacaaccccagcctcaccgtcacagtgccaattgctgttggagagtctgactttgaaaacttaaatactgaagagttcagcagtgagtcagaactagaagaaagcaaagagaaattaaatgcaaccagctcatctgaaggaagcacagttgatgttgttctaccccgagaaggtgaacaagctgaaactgaacccgaagaagaccttaaaccggaagcttgttttactgaaggatgtattaaaaagtttccattctgtcaagtaagtacagaagaaggcaaagggaagatctggtggaatcttcgaaaaacctgctacagtattgttgagcacaactggtttgagactttcattgtgttcatgatccttctcagtagtggtgcattggcctttgaagatatatacattgaacagcgaaagactatcaaaaccatgctagaatatgctgacaaagtctttacctatatattcattctggaaatgcttctcaaatgggttgcttatggatttcaaacatatttcactaatgcctggtgctggctagatttcttgatcgttgatgtttctttggttagcctggtagccaatgctcttggctactcagaactcggtgccatcaaatcattacggacattaagagctttaagacctctaagagccttatcccggtttgaaggcatgagggtggttgtgaatgctcttgttggagcaattccctctatcatgaatgtgctgttggtctgtctcatcttctggttgatctttagcatcatgggtgtgaatttgtttgctggcaagttctaccactgtgttaacatgacaacgggtaacatgtttgacattagtgatgttaacaatttgagtgactgtcaggctcttggcaagcaagctcggtggaaaaacgtgaaagtaaactttgataatgttggcgctggctatcttgcactgcttcaagtggccacatttaaaggctggatggatattatgtatgcagctgttgattcacgagatgttaaacttcagcctgtatatgaagaaaatctgtacatgtatttatactttgtcatctttatcatctttgggtcattcttcactctgaatctattcattggtgtcatcatagataacttcaaccagcagaaaaagaagtttggaggtcaagacatctttatgacagaggaacagaaaaaatattacaatgcaatgaagaaacttggatccaagaaacctcagaaacccatacctcgcccagcaaacaaattccaaggaatggtctttgattttgtaaccagacaagtctttgatatcagcatcatgatcctcatctgcctcaacatggtcaccatgatggtggaaacggatgaccagggcaaatacatgaccctagttttgtcccggatcaacctagtgttcattgttctgttcactggagaatttgtgctgaagctcgtctccctcagacactactacttcactataggctggaacatctttgactttgtggtggtgattctctccattgtaggtatgtttctggctgagatgatagaaaagtattttgtgtcccctaccttgttccgagtgatccgtcttgccaggattggccgaatcctacgtctgatcaaaggagcaaaggggatccgcacgctgctctttgctttgatgatgtcccttcctgcgttgtttaacatcggcctcctgctcttcctggtcatgtttatctatgccatctttgggatgtccaactttgcctatgttaaaaaggaagctggaattgatgacatgttcaactttgagacctttggcaacagcatgatctgcttgttccaaattacaacctctgctggctgggatggattgctagcacctattcttaatagtgcaccacccgactgtgaccctgacacaattcaccctggcagctcagttaagggagactgtgggaacccatctgttgggattttcttttttgtcagttacatcatcatatccttcctggttgtggtgaacatgtacatcgcggtcatcctggagaacttcagtgttgctactgaagaaagtgcagagcccctgagtgaggatgactttgagatgttctatgaggtttgggaaaagtttgatcccgatgcgacccagtttatagagttctctaaactctctgattttgcagctgccctggatcctcctcttctcatagcaaaacccaacaaagtccagcttattgccatggatctgcccatggtcagtggtgaccggatccactgtcttgatattttatttgcctttacaaagcgtgttttgggtgagagtggagagatggatgcccttcgaatacagatggaagacaggtttatggcatcaaacccctccaaagtctcttatgagcctattacaaccactttgaaacgtaaacaagaggaggtgtctgccgctatcattcagcgtaatttcagatgttatcttttaaagcaaaggttaaaaaatatatcaagtaactataacaaagaggcaattaaagggaggattgacttacctataaaacaagacatgattattgacaaactaaatgggaactccactccagaaaaaacagatgggagttcctctaccacctctcctccttcctatgatagtgtaacaaaaccagacaaggaaaagtttgagaaagacaaaccagaaaaagaaagcaaaggaaaagaggtcagagaaaatcaaaagtaaaaagaaacaaagaattatctttgtgatcaattgtttacagcctatgaaggtaaagtatatgtgtcaactggacttcaagaggaggtccatgccaaactgactgttttaacaaatactcatagtcagtgcctatacaagacagtgaagtgacctctctgtcactgcaactctgtgaagcagggtatcaacattgacaagaggttgctgtttttattaccagctgacactgctgaggagaaacccaatggctacctagactatagggatagttgtgcaaagtgaacattgtaactacaccaaacacctttagtacagtccttgcatccattctatttttaacttccatatctgccatatttttacaaaatttgttctagtgcatttccatggtccccaattcatagtttattcataatgctatgtcactatttt

SEQ ID NO: 182673 - DNA, 1216 bp, Homo sapiens
  Payload ID: 15993
  Gene Symbol: SCN3A
  Gene Name: sodium channel, voltage gated, type III alpha subunit
  ENST ID: ENST00000453007
  CDS Start-End: 616-1216
agaacaggaagcggaggcataagcagagaggattctggaaaggtctctttgttttcttatccacagagaaagaaagaaaaaaaattgtaactaatttgtaaacctctgtggtcaaaaaaaaaaaaaaaaaaaaaagctgaacagctgcagaggaagacacgttataccctaaccatcttggatgctgggctttgttatgctgtaattcataaggctctgttttatcagagattatggagcaagaaaactgaagccaagccacatcaaggtttgacagggatgagatacctgtcaaggattcatagtagagtggcttactgggaaaggagcaaagaatctcttctagggatattgtaagaataaatgagataattcacagaagggacctggagcttttccggaaaaaggtgctgtgactatctaaggggaaaagctgagagtctggaactagcctatcttccgaggacttagagacaacagtatgggaatttcaacgagacgtttttactttcttttgaccaagattcaaattctttattccagcccttgataagtaaataagaaggtaattcgtatgcaagaagctacacgtaattaaatgtgcaggatgaaaagatggcacaggcactgttggtacccccaggacctgaaagcttccgcctttttactagagaatctcttgctgctatcgaaaaacgtgctgcagaagagaaagccaagaagcccaaaaaggaacaagataatgatgatgagaacaaaccaaagccaaatagtgacttggaagctggaaagaaccttccatttatttatggagacattcctccagagatggtgtcagagcccctggaggacctggatccctactatatcaataagaaaacttttatagtaatgaataaaggaaaggcaattttccgattcagtgccacctctgccttgtatattttaactccactaaaccctgttaggaaaattgctatcaagattttggtacattctttattcagcatgcttatcatgtgcactattttgaccaactgtgtatttatgaccttgagcaaccctcctgactggacaaagaatgtagagtacacattcactggaatctatacctttgagtcacttataaaaatcttggcaagagggttttgcttagaagattttacgtttcttcgtgatccatggaactggctggatttcagtgtcattgtgatgg

SEQ ID NO: 182674 - DNA, 4146 bp, Homo sapiens
  Payload ID: 15993
  Gene Symbol: SCN3A
  Gene Name: sodium channel, voltage gated, type III alpha subunit
  ENST ID: ENST00000440431
  CDS Start-End: 55-4146
taaggtaattcgtatgcaagaagctacacgtaattaaatgtgcaggatgaaaagatggcacaggcactgttggtacccccaggacctgaaagcttccgcctttttactagagaatctcttgctgctatcgaaaaacgtgctgcagaagagaaagccaagaagcccaaaaaggaacaagataatgatgatgagaacaaaccaaagccaaatagtgacttggaagctggaaagaaccttccatttatttatggagacattcctccagagatggtgtcagagcccctggaggacctggatccctactatatcaataagaaaacttttatagtaatgaataaaggaaaggcaattttccgattcagtgccacctctgccttgtatattttaactccactaaaccctgttaggaaaattgctatcaagattttggtacattctttattcagcatgcttatcatgtgcactattttgaccaactgtgtatttatgaccttgagcaaccctcctgactggacaaagaatgtagagtacacattcactggaatctatacctttgagtcacttataaaaatcttggcaagagggttttgcttagaagattttacgtttcttcgtgatccatggaactggctggatttcagtgtcattgtgatggcatatgtgacagagtttgtggacctgggcaatgtctcagcgttgagaacattcagagttctccgagcactgaaaacaatttcagtcattccaggtttaaagaccattgtgggggccctgatccagtcggtaaagaagctttctgatgtgatgatcctgactgtgttctgtctgagcgtgtttgctctcattgggctgcagctgttcatgggcaatctgaggaataaatgtttgcagtggcccccaagcgattctgcttttgaaaccaacaccacttcctactttaatggcacaatggattcaaatgggacatttgttaatgtaacaatgagcacatttaactggaaggattacattggagatgacagtcacttttatgttttggatgggcaaaaagaccctttactctgtggaaatggctcagatgcaggccagtgtccagaaggatacatctgtgtgaaggctggtcgaaaccccaactatggctacacaagctttgacacctttagctgggctttcctgtctctatttcgactcatgactcaagactactgggaaaatctttaccagttgacattacgtgctgctgggaaaacatacatgatattttttgtcctggtcattttcttgggctcattttatttggtgaatttgatcctggctgtggtggccatggcctatgaggagcagaatcaggccaccttggaagaagcagaacaaaaagaggccgaatttcagcagatgctcgaacagcttaaaaagcaacaggaagaagctcaggcagttgcggcagcatcagctgcttcaagagatttcagtggaataggtgggttaggagagctgttggaaagttcttcagaagcatcaaagttgagttccaaaagtgctaaagaatggaggaaccgaaggaagaaaagaagacagagagagcaccttgaaggaaacaacaaaggagagagagacagctttcccaaatccgaatctgaagacagcgtcaaaagaagcagcttccttttctccatggatggaaacagactgaccagtgacaaaaaattctgctcccctcatcagtctctcttgagtatccgtggctccctgttttccccaagacgcaatagcaaaacaagcattttcagtttcagaggtcgggcaaaggatgttggatctgaaaatgactttgctgatgatgaacacagcacatttgaagacagcgaaagcaggagagactcactgtttgtgccgcacagacatggagagcgacgcaacagtaacggcaccaccacagaaacggaagtcagaaagagaaggttaagctcttaccagatttcaatggagatgctggaggattcctctggaaggcaaagagccgtgagcatagccagcattctgaccaacacaatggaagaacttgaagaatctagacagaaatgtccgccatgctggtatagatttgccaatgtgttcttgatctgggactgctgtgatgcatggttaaaagtaaaacatcttgtgaatttaattgttatggatccatttgttgatcttgccatcactatttgcattgtcttaaataccctctttatggccatggagcactaccccatgactgagcaattcagtagtgtgttgactgtaggaaacctggtctttactgggattttcacagcagaaatggttctcaagatcattgccatggatccttattactatttccaagaaggctggaatatctttgatggaattattgtcagcctcagtttaatggagcttggtctgtcaaatgtggagggattgtctgtactgcgatcattcagactgcttagagttttcaagttggcaaaatcctggcccacactaaatatgctaattaagatcattggcaattctgtgggggctctaggaaacctcaccttggtgttggccatcatcgtcttcatttttgctgtggtcggcatgcagctctttggtaagagctacaaagaatgtgtctgcaagatcaatgatgactgtacgctcccacggtggcacatgaacgacttcttccactccttcctgattgtgttccgcgtgctgtgtggagagtggatagagaccatgtgggactgtatggaggtcgctggccaaaccatgtgccttattgttttcatgttggtcatggtcattggaaaccttgtggttctgaacctctttctggccttattgttgagttcatttagctcagacaaccttgctgctactgatgatgacaatgaaatgaataatctgcagattgcagtaggaagaatgcaaaagggaattgattatgtgaaaaataagatgcgggagtgtttccaaaaagccttttttagaaagccaaaagttatagaaatccatgaaggcaataagatagacagctgcatgtccaataatactggaattgaaataagcaaagagcttaattatcttagagatgggaatggaaccaccagtggtgtaggtactggaagcagtgttgaaaaatacgtaatcgatgaaaatgattatatgtcattcataaacaaccccagcctcaccgtcacagtgccaattgctgttggagagtctgactttgaaaacttaaatactgaagagttcagcagtgagtcagaactagaagaaagcaaagagaaattaaatgcaaccagctcatctgaaggaagcacagttgatgttgttctaccccgagaaggtgaacaagctgaaactgaacccgaagaagaccttaaaccggaagcttgttttactgaaggatgtattaaaaagtttccattctgtcaagtaagtacagaagaaggcaaagggaagatctggtggaatcttcgaaaaacctgctacagtattgttgagcacaactggtttgagactttcattgtgttcatgatccttctcagtagtggtgcattggcctttgaagatatatacattgaacagcgaaagactatcaaaaccatgctagaatatgctgacaaagtctttacctatatattcattctggaaatgcttctcaaatgggttgcttatggatttcaaacatatttcactaatgcctggtgctggctagatttcttgatcgttgatgtttctttggttagcctggtagccaatgctcttggctactcagaactcggtgccatcaaatcattacggacattaagagctttaagacctctaagagccttatcccggtttgaaggcatgagggtggttgtgaatgctcttgttggagcaattccctctatcatgaatgtgctgttggtctgtctcatcttctggttgatctttagcatcatgggtgtgaatttgtttgctggcaagttctaccactgtgttaacatgacaacgggtaacatgtttgacattagtgatgttaacaatttgagtgactgtcaggctcttggcaagcaagctcggtggaaaaacgtgaaagtaaactttgataatgttggcgctggctatcttgcactgcttcaagtg

SEQ ID NO: 182675 - DNA, 5665 bp, Homo sapiens
  Payload ID: 15994
  Gene Symbol: SCN3B
  Gene Name: sodium channel, voltage gated, type III beta subunit
  Uniprot ID: Q9NY72
  ENST ID: ENST00000299333
  CDS Start-End: 408-1055
tgtcagggctgacagcacacacggcctgggggcctagagaagggttgctgatcacctgccacccagggtcggggccccgcaccatccgggggcgagctcccgggaaggggctccgcctctacacccaccccccaacctctgacatcgccggccgaacgggagctgccgcttccttcccggccccgctgcacctccccagggagccgagggcgggcgtggacgggaccgacgtggaacgcattctgtagcccagacgggcggccccggcggcttcgggagtggggtcacgcccagctggagaagcagttagggcggacgaagcaggagccgcggggctgggaggattccagtcggaacgcaaccgatcctggggaggcgagagccttggaagccgccagccccagaagatgcctgccttcaatagattgtttcccctggcttctctcgtgcttatctactgggtcagtgtctgcttccctgtgtgtgtggaagtgccctcggagacggaggccgtgcagggcaaccccatgaagctgcgctgcatctcctgcatgaagagagaggaggtggaggccaccacggtggtggaatggttctacaggcccgagggcggtaaagatttccttatttacgagtatcggaatggccaccaggaggtggagagcccctttcaggggcgcctgcagtggaatggcagcaaggacctgcaggacgtgtccatcactgtgctcaacgtcactctgaacgactctggcctctacacctgcaatgtgtcccgggagtttgagtttgaggcgcatcggccctttgtgaagacgacgcggctgatccccctaagagtcaccgaggaggctggagaggacttcacctctgtggtctcagaaatcatgatgtacatccttctggtcttcctcaccttgtggctgctcatcgagatgatatattgctacagaaaggtctcaaaagccgaagaggcagcccaagaaaacgcgtctgactaccttgccatcccatctgagaacaaggagaactctgcggtaccagtggaggaatagaacaggagcagtgtgacatgaggtggcctgaacacctgagggactggacatcccatgttcagcaatgtcaatggcatcaggagggcgccccaagggccccatcgcttcccttcatgcatccattgttctgttcattcattcatccatacatccacctgcctctgagctttcacctctgactccctaactccatcagacctctacgcaccataagactctgccagaactgagaagccaacatttctacatagactcaacctcaccctctcctagttttccaacaagacactccaaagccaactggatttctcccctgtgctccaaatgactttgtacaagtgctggagttagcacctccctctgcccttaactggctggaactggttcattctccattactgcaagagaatggaagtcttaatagaaggaagcaggagtgattagttcgggttaaagcaaaagtgtgtcatgaacttggattccctgaagtcagttttgtcaggttcatggcccactttgctacagcatcagagtgaagcacgcctgtctaggttctccagtgacagaaagatcctgaagcatggactaacatgctctctggagcttagtactccagagctagatcctgatgggtctctaaggttccctccaagaagacaaggacaggagacttgggaaggaccaatggtaatttaagtggctcttaaaaagtcatgcaacatgtttctggacacgttcctgatcctattgcgataatgtatgtgtgccctccctgtgggcacaccacctgggcattaggactgaaattcctgagttcttcctctcaaaatttctgtgcaccagtattattcctcattttacatacaggaggcaactaagactcatacagggctcaactgaataagaggcttaagaggataaactggagcagaaataagccttaggtgctgcccagtttacacttcctgggatggatgtttttgtttgttttgttttttgttttttttgtttgagatggagtctcactctgtcacctaggctagagtgcagtggtgtgatctcggctcactgcaacctctgcctcttgggttcaagcaattctcatgcctcggcctctccagtagctgggattacaggtgtgcaccaccacgcctggctaaattttgtatttttagtacagacagggtttgactatgttggccaggctagtcttgaactcctgacctcaaatgacccacccacctcagcctcccaaagtgctgagattacaggcgtgaggcactgcgcccggtggataactttgtttctgaaaagactgacattgaacttgtctatggcaatgcttctttcacaagcacggactgggctgaggtcaactctgatagattcagatgactagaaattggccaaaaaagcagggagaagaacatgaggtagacttaaagaacttcctttatgtaaagatctgtgactctgaaatatcctccaaaaggagagtgcatctgagactgatatttaaactaagaaaaatgtttagtctgagatggatcataagtaaatgagcagtgtgagaggggagggatgggtaggtgctttccaaatacttcgcctatgaatgcataattttcagatttttttcccctagattttgagggagcagagaaactggaaaaaactttagtcaatatctcgtgtttcattttaattaagtgacaggtccaagtgtgacatccttcagcacccagggacaagagaggggaaagatgctttatggaatgtaagaagatgaaggtgactgggattcagcgagagagaggtccctcagacctgggacctccctttatagggaaagaccatattccataggtttagggctttaccttaaaagctcatttttttcattcttccatccctaggaaagtacttaaaaccagacttttaaatttttatttatttattattatttttttgagacagattctcactctgtctcccaggctagagtgcagtggtgcaatctcagctcactgcagcctcaactgccccaggtttaagcaatcctcccacctcagcccccaggtaactgggactacaggcatgcaccaccatgcctggctaatttttgtattttatgtagagacaggggtcttgccatgtcgcccaggctgatcttgaactcctgggctcaagcaatctgccagcctcagcctctcaaagtgctgggattacaggcctgagcaactgtgcctggcccaaaaccagaccgttaacacattaaagagtctgattttgttgaagaaaatatttgcaataaattcaagactcttcttattggtaattttccacacaatccctctgaaataagggagaggatatagacctttttaactttatagttagaaaaattggcctcagtgtgaaatttttccagtcccatagctcatggatgccaccagcttgcggtagtagcaagatgcttactaccacaccgttttcctcggtggcccaatagctcgtgtatctaagttgaacccggcagtatgcatgattgcctttttctcttctttttaaaaaaacccaactcagatgctgcttgcgtggcttttaatgaagctgaatggtatctatcacttatttatccttgacaggttatcttccccactcttcctttttctaacttctccattcttctcattcttgacactttcattagaactatatggtttacgaagtattttcacttaactattttatttcttctctataactggtcctgtgaggtcacattacaaaagaagaaactgagggtctctgaggttaagtagctttactaaattataaggaaacctagctggtaggtagacagcaagaatccaggtcttctgactcctctttcagttctctttccacttagaccatagctgcttccttttcttattttttagcttccatctaaccattgcctatcttgcctgtcctaatgttctccatcttctctcacccctaatcccactcactgcttctctaccactttgctttttggtggatgctagcaatgtgctttgagagtcagtcctattttggttctctttctagttggtttgtacatcattatttctcctgaattgcaattaaactccttcctgggagatttgataatgactgtaaatcaataaggtactgtgatcaccagcctacttccaatctccacccacctccctgtctcttcccataatcctacgaaagacccagactagatgtctgtttctctggaagctttatctggcatgatgttgcttattaaagggcttagaagagttctcaagggctattaatatcactttagaaaccccatctgttgtcttggtgctggatatttcccatgtctgatcctcaataacacaattcactaaaggccaagcttggctcaatctgattttcccattcttactacttcacagccatgaatgtgattgctcaatccagttggccctgagagcaccttgccctgctgaccttcactgtcacctcggtcttgaatcagagccccaacccaaacactccctgcctgtccctaccccagcctttattctcaccacttgtttaacggcatgaccttttagtttctccattcccagacacccacacacccagacttccttctgagttgcaggtttctccttagatgtccaactagaaatattactaggaaagttacttttcaaagcaggaatgtgctgggaagtaggagacagcaactccctcctctctccccaaaattattggatcaaaaaagaaattccatccatctcagaatctgtgagtcctcctcacataaatctgagggaaaaggctgtgtcactgcatctttgcaggaagaaagagaagcaagagctagacacacttcagaatatatcttagtttcccctttcccagtttaacatgaaaatgaaaaaagaaaaaaatgaaaaacaaaaacaaaagaagccttcctctcacctcattttgtaaatgaaaaatccctaattcagtgaattcacctagtcactgcaaatgtatctgaatagtgcttggtgtgcttgccagtctgatcatccactcattctactaacatctttttgcacccactctgtcaagctctagcctagacctttagtgtgccatgcagtcacaggtctgaaaagcagcatcatccaaaccttacttaatctctaaaatctcagctggtggacagctcatgattagttcagcccacttcctcccccttagttgagtttgcagcaggacgcaggagataagcacttccaagcaagtctgatttatatatcaaactcggtctccatcccaggccagctgaccctcagagccagcaatgctctgtgcttcctccctgcgtcacggcttggcaagagctgcctctgctgagcagtgtgtgtgatggagacggaggccgctgaaggccgagtgcttgcaggcttgtgaactgccatcgaacacaatccaaactctggaaatgttcctgaccacctaagccctcaacaacgtaatgcctgtatgtgctgtttttcagtaaactccttgttcatgtcaataaagtatccctgaaaacc

SEQ ID NO: 182676 - DNA, 6061 bp, Homo sapiens
  Payload ID: 15994
  Gene Symbol: SCN3B
  Gene Name: sodium channel, voltage gated, type III beta subunit
  Uniprot ID: Q9NY72
  ENST ID: ENST00000392770
  CDS Start-End: 804-1451
cagggctgacagcacacacggcctgggggcctagagaagggttgctgatcacctgccacccagggtcggggccccgcaccatccgggggcgagctcccgggaaggggctccgcctctacacccaccccccaacctctgacatcgccggccgaacgggagctgccgcttccttcccggccccgctgcacctccccagggagccgagggcgggcgtggacgggaccgacgtggaacgcattctgtagcccagacgggcggccccggcggcttcgggagtggggtcacgcccagctggagaagcagttagggcggacgaagcaggagccgcggggctgggaggattccagtcggaacgcaaccgatcctggggaggcgagaggtgaatcaacctggacccttccacagcctggctgctaggccagcagtgcgactcccttccgagctgagcttaccctgggcgcaaacgagcgaggcaggggcgcgagtggaagctggagttccggggtgggcggggaggcgactgtccgtggtgctgagcgccggcgagagcgggcgcggagcggctgatcggctccctcgaactggggaggtccagtggggtcgcttagggcccaaagcccccacccggctccaaaagctcccagggcctccccaggcaccggtgctcggcccttccttcggtcagaaagtcgccccctgggggcagttcgtcccaaagggtttcctcgaaagaatctgagagggcgcagtccttgaccgagggaatctctctgtgtagccttggaagccgccagccccagaagatgcctgccttcaatagattgtttcccctggcttctctcgtgcttatctactgggtcagtgtctgcttccctgtgtgtgtggaagtgccctcggagacggaggccgtgcagggcaaccccatgaagctgcgctgcatctcctgcatgaagagagaggaggtggaggccaccacggtggtggaatggttctacaggcccgagggcggtaaagatttccttatttacgagtatcggaatggccaccaggaggtggagagcccctttcaggggcgcctgcagtggaatggcagcaaggacctgcaggacgtgtccatcactgtgctcaacgtcactctgaacgactctggcctctacacctgcaatgtgtcccgggagtttgagtttgaggcgcatcggccctttgtgaagacgacgcggctgatccccctaagagtcaccgaggaggctggagaggacttcacctctgtggtctcagaaatcatgatgtacatccttctggtcttcctcaccttgtggctgctcatcgagatgatatattgctacagaaaggtctcaaaagccgaagaggcagcccaagaaaacgcgtctgactaccttgccatcccatctgagaacaaggagaactctgcggtaccagtggaggaatagaacaggagcagtgtgacatgaggtggcctgaacacctgagggactggacatcccatgttcagcaatgtcaatggcatcaggagggcgccccaagggccccatcgcttcccttcatgcatccattgttctgttcattcattcatccatacatccacctgcctctgagctttcacctctgactccctaactccatcagacctctacgcaccataagactctgccagaactgagaagccaacatttctacatagactcaacctcaccctctcctagttttccaacaagacactccaaagccaactggatttctcccctgtgctccaaatgactttgtacaagtgctggagttagcacctccctctgcccttaactggctggaactggttcattctccattactgcaagagaatggaagtcttaatagaaggaagcaggagtgattagttcgggttaaagcaaaagtgtgtcatgaacttggattccctgaagtcagttttgtcaggttcatggcccactttgctacagcatcagagtgaagcacgcctgtctaggttctccagtgacagaaagatcctgaagcatggactaacatgctctctggagcttagtactccagagctagatcctgatgggtctctaaggttccctccaagaagacaaggacaggagacttgggaaggaccaatggtaatttaagtggctcttaaaaagtcatgcaacatgtttctggacacgttcctgatcctattgcgataatgtatgtgtgccctccctgtgggcacaccacctgggcattaggactgaaattcctgagttcttcctctcaaaatttctgtgcaccagtattattcctcattttacatacaggaggcaactaagactcatacagggctcaactgaataagaggcttaagaggataaactggagcagaaataagccttaggtgctgcccagtttacacttcctgggatggatgtttttgtttgttttgttttttgttttttttgtttgagatggagtctcactctgtcacctaggctagagtgcagtggtgtgatctcggctcactgcaacctctgcctcttgggttcaagcaattctcatgcctcggcctctccagtagctgggattacaggtgtgcaccaccacgcctggctaaattttgtatttttagtacagacagggtttgactatgttggccaggctagtcttgaactcctgacctcaaatgacccacccacctcagcctcccaaagtgctgagattacaggcgtgaggcactgcgcccggtggataactttgtttctgaaaagactgacattgaacttgtctatggcaatgcttctttcacaagcacggactgggctgaggtcaactctgatagattcagatgactagaaattggccaaaaaagcagggagaagaacatgaggtagacttaaagaacttcctttatgtaaagatctgtgactctgaaatatcctccaaaaggagagtgcatctgagactgatatttaaactaagaaaaatgtttagtctgagatggatcataagtaaatgagcagtgtgagaggggagggatgggtaggtgctttccaaatacttcgcctatgaatgcataattttcagatttttttcccctagattttgagggagcagagaaactggaaaaaactttagtcaatatctcgtgtttcattttaattaagtgacaggtccaagtgtgacatccttcagcacccagggacaagagaggggaaagatgctttatggaatgtaagaagatgaaggtgactgggattcagcgagagagaggtccctcagacctgggacctccctttatagggaaagaccatattccataggtttagggctttaccttaaaagctcatttttttcattcttccatccctaggaaagtacttaaaaccagacttttaaatttttatttatttattattatttttttgagacagattctcactctgtctcccaggctagagtgcagtggtgcaatctcagctcactgcagcctcaactgccccaggtttaagcaatcctcccacctcagcccccaggtaactgggactacaggcatgcaccaccatgcctggctaatttttgtattttatgtagagacaggggtcttgccatgtcgcccaggctgatcttgaactcctgggctcaagcaatctgccagcctcagcctctcaaagtgctgggattacaggcctgagcaactgtgcctggcccaaaaccagaccgttaacacattaaagagtctgattttgttgaagaaaatatttgcaataaattcaagactcttcttattggtaattttccacacaatccctctgaaataagggagaggatatagacctttttaactttatagttagaaaaattggcctcagtgtgaaatttttccagtcccatagctcatggatgccaccagcttgcggtagtagcaagatgcttactaccacaccgttttcctcggtggcccaatagctcgtgtatctaagttgaacccggcagtatgcatgattgcctttttctcttctttttaaaaaaacccaactcagatgctgcttgcgtggcttttaatgaagctgaatggtatctatcacttatttatccttgacaggttatcttccccactcttcctttttctaacttctccattcttctcattcttgacactttcattagaactatatggtttacgaagtattttcacttaactattttatttcttctctataactggtcctgtgaggtcacattacaaaagaagaaactgagggtctctgaggttaagtagctttactaaattataaggaaacctagctggtaggtagacagcaagaatccaggtcttctgactcctctttcagttctctttccacttagaccatagctgcttccttttcttattttttagcttccatctaaccattgcctatcttgcctgtcctaatgttctccatcttctctcacccctaatcccactcactgcttctctaccactttgctttttggtggatgctagcaatgtgctttgagagtcagtcctattttggttctctttctagttggtttgtacatcattatttctcctgaattgcaattaaactccttcctgggagatttgataatgactgtaaatcaataaggtactgtgatcaccagcctacttccaatctccacccacctccctgtctcttcccataatcctacgaaagacccagactagatgtctgtttctctggaagctttatctggcatgatgttgcttattaaagggcttagaagagttctcaagggctattaatatcactttagaaaccccatctgttgtcttggtgctggatatttcccatgtctgatcctcaataacacaattcactaaaggccaagcttggctcaatctgattttcccattcttactacttcacagccatgaatgtgattgctcaatccagttggccctgagagcaccttgccctgctgaccttcactgtcacctcggtcttgaatcagagccccaacccaaacactccctgcctgtccctaccccagcctttattctcaccacttgtttaacggcatgaccttttagtttctccattcccagacacccacacacccagacttccttctgagttgcaggtttctccttagatgtccaactagaaatattactaggaaagttacttttcaaagcaggaatgtgctgggaagtaggagacagcaactccctcctctctccccaaaattattggatcaaaaaagaaattccatccatctcagaatctgtgagtcctcctcacataaatctgagggaaaaggctgtgtcactgcatctttgcaggaagaaagagaagcaagagctagacacacttcagaatatatcttagtttcccctttcccagtttaacatgaaaatgaaaaaagaaaaaaatgaaaaacaaaaacaaaagaagccttcctctcacctcattttgtaaatgaaaaatccctaattcagtgaattcacctagtcactgcaaatgtatctgaatagtgcttggtgtgcttgccagtctgatcatccactcattctactaacatctttttgcacccactctgtcaagctctagcctagacctttagtgtgccatgcagtcacaggtctgaaaagcagcatcatccaaaccttacttaatctctaaaatctcagctggtggacagctcatgattagttcagcccacttcctcccccttagttgagtttgcagcaggacgcaggagataagcacttccaagcaagtctgatttatatatcaaactcggtctccatcccaggccagctgaccctcagagccagcaatgctctgtgcttcctccctgcgtcacggcttggcaagagctgcctctgctgagcagtgtgtgtgatggagacggaggccgctgaaggccgagtgcttgcaggcttgtgaactgccatcgaacacaatccaaactctggaaatgttcctgaccacctaagccctcaacaacgtaatgcctgtatgtgctgtttttcagtaaactccttgttcatgtcaataaagtatccctgaaaacc

SEQ ID NO: 182677 - DNA, 3984 bp, Homo sapiens
  Payload ID: 15994
  Gene Symbol: SCN3B
  Gene Name: sodium channel, voltage gated, type III beta subunit
  Uniprot ID: Q9NY72
  ENST ID: ENST00000530277
  CDS Start-End: 408-1055
tgtcagggctgacagcacacacggcctgggggcctagagaagggttgctgatcacctgccacccagggtcggggccccgcaccatccgggggcgagctcccgggaaggggctccgcctctacacccaccccccaacctctgacatcgccggccgaacgggagctgccgcttccttcccggccccgctgcacctccccagggagccgagggcgggcgtggacgggaccgacgtggaacgcattctgtagcccagacgggcggccccggcggcttcgggagtggggtcacgcccagctggagaagcagttagggcggacgaagcaggagccgcggggctgggaggattccagtcggaacgcaaccgatcctggggaggcgagagccttggaagccgccagccccagaagatgcctgccttcaatagattgtttcccctggcttctctcgtgcttatctactgggtcagtgtctgcttccctgtgtgtgtggaagtgccctcggagacggaggccgtgcagggcaaccccatgaagctgcgctgcatctcctgcatgaagagagaggaggtggaggccaccacggtggtggaatggttctacaggcccgagggcggtaaagatttccttatttacgagtatcggaatggccaccaggaggtggagagcccctttcaggggcgcctgcagtggaatggcagcaaggacctgcaggacgtgtccatcactgtgctcaacgtcactctgaacgactctggcctctacacctgcaatgtgtcccgggagtttgagtttgaggcgcatcggccctttgtgaagacgacgcggctgatccccctaagagtcaccgaggaggctggagaggacttcacctctgtggtctcagaaatcatgatgtacatccttctggtcttcctcaccttgtggctgctcatcgagatgatatattgctacagaaaggtctcaaaagccgaagaggcagcccaagaaaacgcgtctgactaccttgccatcccatctgagaacaaggagaactctgcggtaccagtggaggaatagaacaggagcagtgtgacatgaggtgacctacaggaacatgggaggggaaggcagatgtggatggcaggttgtacaagtgactttgttgcccacaactgaagtgactttaaatttggtcccttaggtcactgtctaccctgcctggggtccccgccctcagggtaattctttaagtcagaaagctctgtatgatgtcagcgcttcggaaggtgaactgctttgacctgagtgtcgaggcaatctgaacttgcccatggtaacagaggcacaggattctccaactcccttctttggtcaaagaatttttgggctgggctgggctggactgggtgggaaattctcagtgagttattttatctttggtaggtggcctgaacacctgagggactggacatcccatgttcagcaatgtcaatggcatcaggagggcgccccaagggccccatcgcttcccttcatgcatccattgttctgttcattcattcatccatacatccacctgcctctgagctttcacctctgactccctaactccatcagacctctacgcaccataagactctgccagaactgagaagccaacatttctacatagactcaacctcaccctctcctagttttccaacaagacactccaaagccaactggatttctcccctgtgctccaaatgactttgtacaagtgctggagttagcacctccctctgcccttaactggctggaactggttcattctccattactgcaagagaatggaagtcttaatagaaggaagcaggagtgattagttcgggttaaagcaaaagtgtgtcatgaacttggattccctgaagtcagttttgtcaggttcatggcccactttgctacagcatcagagtgaagcacgcctgtctaggttctccagtgacagaaagatcctgaagcatggactaacatgctctctggagcttagtactccagagctagatcctgatgggtctctaaggttccctccaagaagacaaggacaggagacttgggaaggaccaatggtaatttaagtggctcttaaaaagtcatgcaacatgtttctggacacgttcctgatcctattgcgataatgtatgtgtgccctccctgtgggcacaccacctgggcattaggactgaaattcctgagttcttcctctcaaaatttctgtgcaccagtattattcctcattttacatacaggaggcaactaagactcatacagggctcaactgaataagaggcttaagaggataaactggagcagaaataagccttaggtgctgcccagtttacacttcctgggatggatgtttttgtttgttttgttttttgttttttttgtttgagatggagtctcactctgtcacctaggctagagtgcagtggtgtgatctcggctcactgcaacctctgcctcttgggttcaagcaattctcatgcctcggcctctccagtagctgggattacaggtgtgcaccaccacgcctggctaaattttgtatttttagtacagacagggtttgactatgttggccaggctagtcttgaactcctgacctcaaatgacccacccacctcagcctcccaaagtgctgagattacaggcgtgaggcactgcgcccggtggataactttgtttctgaaaagactgacattgaacttgtctatggcaatgcttctttcacaagcacggactgggctgaggtcaactctgatagattcagatgactagaaattggccaaaaaagcagggagaagaacatgaggtagacttaaagaacttcctttatgtaaagatctgtgactctgaaatatcctccaaaaggagagtgcatctgagactgatatttaaactaagaaaaatgtttagtctgagatggatcataagtaaatgagcagtgtgagaggggagggatgggtaggtgctttccaaatacttcgcctatgaatgcataattttcagatttttttcccctagattttgagggagcagagaaactggaaaaaactttagtcaatatctcgtgtttcattttaattaagtgacaggtccaagtgtgacatccttcagcacccagggacaagagaggggaaagatgctttatggaatgtaagaagatgaaggtgactgggattcagcgagagagaggtccctcagacctgggacctccctttatagggaaagaccatattccataggtttagggctttaccttaaaagctcatttttttcattcttccatccctaggaaagtacttaaaaccagacttttaaatttttatttatttattattatttttttgagacagattctcactctgtctcccaggctagagtgcagtggtgcaatctcagctcactgcagcctcaactgccccaggtttaagcaatcctcccacctcagcccccaggtaactgggactacaggcatgcaccaccatgcctggctaatttttgtattttatgtagagacaggggtcttgccatgtcgcccaggctgatcttgaactcctgggctcaagcaatctgccagcctcagcctctcaaagtgctgggattacaggcctgagcaactgtgcctggcccaaaaccagaccgttaacacattaaagagtctgattttgttgaagaaaatatttgcaataaattcaagactcttcttattggtaattttccacacaatccctctgaaataagggagaggatatagacctttttaactttatagttagaaaaattggcctcagtgtgaaatttttccagtcccatagctcatggatgccaccagcttgcggtagtagcaagatgcttactaccacaccgttttcctcggtggcccaatagctcgtgtatctaagttgaacccggcagtatgcatgattgcctttttctcttctttttaaaaaaacccaactca

SEQ ID NO: 182678 - DNA, 443 bp, Homo sapiens
  Payload ID: 15994
  Gene Symbol: SCN3B
  Gene Name: sodium channel, voltage gated, type III beta subunit
  ENST ID: ENST00000528267
  CDS Start-End: 163-443
attaaaaaggagtaattaaaggaaaagggagaactgcaaagaacctggggaagggaagaggagtcctcttgggcccccctccccttgcgctgacatttggatcacctcactgagtgatgaggtgaagacaggaacagccttggaagccgccagccccagaagatgcctgccttcaatagattgtttcccctggcttctctcgtgcttatctactgggtcagtgtctgcttccctgtgtgtgtggaagtgccctcggagacggaggccgtgcagggcaaccccatgaagctgcgctgcatctcctgcatgaagagagaggaggtggaggccaccacggtggtggaatggttctacaggcccgagggcggtaaagatttccttatttacgagtatcggaatggccaccaggaggtggagagcccctttcaggggcgcctgcagtg

SEQ ID NO: 182679 - DNA, 566 bp, Homo sapiens
  Payload ID: 15994
  Gene Symbol: SCN3B
  Gene Name: sodium channel, voltage gated, type III beta subunit
  ENST ID: ENST00000527836
  CDS Start-End: 143-566
gagaactggaaggcatggggtctgggaggcgaagccaggaaccgcgtacggcgcgccttgcagatgacatcattgcctgaaagagctctggcccttctcttcccggagctacacccgccttggaagccgccagccccagaagatgcctgccttcaatagattgtttcccctggcttctctcgtgcttatctactgggtcagtgtctgcttccctgtgtgtgtggaagtgccctcggagacggaggccgtgcagggcaaccccatgaagctgcgctgcatctcctgcatgaagagagaggaggtggaggccaccacggtggtggaatggttctacaggcccgagggcggtaaagatttccttatttacgagtatcggaatggccaccaggaggtggagagcccctttcaggggcgcctgcagtggaatggcagcaaggacctgcaggacgtgtccatcactgtgctcaacgtcactctgaacgactctggcctctacacctgcaatgtgtcccgggagtttgagtttgaggcgcatcggccctttgtgaagacgacgcggctgatcc

SEQ ID NO: 182680 - DNA, 7805 bp, Homo sapiens
  Payload ID: 15995
  Gene Symbol: SCN4A
  Gene Name: sodium channel, voltage gated, type IV alpha subunit
  Uniprot ID: P35499
  ENST ID: ENST00000435607
  CDS Start-End: 78-5588
ccagcaccccggggctgcgcactgcagctccccaggccacccaccacccttctggtctctgagcccaggatgcgaggatggccagaccatctctgtgcaccctggtgcctctgggccctgagtgcttgcgccccttcacccgggagtcactggcagccatagaacagcgggcggtggaggaggaggcccggctgcagcggaataagcagatggagattgaggagcccgaacggaagccacgaagtgacttggaggctggcaagaacctacccatgatctacggagaccccccgccggaggtcatcggcatccccctggaggacctggatccctactacagcaataagaagaccttcatcgtactcaacaagggcaaggccatcttccgcttctccgccacacctgctctctacctgctgagccccttcagcgtagtcaggcgcggggccatcaaggtgctcatccatgcgctgttcagcatgttcatcatgatcaccatcttgaccaactgcgtattcatgaccatgagtgacccgcctccctggtccaagaatgtggagtacaccttcacagggatctacacctttgagtccctcatcaagatactggcccgaggcttctgtgtcgacgacttcacattcctccgggacccctggaactggctggacttcagtgtcatcatgatggcgtacctgacagagtttgtggacttgggcaacatctcagccctgaggaccttccgggtgctgcgggccctcaaaaccatcacggtcatcccagggctgaagacgatcgtgggggccctgatccagtcggtgaaaaagctgtcggatgtgatgatcctcactgtcttctgcctgagcgtctttgcgctggtaggactgcagctcttcatgggaaacctgaggcagaagtgtgtgcgctggcccccgccgttcaacgacaccaacaccacgtggtacagcaatgacacgtggtacggcaatgacacatggtatggcaatgagatgtggtacggcaatgactcatggtatgccaacgacacgtggaacagccatgcaagctgggccaccaacgatacctttgattgggacgcctacatcagtgatgaagggaacttctacttcctggagggctccaacgatgccctgctctgtgggaacagcagtgatgctgggcactgccctgagggttatgagtgcatcaagaccgggcggaaccccaactatggctacaccagctatgacaccttcagctgggccttcttggctctcttccgcctcatgacacaggactattgggagaacctcttccagctgacccttcgagcagctggcaagacctacatgatcttcttcgtggtcatcatcttcctgggctctttctacctcatcaatctgatcctggccgtggtggccatggcatatgccgagcagaatgaggccaccctggccgaggataaggagaaagaggaggagtttcagcagatgcttgagaagttcaaaaagcaccaggaggagctggagaaggccaaggccgcccaagctctggaaggtggggaggcagatggggacccagcccatggcaaagactgcaatggcagcctggacacatcgcaaggggagaagggagccccgaggcagagcagcagcggagacagcggcatctccgacgccatggaagaactggaagaggcccaccaaaagtgcccaccatggtggtacaagtgcgcccacaaagtgctcatatggaactgctgcgccccgtggctgaagttcaagaacatcatccacctgatcgtcatggacccgttcgtggacctgggcatcaccatctgcatcgtgctcaacaccctcttcatggccatggaacattaccccatgacggagcactttgacaacgtgctcactgtgggcaacctggtcttcacaggcatcttcacagcagagatggttctgaagctgattgccatggacccctacgagtatttccagcagggttggaatatcttcgacagcatcatcgtcaccctcagcctggtagagctaggcctggccaacgtacagggactgtctgtgctacgctccttccgtctgctgcgggtcttcaagctggccaagtcgtggccaacgctgaacatgctcatcaagatcattggcaattcagtgggggcgctgggtaacctgacgctggtgctggctatcatcgtgttcatcttcgccgtggtgggcatgcagctgtttggcaagagctacaaggagtgcgtgtgcaagattgccttggactgcaacctgccgcgctggcacatgcatgatttcttccactccttcctcatcgtcttccgcatcctgtgcggggagtggatcgagaccatgtgggactgcatggaggtggccggccaagccatgtgcctcaccgtcttcctcatggtcatggtcatcggcaatcttgtggtcctgaacctgttcctggctctgctgctgagctccttcagcgccgacagtctggcagcctcggatgaggatggcgagatgaacaacctgcagattgccatcgggcgcatcaagttgggcatcggctttgccaaggccttcctcctggggctgctgcatggcaagatcctgagccccaaggacatcatgctcagcctcggggaggctgacggggccggggaggctggagaggcgggggagactgcccccgaggatgagaagaaggagccgcccgaggaggacctgaagaaggacaatcacatcctgaaccacatgggcctggctgacggccccccatccagcctcgagctggaccaccttaacttcatcaacaacccctacctgaccatacaggtgcccatcgcctccgaggagtccgacctggagatgcccaccgaggaggaaaccgacactttctcagagcctgaggatagcaagaagccgccgcagcctctctatgatgggaactcgtccgtctgcagcacagctgactacaagccccccgaggaggaccctgaggagcaggcagaggagaaccccgagggggagcagcctgaggagtgcttcactgaggcctgcgtgcagcgctggccctgcctctacgtggacatctcccagggccgtgggaagaagtggtggactctgcgcagggcctgcttcaagattgtcgagcacaactggttcgagaccttcattgtcttcatgatcctgctcagcagtggggctctggccttcgaggacatctacattgagcagcggcgagtcattcgcaccatcctagaatatgccgacaaggtcttcacctacatcttcatcatggagatgctgctcaaatgggtggcctacggctttaaggtgtacttcaccaacgcctggtgctggctcgacttcctcatcgtggatgtctccatcatcagcttggtggccaactggctgggctactcggagctgggacccatcaaatccctgcggacactgcgggccctgcgtcccctgagggcactgtcccgattcgagggcatgagggtggtggtgaacgccctcctaggcgccatcccctccatcatgaatgtgctgcttgtctgcctcatcttctggctgatcttcagcatcatgggtgtcaacctgtttgccggcaagttctactactgcatcaacaccaccacctctgagaggttcgacatctccgaggtcaacaacaagtctgagtgcgagagcctcatgcacacaggccaggtccgctggctcaatgtcaaggtcaactacgacaacgtgggtctgggctacctctccctcctgcaggtggccaccttcaagggttggatggacatcatgtatgcagccgtggactcccgggagaaggaggagcagccgcagtacgaggtgaacctctacatgtacctctactttgtcatcttcatcatctttggctccttcttcaccctcaacctcttcattggcgtcatcattgacaacttcaaccagcagaagaagaagttaggggggaaagacatctttatgacggaggaacagaagaaatactataacgccatgaagaagcttggctccaagaagcctcagaagccaattccccggccccagaacaagatccagggcatggtgtatgacctcgtgacgaagcaggccttcgacatcaccatcatgatcctcatctgcctcaacatggtcaccatgatggtggagacagacaaccagagccagctcaaggtggacatcctgtacaacatcaacatgatcttcatcatcatcttcacaggggagtgcgtgctcaagatgctcgccctgcgccagtactacttcaccgttggctggaacatctttgacttcgtggtcgtcatcctgtccattgtgggccttgccctctctgacctgatccagaagtacttcgtgtcacccacgctgttccgtgtgatccgcctggcgcggattgggcgtgtcctgcggctgatccgcggggccaagggcatccggacgctgctgttcgccctcatgatgtcgctgcctgccctcttcaacatcggcctcctcctcttcctggtcatgttcatctactccatcttcggcatgtccaactttgcctacgtcaagaaggagtcgggcatcgatgatatgttcaacttcgagaccttcggcaacagcatcatctgcctgttcgagatcaccacgtcggccggctgggacgggctcctcaaccccatcctcaacagcgggcccccagactgtgaccccaacctggagaacccgggcaccagtgtcaagggtgactgcggcaacccctccatcggcatctgcttcttctgcagctatatcatcatctccttcctcatcgtggtcaacatgtacatcgccatcatcctggagaacttcaatgtggccacagaggagagcagcgagccccttggtgaagatgactttgagatgttctacgagacatgggagaagttcgaccccgacgccacccagttcatcgcctacagccgcctctcagacttcgtggacaccctgcaggaaccgctgaggattgccaagcccaacaagatcaagctcatcacactggacttgcccatggtgccaggggacaagatccactgcctggacatcctctttgccctgaccaaagaggtcctgggtgactctggggaaatggacgccctcaagcagaccatggaggagaagttcatggcagccaacccctccaaggtgtcctacgagcccatcaccaccaccctcaagaggaagcacgaggaggtgtgcgccatcaagatccagagggcctaccgccggcacctgctacagcgctccatgaagcaggcatcctacatgtaccgccacagccacgacggcagcggggatgacgcccctgagaaggaggggctgcttgccaacaccatgagcaagatgtatggccacgagaatgggaacagcagctcgccaagcccggaggagaagggcgaggcaggggacgccggacccactatggggctgatgcccatcagcccctcagacactgcctggcctcccgcccctcccccagggcagactgtgcgcccaggtgtcaaggagtctcttgtctagcaggcagcatcggggtggcccactgagtctcggcatagtccccagagctcccccgtggtgcctgcacacagagtgagggaggagggctttgaatctgggactgtgcctggctccctgatgggggacaggatttggccacactggggctgacacccaggcccgagcgcctgcgttcccagaccatgggaaatgggaattgcgctcaggggctccatgctgggtctgaggcccctgcctccaagatttaacctgcaagttgctctgacctcctctgggccctgtcgcccctccttttggcctgggggaggtcagaacattcgaatctctgcccctcacttgaggaggagctggcctgcggtggagggatcagttgccccccatcaccagagtcttaagggtcactggcctctccccaggaagtggctcagacccctcagccccagcccagacaaagatgtcttaacctcagggagtgcagacacctaaccccagggcactgccagcccaccccctttgactctggggtgcagcttcacccaccaggccagctcaggaattccctggaaaagggaaatgtgactggttcagaaatagctcctcaaagcctcaaaacctgattggccactggatcctgctgctttgggctgggatggtgactcctgaaacctcttcctaggccacgtccaggtccgtagctcccctggctggctcctaggggaagagcagaaggaaggatgccacttgggaatgaattgtccttttctaggaagcacgggggagtgagacaggctgggtcctgccagctggatcgctgcacatggcctgagcatccagacctgagcgggagtcagggacctgctgctcagtaagaagattctcgccccttccctctctccctgcctcactcctccgtgagcaccaccagggctccaggagcctcatccagcctcagagatctcccttctcatctccccacgcccgtctctttctcacctttcccacctctctccccaaagtgatcctaagaatgtacagttgagctcaggttagatatttcgaccctggggcgtgcagcagggaaggcccaactggttcaggctcaaccttccaacttcctgtggcctgaagaagcacttctgctgcatcgctgttctgggcatggcagggccaggcctctgctggctcaggaggaggggtgagagacctgctcaggcgtcgctggatttattcacttgtgtgtgtacctgtggctgtgtgtctgcttgtatgcttttataggcctgtgtgtatagctgtgtgtgtgttcaagtgcgtgactgtatgtgtgtgtgtgaaccactgtgtactggagcctgcattatgcacgtgtctgggtatctttgtatatatgtgtatatatgtgtgccctggactgtttcaaggtccatggagtacggctggtgtgtcatactgtgcaggcctgtccctgggagtgttcccgtgcctgggagagtggacctgtgctgtgagtgtgtggatgcgtgtgaacgcatgtggtaaggtgtgtactcagggcattctgttggcctaagtgcctcttctttttcttcttgtttctcatgaaaagtttgattaaaattcaggaagcagcaaaaccttcaaaacaagacatgtatgtgtgcttgagtgtgtgaacacgtgtgtgtgtgtgcacatctacatgccatgcctatgggccagagttgtctttattgtccaccatgctctctcacctgctcccagtcctgcctgaacagccctctctctcactcccctctcctccccttcctgtttctcgttgtcacacccatggcctcagccctgctccctgcctcctgcctatgtctcctctatggaaggaggcctccactccttccatctcttccttcagaagtttcgtctaatgggggcagtctccccttcctggcacattgcccctctgccttgccctcctgggccctgggctggcacagcccctggagcctcagaaatctgtttgattggatattctcctcggactgtgtgcaggttgcagaggaagagtagatgagccgggtccggcctctccctgcctgtggcccctcccctgcagacggatgcccattcctgcctggtccagtggggaacaggtcccacgccaggccagcaggcgggctcctttgtacagttcttacaataaaccctccttggtgcctctgg

SEQ ID NO: 182681 - DNA, 7805 bp, Homo sapiens
  Payload ID: 15995
  Gene Symbol: SCN4A
  Gene Name: sodium channel, voltage gated, type IV alpha subunit
  ENST ID: ENST00000578147
  CDS Start-End: 78-5588
ccagcaccccggggctgcgcactgcagctccccaggccacccaccacccttctggtctctgagcccaggatgcgaggatggccagaccatctctgtgcaccctggtgcctctgggccctgagtgcttgcgccccttcacccgggagtcactggcagccatagaacagcgggcggtggaggaggaggcccggctgcagcggaataagcagatggagattgaggagcccgaacggaagccacgaagtgacttggaggctggcaagaacctacccatgatctacggagaccccccgccggaggtcatcggcatccccctggaggacctggatccctactacagcaataagaagaccttcatcgtactcaacaagggcaaggccatcttccgcttctccgccacacctgctctctacctgctgagccccttcagcgtagtcaggcgcggggccatcaaggtgctcatccatgcgctgttcagcatgttcatcatgatcaccatcttgaccaactgcgtattcatgaccatgagtgacccgcctccctggtccaagaatgtggagtacaccttcacagggatctacacctttgagtccctcatcaagatactggcccgaggcttctgtgtcgacgacttcacattcctccgggacccctggaactggctggacttcagtgtcatcatgatggcgtacctgacagagtttgtggacttgggcaacatctcagccctgaggaccttccgggtgctgcgggccctcaaaaccatcacggtcatcccagggctgaagacgatcgtgggggccctgatccagtcggtgaaaaagctgtcggatgtgatgatcctcactgtcttctgcctgagcgtctttgcgctggtaggactgcagctcttcatgggaaacctgaggcagaagtgtgtgcgctggcccccgccgttcaacgacaccaacaccacgtggtacagcaatgacacgtggtacggcaatgacacatggtatggcaatgagatgtggtacggcaatgactcatggtatgccaacgacacgtggaacagccatgcaagctgggccaccaacgatacctttgattgggacgcctacatcagtgatgaagggaacttctacttcctggagggctccaacgatgccctgctctgtgggaacagcagtgatgctgggcactgccctgagggttatgagtgcatcaagaccgggcggaaccccaactatggctacaccagctatgacaccttcagctgggccttcttggctctcttccgcctcatgacacaggactattgggagaacctcttccagctgacccttcgagcagctggcaagacctacatgatcttcttcgtggtcatcatcttcctgggctctttctacctcatcaatctgatcctggccgtggtggccatggcatatgccgagcagaatgaggccaccctggccgaggataaggagaaagaggaggagtttcagcagatgcttgagaagttcaaaaagcaccaggaggagctggagaaggccaaggccgcccaagctctggaaggtggggaggcagatggggacccagcccatggcaaagactgcaatggcagcctggacacatcgcaaggggagaagggagccccgaggcagagcagcagcggagacagcggcatctccgacgccatggaagaactggaagaggcccaccaaaagtgcccaccatggtggtacaagtgcgcccacaaagtgctcatatggaactgctgcgccccgtggctgaagttcaagaacatcatccacctgatcgtcatggacccgttcgtggacctgggcatcaccatctgcatcgtgctcaacaccctcttcatggccatggaacattaccccatgacggagcactttgacaacgtgctcactgtgggcaacctggtcttcacaggcatcttcacagcagagatggttctgaagctgattgccatggacccctacgagtatttccagcagggttggaatatcttcgacagcatcatcgtcaccctcagcctggtagagctaggcctggccaacgtacagggactgtctgtgctacgctccttccgtctgctgcgggtcttcaagctggccaagtcgtggccaacgctgaacatgctcatcaagatcattggcaattcagtgggggcgctgggtaacctgacgctggtgctggctatcatcgtgttcatcttcgccgtggtgggcatgcagctgtttggcaagagctacaaggagtgcgtgtgcaagattgccttggactgcaacctgccgcgctggcacatgcatgatttcttccactccttcctcatcgtcttccgcatcctgtgcggggagtggatcgagaccatgtgggactgcatggaggtggccggccaagccatgtgcctcaccgtcttcctcatggtcatggtcatcggcaatcttgtggtcctgaacctgttcctggctctgctgctgagctccttcagcgccgacagtctggcagcctcggatgaggatggcgagatgaacaacctgcagattgccatcgggcgcatcaagttgggcatcggctttgccaaggccttcctcctggggctgctgcatggcaagatcctgagccccaaggacatcatgctcagcctcggggaggctgacggggccggggaggctggagaggcgggggagactgcccccgaggatgagaagaaggagccgcccgaggaggacctgaagaaggacaatcacatcctgaaccacatgggcctggctgacggccccccatccagcctcgagctggaccaccttaacttcatcaacaacccctacctgaccatacaggtgcccatcgcctccgaggagtccgacctggagatgcccaccgaggaggaaaccgacactttctcagagcctgaggatagcaagaagccgccgcagcctctctatgatgggaactcgtccgtctgcagcacagctgactacaagccccccgaggaggaccctgaggagcaggcagaggagaaccccgagggggagcagcctgaggagtgcttcactgaggcctgcgtgcagcgctggccctgcctctacgtggacatctcccagggccgtgggaagaagtggtggactctgcgcagggcctgcttcaagattgtcgagcacaactggttcgagaccttcattgtcttcatgatcctgctcagcagtggggctctggccttcgaggacatctacattgagcagcggcgagtcattcgcaccatcctagaatatgccgacaaggtcttcacctacatcttcatcatggagatgctgctcaaatgggtggcctacggctttaaggtgtacttcaccaacgcctggtgctggctcgacttcctcatcgtggatgtctccatcatcagcttggtggccaactggctgggctactcggagctgggacccatcaaatccctgcggacactgcgggccctgcgtcccctgagggcactgtcccgattcgagggcatgagggtggtggtgaacgccctcctaggcgccatcccctccatcatgaatgtgctgcttgtctgcctcatcttctggctgatcttcagcatcatgggtgtcaacctgtttgccggcaagttctactactgcatcaacaccaccacctctgagaggttcgacatctccgaggtcaacaacaagtctgagtgcgagagcctcatgcacacaggccaggtccgctggctcaatgtcaaggtcaactacgacaacgtgggtctgggctacctctccctcctgcaggtggccaccttcaagggttggatggacatcatgtatgcagccgtggactcccgggagaaggaggagcagccgcagtacgaggtgaacctctacatgtacctctactttgtcatcttcatcatctttggctccttcttcaccctcaacctcttcattggcgtcatcattgacaacttcaaccagcagaagaagaagatgagggggaaagacatctttatgacggaggaacagaagaaatactataacgccatgaagaagcttggctccaagaagcctcagaagccaattccccggccccagaacaagatccagggcatggtgtatgacctcgtgacgaagcaggccttcgacatcaccatcatgatcctcatctgcctcaacatggtcaccatgatggtggagacagacaaccagagccagctcaaggtggacatcctgtacaacatcaacatgatcttcatcatcatcttcacaggggagtgcgtgctcaagatgctcgccctgcgccagtactacttcaccgttggctggaacatctttgacttcgtggtcgtcatcctgtccattgtgggccttgccctctctgacctgatccagaagtacttcgtgtcacccacgctgttccgtgtgatccgcctggcgcggattgggcgtgtcctgcggctgatccgcggggccaagggcatccggacgctgctgttcgccctcatgatgtcgctgcctgccctcttcaacatcggcctcctcctcttcctggtcatgttcatctactccatcttcggcatgtccaactttgcctacgtcaagaaggagtcgggcatcgatgatatgttcaacttcgagaccttcggcaacagcatcatctgcctgttcgagatcaccacgtcggccggctgggacgggctcctcaaccccatcctcaacagcgggcccccagactgtgaccccaacctggagaacccgggcaccagtgtcaagggtgactgcggcaacccctccatcggcatctgcttcttctgcagctatatcatcatctccttcctcatcgtggtcaacatgtacatcgccatcatcctggagaacttcaatgtggccacagaggagagcagcgagccccttggtgaagatgactttgagatgttctacgagacatgggagaagttcgaccccgacgccacccagttcatcgcctacagccgcctctcagacttcgtggacaccctgcaggaaccgctgaggattgccaagcccaacaagatcaagctcatcacactggacttgcccatggtgccaggggacaagatccactgcctggacatcctctttgccctgaccaaagaggtcctgggtgactctggggaaatggacgccctcaagcagaccatggaggagaagttcatggcagccaacccctccaaggtgtcctacgagcccatcaccaccaccctcaagaggaagcacgaggaggtgtgcgccatcaagatccagagggcctaccgccggcacctgctacagcgctccatgaagcaggcatcctacatgtaccgccacagccacgacggcagcggggatgacgcccctgagaaggaggggctgcttgccaacaccatgagcaagatgtatggccacgagaatgggaacagcagctcgccaagcccggaggagaagggcgaggcaggggacgccggacccactatggggctgatgcccatcagcccctcagacactgcctggcctcccgcccctcccccagggcagactgtgcgcccaggtgtcaaggagtctcttgtctagcaggcagcatcggggtggcccactgagtctcggcatagtccccagagctcccccgtggtgcctgcacacagagtgagggaggagggctttgaatctgggactgtgcctggctccctgatgggggacaggatttggccacactggggctgacacccaggcccgagcgcctgcgttcccagaccatgggaaatgggaattgcgctcaggggctccatgctgggtctgaggcccctgcctccaagatttaacctgcaagttgctctgacctcctctgggccctgtcgcccctccttttggcctgggggaggtcagaacattcgaatctctgcccctcacttgaggaggagctggcctgcggtggagggatcagttgccccccatcaccagagtcttaagggtcactggcctctccccaggaagtggctcagacccctcagccccagcccagacaaagatgtcttaacctcagggagtgcagacacctaaccccagggcactgccagcccaccccctttgactctggggtgcagcttcacccaccaggccagctcaggaattccctggaaaagggaaatgtgactggttcagaaatagctcctcaaagcctcaaaacctgattggccactggatcctgctgctttgggctgggatggtgactcctgaaacctcttcctaggccacgtccaggtccgtagctcccctggctggctcctaggggaagagcagaaggaaggatgccacttgggaatgaattgtccttttctaggaagcacgggggagtgagacaggctgggtcctgccagctggatcgctgcacatggcctgagcatccagacctgagcgggagtcagggacctgctgctcagtaagaagattctcgccccttccctctctccctgcctcactcctccgtgagcaccaccagggctccaggagcctcatccagcctcagagatctcccttctcatctccccacgcccgtctctttctcacctttcccacctctctccccaaagtgatcctaagaatgtacagttgagctcaggttagatatttcgaccctggggcgtgcagcagggaaggcccaactggttcaggctcaaccttccaacttcctgtggcctgaagaagcacttctgctgcatcgctgttctgggcatggcagggccaggcctctgctggctcaggaggaggggtgagagacctgctcaggcgtcgctggatttattcacttgtgtgtgtacctgtggctgtgtgtctgcttgtatgcttttataggcctgtgtgtatagctgtgtgtgtgttcaagtgcgtgactgtatgtgtgtgtgtgaaccactgtgtactggagcctgcattatgcacgtgtctgggtatctttgtatatatgtgtatatatgtgtgccctggactgtttcaaggtccatggagtacggctggtgtgtcatactgtgcaggcctgtccctgggagtgttcccgtgcctgggagagtggacctgtgctgtgagtgtgtggatgcgtgtgaacgcatgtggtaaggtgtgtactcagggcattctgttggcctaagtgcctcttctttttcttcttgtttctcatgaaaagtttgattaaaattcaggaagcagcaaaaccttcaaaacaagacatgtatgtgtgcttgagtgtgtgaacacgtgtgtgtgtgtgcacatctacatgccatgcctatgggccagagttgtctttattgtccaccatgctctctcacctgctcccagtcctgcctgaacagccctctctctcactcccctctcctccccttcctgtttctcgttgtcacacccatggcctcagccctgctccctgcctcctgcctatgtctcctctatggaaggaggcctccactccttccatctcttccttcagaagtttcgtctaatgggggcagtctccccttcctggcacattgcccctctgccttgccctcctgggccctgggctggcacagcccctggagcctcagaaatctgtttgattggatattctcctcggactgtgtgcaggttgcagaggaagagtagatgagccgggtccggcctctccctgcctgtggcccctcccctgcagacggatgcccattcctgcctggtccagtggggaacaggtcccacgccaggccagcaggcgggctcctttgtacagttcttacaataaaccctccttggtgcctctgg

SEQ ID NO: 182682 - DNA, 4484 bp, Homo sapiens
  Payload ID: 15996
  Gene Symbol: SCN4B
  Gene Name: sodium channel, voltage gated, type IV beta subunit
  Uniprot ID: Q8IWT1
  ENST ID: ENST00000324727
  CDS Start-End: 148-834
ctctgcccgctaactttcccgagccccgaccggcggcgcagagctccggggtagctttgtggccgaacgccgacctcgggcggagagcgcggctgtgcccagtatcccatccccgcgacccccgcgcgctccggagagaacaggactatgcccggggctggggacggaggcaaagccccggcgagatggctgggcactgggcttttgggcctcttcctgctccccgtaaccctgtcgctggaggtgtctgtgggaaaggccaccgacatctacgctgtcaatggcacggagatcctgctgccctgcaccttctccagctgctttggcttcgaggacctccacttccggtggacctacaacagcagtgacgcattcaagattctcatagaggggactgtgaagaatgagaagtctgaccccaaggtgacgttgaaagacgatgaccgcatcactctggtaggctctactaaggagaagatgaacaacatttccattgtgctgagggacctggagttcagcgacacgggcaaatacacctgccatgtgaagaaccccaaggagaataatctccagcaccacgccaccatcttcctccaagtcgttgatagactggaagaagtggacaacacagtgacactcatcatcctggctgtcgtgggcggggtcatcgggctcctcatcctcatcctgctgatcaagaaactcatcatcttcatcctgaagaagactcgggagaagaagaaggagtgtctcgtgagctcctcggggaatgacaacacggagaacggcttgcctggctccaaggcagaggagaaaccaccttcaaaagtgtgagccctgcttcgggctgagcagctgcagggagccccctttctgatgatgaaactgatgcttgagccccgaccgtagaacccacgtgcctgagacatctgctgcttggctcaaactgtagtctttccgggcacaagaaaccagagtcctgcccagcctgcccatccccttcccagtcagggctccccagggacaagggatggccaggggagggggtctgtggaagattcaggagaaagaaaggagaggctagggtggtgtggaggggctggtcccctgacacctgggcagatggggtctccttcagtctccctaccctgcacaagcagggccttgattttcctccaggcttctcttcacaagagactgggaggatccgtaagggatgtcctaagagctgcaccctggagatggggtgtaggaagaagtggcttcctttggaggtgggagtgggctggaggcctctggagaagacctggggtgggggctgatgggggcaggcccacagtgagagactgcctctgcttcataggataccagatcccccacagtcttccaagtaggaaacttcctttcccctgccccgggaccctatctgcctatcccctcccctgctcagagtttttaagccctctcaaccagggctggccaccctggtcttgagggttcctggccacctagcctgctcctctgctctctgggttactgaggggctcaggaaggggcccctcgagccttcctggagtacccgagtgctccctatgcctttccaagcatttctacttggggaattgggccacagaggtagtgagccagtgtcctgggcctctgggatgcccgccccattgctgccaatgctggcagcccctcccctggcatggcaggaccatcgccactctgggcactcctgagcccagctctcccctgcttctccccctcctacctgagaggctgcaccctccaacctcccattggctcgctcccccccccccaccgtgccctccatcacgccctgcccccagggtggttcatttcccagccctgggtcaagggcctgccttcgcctcagggactctcttcctttggatgagggggtccttgggtttcccagctgcttcctgctcagctgggccaccccctcccaccctggggttggggaggagcagggagtgggtgcccacagttttcctttgcttctcccagagctggtttgcacagcccttgtgtgtggggctagaatgtgccttagtcctgaatcctagcccttacccccatcctctctagacggtatgtcctgacataacagcagagtctggtgtggtgctggtgagggttcgccagccctcccctccccagggtcatagagggggccatgaggctggaattggccagtgactgaatcttggagatgtcggccaggtgctcccattggggtttctagcctgccctagggggaggtggtgatgttgggagtgggatctcctgagtccttgttgggcagaattggtgaggccagggatggcagggaaaagtggtaacaagcctctctgcccatctacttccaatccctctctcccttactgattttttgatgccctgtcttctgggcccctaggagggatgagagaggagtagccccctttttcagagagtttggggtctacctcagagctctccctgtcaaaaagcagctgcaagcctcgcaagggtggagtggggggagactgaggaccagtagtacctgcagggtgcccgtggctgtggccagtgtcccttagccaacctgctgggctcaccagttccccgtctgatctgcctgtgcgcctcccattcttctctacccagaacctgtcatgggctggggctcagattttcctggctttgggagcagacagaccagagccaccagccattcagaaaacttcttatagctaccttcatgcaaaactgttttcttcttccttctcaatggtgacatttgaagaggcagagcaccttggggctcctccttctgtcttaagagaaagccaaggcacgtagagtagggagaagaagggcaccatcctctctttcctccccagggtctactgctgatttctagatggatcatgcagcttctctcagctcagctctttccatctaccaaatgggtgtaataatacttacctacctcacaggactgttgtgaggcttggcaagttttgtctaaaaacatctttttggcttggaaagggatctgggaagccaggtattaattgcagggatagttccaagtctgtcctgtcttcatctctgtgtcccatctctacaacccacatacagacacacacactctctctctctttctttccatcccaccccccttggaattatttagtctttgcaatattagaaaccttgactctgatgcttaaagcttcttgtccatggcttttgtttgatggttttcaatagaggtgactgagattgtagggggggcatttttggttgcccccatgcgtgggggcactactaagaatgctaaacttagtccccacaacaaagaatcatcctgtcccatgtcaacattatacccatggagaaacactggcatggatttgcactaggatgtatatgggcaaagctatcttccccaagtggaacctcagtgcatgcaaatctctgatggtggcttccagggcttgtgggctagagagagccacttacaaagtcgatcttgagagacctggccacatgcagctgggctgagtgatgtcagcgagactaaagacaaagttctgagctcctcatcaactacaaaatatgaaatcagcattccaggttctgggcttctccccatgtcgtaattgaacagaaggcagcccgaataaacccctgatgttagagaggcctggggagagcagccgatggggctcagactacatatggcaggccgatcagagctcttgtggagcgagggcttgagagcatgcttgtgagatggcaggaggtggggtgtgcttgtgtggagtgtgcgtgtgcaggcagtgtgggtgcatggcagcgtaactgtggagtggatgggctctgcatgtaaggggtgatgcatgatgggcagatgctggacatttgaggagccgtctttcttggcctgagctatgcctgttgaggcatctggagactgagaaagaatcaaaggcagagaagaccagccgtgctcctgcattccgtcactccatgacttcatctcagtgtcacagacagctgccatcagagggctggcagtagggagttccaggagcggggacttctcgggaaaatcctataacttgctttactttactttgtcccaggttggagtccctaccctcccacctcccacctgatatgcagtgcttttgactatcttatgcatggtttattcctctggcttggatgacaacaatacccatagtcaattttcctatgtaactatagatcaaatgatgcaacaacaggccttgggaggcctcaggtgtgcgagtgcctctgggaggcgcagatgcccacacagccagcactgacttgtgttcgagcacagaacggatataatcagtctggcctctacaacaagttttgcattgtagaattgtatttagctttgccttggatgaaataaaaattatgtttaataa

SEQ ID NO: 182683 - DNA, 566 bp, Homo sapiens
  Payload ID: 15996
  Gene Symbol: SCN4B
  Gene Name: sodium channel, voltage gated, type IV beta subunit
  Uniprot ID: Q8IWT1
  ENST ID: ENST00000529878
  CDS Start-End: 216-500
agcagccggctcccagcagcgggcgagcgcgcctccccctccgctccctccctccccctcctctcgctctctgcccgctaactttcccgagccccgaccggcggcgcagagctccggggtagctttgtggccgaacgccgacctcgggcggagagcgcggctgtgcccagtatcccatccccgcgacccccgcgcgctccggagagaacaggactatgcccggggctggggacggaggcaaagccccggcgagatggctgggcactgggcttttggtggaagaagtggacaacacagtgacactcatcatcctggctgtcgtgggcggggtcatcgggctcctcatcctcatcctgctgatcaagaaactcatcatcttcatcctgaagaagactcgggagaagaagaaggagtgtctcgtgagctcctcggggaatgacaacacggagaacggcttgcctggctccaaggcagaggagaaaccaccttcaaaagtgtgagccctgcttcgggctgagcagctgcagggagccccctttctgatgatgaaactgatgcttgagccc

SEQ ID NO: 182684 - DNA, 9786 bp, Homo sapiens
  Payload ID: 15997
  Gene Symbol: SCN9A
  Gene Name: sodium channel, voltage gated, type IX alpha subunit
  Uniprot ID: Q15858
  ENST ID: ENST00000303354
  CDS Start-End: 342-6308
cggggctgctacctccacgggcgcgccctggcaggaggggcgcagtctgcttgcaggcggtcgccagcgctccagcggcggctgtcggctttccaattccgccagctcggctgaggctgggctagcctgggtgccagtggctgctagcggcaggcgtcccctgagcaacaggagcccagagaaaaagaagcagccctgagagagcgccggggaaggagaggcccgcgccctctcctggagccagattctgcaggtgcactgggtggggatgatcggcgggctaggttgcaagcctcttatgtgaggagctgaagaggaattaaaatatacaggatgaaaagatggcaatgttgcctcccccaggacctcagagctttgtccatttcacaaaacagtctcttgccctcattgaacaacgcattgctgaaagaaaatcaaaggaacccaaagaagaaaagaaagatgatgatgaagaagccccaaagccaagcagtgacttggaagctggcaaacagctgcccttcatctatggggacattcctcccggcatggtgtcagagcccctggaggacttggacccctactatgcagacaaaaagactttcatagtattgaacaaagggaaaacaatcttccgtttcaatgccacacctgctttatatatgctttctcctttcagtcctctaagaagaatatctattaagattttagtacactccttattcagcatgctcatcatgtgcactattctgacaaactgcatatttatgaccatgaataacccaccggactggaccaaaaatgtcgagtacacttttactggaatatatacttttgaatcacttgtaaaaatccttgcaagaggcttctgtgtaggagaattcacttttcttcgtgacccgtggaactggctggattttgtcgtcattgtttttgcgtatttaacagaatttgtaaacctaggcaatgtttcagctcttcgaactttcagagtattgagagctttgaaaactatttctgtaatcccaggcctgaagacaattgtaggggctttgatccagtcagtgaagaagctttctgatgtcatgatcctgactgtgttctgtctgagtgtgtttgcactaattggactacagctgttcatgggaaacctgaagcataaatgttttcgaaattcacttgaaaataatgaaacattagaaagcataatgaataccctagagagtgaagaagactttagaaaatatttttattacttggaaggatccaaagatgctctcctttgtggtttcagcacagattcaggtcagtgtccagaggggtacacctgtgtgaaaattggcagaaaccctgattatggctacacgagctttgacactttcagctgggccttcttagccttgtttaggctaatgacccaagattactgggaaaacctttaccaacagacgctgcgtgctgctggcaaaacctacatgatcttctttgtcgtagtgattttcctgggctccttttatctaataaacttgatcctggctgtggttgccatggcatatgaagaacagaaccaggcaaacattgaagaagctaaacagaaagaattagaatttcaacagatgttagaccgtcttaaaaaagagcaagaagaagctgaggcaattgcagcggcagcggctgaatatacaagtattaggagaagcagaattatgggcctctcagagagttcttctgaaacatccaaactgagctctaaaagtgctaaagaaagaagaaacagaagaaagaaaaagaatcaaaagaagctctccagtggagaggaaaagggagatgctgagaaattgtcgaaatcagaatcagaggacagcatcagaagaaaaagtttccaccttggtgtcgaagggcataggcgagcacatgaaaagaggttgtctacccccaatcagtcaccactcagcattcgtggctccttgttttctgcaaggcgaagcagcagaacaagtctttttagtttcaaaggcagaggaagagatataggatctgagactgaatttgccgatgatgagcacagcatttttggagacaatgagagcagaaggggctcactgtttgtgccccacagaccccaggagcgacgcagcagtaacatcagccaagccagtaggtccccaccaatgctgccggtgaacgggaaaatgcacagtgctgtggactgcaacggtgtggtctccctggttgatggacgctcagccctcatgctccccaatggacagcttctgccagaggtgataatagataaggcaacttctgatgacagcggcacgaccaatcaaatacacaagaaaaggcgttgtagttcctatctcctttcagaggatatgctgaatgatcccaacctcagacagagagcaatgagtagagcaagcatattaacaaacactgtggaagaacttgaagagtccagacaaaaatgtccaccttggtggtacagatttgcacacaaattcttgatctggaattgctctccatattggataaaattcaaaaagtgtatctattttattgtaatggatccttttgtagatcttgcaattaccatttgcatagttttaaacacattatttatggctatggaacaccacccaatgactgaggaattcaaaaatgtacttgctataggaaatttggtctttactggaatctttgcagctgaaatggtattaaaactgattgccatggatccatatgagtatttccaagtaggctggaatatttttgacagccttattgtgactttaagtttagtggagctctttctagcagatgtggaaggattgtcagttctgcgatcattcagactgctccgagtcttcaagttggcaaaatcctggccaacattgaacatgctgattaagatcattggtaactcagtaggggctctaggtaacctcaccttagtgttggccatcatcgtcttcatttttgctgtggtcggcatgcagctctttggtaagagctacaaagaatgtgtctgcaagatcaatgatgactgtacgctcccacggtggcacatgaacgacttcttccactccttcctgattgtgttccgcgtgctgtgtggagagtggatagagaccatgtgggactgtatggaggtcgctggtcaagctatgtgccttattgtttacatgatggtcatggtcattggaaacctggtggtcctaaacctatttctggccttattattgagctcatttagttcagacaatcttacagcaattgaagaagaccctgatgcaaacaacctccagattgcagtgactagaattaaaaagggaataaattatgtgaaacaaaccttacgtgaatttattctaaaagcattttccaaaaagccaaagatttccagggagataagacaagcagaagatctgaatactaagaaggaaaactatatttctaaccatacacttgctgaaatgagcaaaggtcacaatttcctcaaggaaaaagataaaatcagtggttttggaagcagcgtggacaaacacttgatggaagacagtgatggtcaatcatttattcacaatcccagcctcacagtgacagtgccaattgcacctggggaatccgatttggaaaatatgaatgctgaggaacttagcagtgattcggatagtgaatacagcaaagtgagattaaaccggtcaagctcctcagagtgcagcacagttgataaccctttgcctggagaaggagaagaagcagaggctgaacctatgaattccgatgagccagaggcctgtttcacagatggttgtgtatggaggttctcatgctgccaagttaacatagagtcagggaaaggaaaaatctggtggaacatcaggaaaacctgctacaagattgttgaacacagttggtttgaaagcttcattgtcctcatgatcctgctcagcagtggtgccctggcttttgaagatatttatattgaaaggaaaaagaccattaagattatcctggagtatgcagacaagatcttcacttacatcttcattctggaaatgcttctaaaatggatagcatatggttataaaacatatttcaccaatgcctggtgttggctggatttcctaattgttgatgtttctttggttactttagtggcaaacactcttggctactcagatcttggccccattaaatcccttcggacactgagagctttaagacctctaagagccttatctagatttgaaggaatgagggtcgttgtgaatgcactcataggagcaattccttccatcatgaatgtgctacttgtgtgtcttatattctggctgatattcagcatcatgggagtaaatttgtttgctggcaagttctatgagtgtattaacaccacagatgggtcacggtttcctgcaagtcaagttccaaatcgttccgaatgttttgcccttatgaatgttagtcaaaatgtgcgatggaaaaacctgaaagtgaactttgataatgtcggacttggttacctatctctgcttcaagttgcaacttttaagggatggacgattattatgtatgcagcagtggattctgttaatgtagacaagcagcccaaatatgaatatagcctctacatgtatatttattttgtcgtctttatcatctttgggtcattcttcactttgaacttgttcattggtgtcatcatagataatttcaaccaacagaaaaagaagcttggaggtcaagacatctttatgacagaagaacagaagaaatactataatgcaatgaaaaagctggggtccaagaagccacaaaagccaattcctcgaccagggaacaaaatccaaggatgtatatttgacctagtgacaaatcaagcctttgatattagtatcatggttcttatctgtctcaacatggtaaccatgatggtagaaaaggagggtcaaagtcaacatatgactgaagttttatattggataaatgtggtttttataatccttttcactggagaatgtgtgctaaaactgatctccctcagacactactacttcactgtaggatggaatatttttgattttgtggttgtgattatctccattgtaggtatgtttctagctgatttgattgaaacgtattttgtgtcccctaccctgttccgagtgatccgtcttgccaggattggccgaatcctacgtctagtcaaaggagcaaaggggatccgcacgctgctctttgctttgatgatgtcccttcctgcgttgtttaacatcggcctcctgctcttcctggtcatgttcatctacgccatctttggaatgtccaactttgcctatgttaaaaaggaagatggaattaatgacatgttcaattttgagacctttggcaacagtatgatttgcctgttccaaattacaacctctgctggctgggatggattgctagcacctattcttaacagtaagccacccgactgtgacccaaaaaaagttcatcctggaagttcagttgaaggagactgtggtaacccatctgttggaatattctactttgttagttatatcatcatatccttcctggttgtggtgaacatgtacattgcagtcatactggagaattttagtgttgccactgaagaaagtactgaacctctgagtgaggatgactttgagatgttctatgaggtttgggagaagtttgatcccgatgcgacccagtttatagagttctctaaactctctgattttgcagctgccctggatcctcctcttctcatagcaaaacccaacaaagtccagctcattgccatggatctgcccatggttagtggtgaccggatccattgtcttgacatcttatttgcttttacaaagcgtgttttgggtgagagtggggagatggattctcttcgttcacagatggaagaaaggttcatgtctgcaaatccttccaaagtgtcctatgaacccatcacaaccacactaaaacggaaacaagaggatgtgtctgctactgtcattcagcgtgcttatagacgttaccgcttaaggcaaaatgtcaaaaatatatcaagtatatacataaaagatggagacagagatgatgatttactcaataaaaaagatatggcttttgataatgttaatgagaactcaagtccagaaaaaacagatgccacttcatccaccacctctccaccttcatatgatagtgtaacaaagccagacaaagagaaatatgaacaagacagaacagaaaaggaagacaaagggaaagacagcaaggaaagcaaaaaatagagcttcatttttgatatattgtttacagcctgtgaaagtgatttatttgtgttaataaaactcttttgaggaagtctatgccaaaatcctttttatcaaaatattctcgaaggcagtgcagtcactaactctgatttcctaagaaaggtgggcagcattagcagatggttatttttgcactgatgattctttaagaatcgtaagagaactctgtaggaattattgattatagcatacaaaagtgattcagttttttggtttttaataaatcagaagaccatgtagaaaacttttacatctgccttgtcatcttttcacaggattgtaattagtcttgtttcccatgtaaataaacaacacacgcatacagaaaaatctattatttatctattatttggaaatcaacaaaagtatttgccttggctttgcaatgaaatgcttgatagaagtaatggacattagttatgaatgtttagttaaaatgcattattagggagcttgactttttatcaatgtacagaggttattctatattttgaggtgcttaaatttattctacattgcatcagaaccaatttatatgtgcctataaaatgccatgggattaaaaatatatgtaggctattcatttctacaaatgtttttcattcatcttgactcacatgccaacaaggataagacttacctttagagtattgtgtttcatagcctttcttctttcatatccctttttgttcatagaataaccacagaacttgaaaaattattctaagtacatattacactcctcaaaaaaaacaaagataactgagaaaaaagttattgacagaagttctatttgctattatttacatagcctaacatttgactgtgctgcccaaaatactgataatagtctcttaaactcttttgtcaaattttcctgctttcttatgcagtattgtttagtcatcctttcgctgtaagcaaagttgatgaaatccttcctgatatgcagttagttgtttgaccacggtacatacttgagcagataataacttgggcacagtatttattgcatcacttgtatacaatcccgtgtttggcaagctttcaaatcatgtaatatgacagactttacacagatatgtgtttagtatgaataaaaaagcattgaaatagggattcttgccaacttgctctcttgccaccaacttactttcctaaattatggaagtaatcttttttggatatacttcaatgtatacaatgaggaagatgtcaccttctccttaaaattctatgatgtgaaatatattttgcctcaatcaacacagtaccatgggcttctaatttatcaagcacatattcattttgcattagctgtagacatctagttttttgaaaacacctattaatagtaatttgaaaagaaataaccataatgctttttttcgtgagtttatttcaggaatatgagatctttcttctataaagttattcatgcacaggcaaaaattgagctacacaggtagaatgtagttttacttagaagatttttgtgggaggttttgaagcaaatatataaaacaactttcactaatttgctttccatatttaaaaaataataaattacatttatataataaatgtttaaagcacatattttttgttgttctggcaatttaaaaagaaagaggatttaaacgtacctatagaaacaaagatttatggttaaagaatgagatcagaagtctagaatgtttttaaattgtgatatattttacaacatccgttattactttgagacatttgtcctaatctacgtataaaactcaatctagggctaaagattctttataccatcttaggttcattcatcttaggctatttgaaccactttttaatttaatatgaaagacaccatgcagtgttttccgagactacatagatcattttatcacatacctaccaagcctgttggaaataggttttgataatttaagtagggacctatacaaaatatattacatttatcagatttttaaatacattcaattaagaatttaacatcaccttaaatttgaattcaatctaccgttatttcaaactcacaaatataactgcattatgaatacttacataatgtagtaagacaagatgtttgacaggttcgtgtgtaattttctattaatgtttttacattgccttgtttttatgtaaaataaaaaatatgggcaactggtttgttaacaacacaatttcttcttagcatttcaaaaatatatataaagttgttctttttcctatttcatgaactatgtttttttttaaaataacatggttaagttttatatatatttacgtttgtttcaggaatgtctacttgtgactttttatcaattaaaaataatatttggaagaaagagcttattaagtataagcttgaagtaaaattagacctctctttccatgtagattactgtttgtactgatggtttcacccttcagaaggcactgtcatattaatatttaaattttataatcgctgaacttattacacccaacaatacagaaaggcagttacactgaagaacttaacttagaataaaatggaagcaaacaggttttctaaaaacttttttaagtgaccaggtctcgctctgtcacccaggctagagtgcaatggcatgatcatagctctctgcagcctcaactctgggctcaagcaaccctcctgcctcagcctcccaagtagctaagactacaggtacatgccaccatgcctggctaatatttaaatttttgtagataaggggtcttgctatgttgcccaggctagtctcaaactcctggcttcaagtgttcctactgtcatgacctgccaacatgctggggttacaggcatgagccaccatgccccaaacaggtttgaacacaaatctttcggatgaaaattagagaacctaattttagctttttgatagttacctagtttgcaaaagatttgggtgacttgtgagctgtttttaaatgctgattgttgaacatcacaacccaaaatacttagcatgattttatagagttttgatagctttattaaaaagagtgaaaataaaatgcatatgtaaataaagcagttctaaatagctatttcagagaaatgttaatagaagtgctgaaagaagggccaactaaattaggatggccagggaattggcctgggtttaggacctatgtatgaaggccaccaattttttaaaaatatctgtggtttattatgttattatcttcttgaggaaaacaatcaagaattgcttcatgaaaataaataaatagccatgaatatcataaagctgtttacataggattctttacaaatttcatagatctatgaatgctcaaaatgtttgagtttgccataaattatattgtagttatattgtagttatacttgagactgacacattgtaatataatctaagaataaaagttatac

SEQ ID NO: 182685 - DNA, 9768 bp, Homo sapiens
  Payload ID: 15997
  Gene Symbol: SCN9A
  Gene Name: sodium channel, voltage gated, type IX alpha subunit
  Uniprot ID: Q15858
  ENST ID: ENST00000409672
  CDS Start-End: 348-6281
gggaggcggggctgctacctccacgggcgcgccctggcaggaggggcgcagtctgcttgcaggcggtcgccagcgctccagcggcggctgtcggctttccaattccgccagctcggctgaggctgggctagcctgggtgccagtggctgctagcggcaggcgtcccctgagcaacaggagcccagagaaaaagaagcagccctgagagagcgccggggaaggagaggcccgcgccctctcctggagccagattctgcaggtgcactgggtggggatgatcggcgggctaggttgcaagcctcttatgtgaggagctgaagaggaattaaaatatacaggatgaaaagatggcaatgttgcctcccccaggacctcagagctttgtccatttcacaaaacagtctcttgccctcattgaacaacgcattgctgaaagaaaatcaaaggaacccaaagaagaaaagaaagatgatgatgaagaagccccaaagccaagcagtgacttggaagctggcaaacagctgcccttcatctatggggacattcctcccggcatggtgtcagagcccctggaggacttggacccctactatgcagacaaaaagactttcatagtattgaacaaagggaaaacaatcttccgtttcaatgccacacctgctttatatatgctttctcctttcagtcctctaagaagaatatctattaagattttagtacactccttattcagcatgctcatcatgtgcactattctgacaaactgcatatttatgaccatgaataacccaccggactggaccaaaaatgtcgagtacacttttactggaatatatacttttgaatcacttgtaaaaatccttgcaagaggcttctgtgtaggagaattcacttttcttcgtgacccgtggaactggctggattttgtcgtcattgtttttgcgtatttaacagaatttgtaaacctaggcaatgtttcagctcttcgaactttcagagtattgagagctttgaaaactatttctgtaatcccaggcctgaagacaattgtaggggctttgatccagtcagtgaagaagctttctgatgtcatgatcctgactgtgttctgtctgagtgtgtttgcactaattggactacagctgttcatgggaaacctgaagcataaatgttttcgaaattcacttgaaaataatgaaacattagaaagcataatgaataccctagagagtgaagaagactttagaaaatatttttattacttggaaggatccaaagatgctctcctttgtggtttcagcacagattcaggtcagtgtccagaggggtacacctgtgtgaaaattggcagaaaccctgattatggctacacgagctttgacactttcagctgggccttcttagccttgtttaggctaatgacccaagattactgggaaaacctttaccaacagacgctgcgtgctgctggcaaaacctacatgatcttctttgtcgtagtgattttcctgggctccttttatctaataaacttgatcctggctgtggttgccatggcatatgaagaacagaaccaggcaaacattgaagaagctaaacagaaagaattagaatttcaacagatgttagaccgtcttaaaaaagagcaagaagaagctgaggcaattgcagcggcagcggctgaatatacaagtattaggagaagcagaattatgggcctctcagagagttcttctgaaacatccaaactgagctctaaaagtgctaaagaaagaagaaacagaagaaagaaaaagaatcaaaagaagctctccagtggagaggaaaagggagatgctgagaaattgtcgaaatcagaatcagaggacagcatcagaagaaaaagtttccaccttggtgtcgaagggcataggcgagcacatgaaaagaggttgtctacccccaatcagtcaccactcagcattcgtggctccttgttttctgcaaggcgaagcagcagaacaagtctttttagtttcaaaggcagaggaagagatataggatctgagactgaatttgccgatgatgagcacagcatttttggagacaatgagagcagaaggggctcactgtttgtgccccacagaccccaggagcgacgcagcagtaacatcagccaagccagtaggtccccaccaatgctgccggtgaacgggaaaatgcacagtgctgtggactgcaacggtgtggtctccctggttgatggacgctcagccctcatgctccccaatggacagcttctgccagagggcacgaccaatcaaatacacaagaaaaggcgttgtagttcctatctcctttcagaggatatgctgaatgatcccaacctcagacagagagcaatgagtagagcaagcatattaacaaacactgtggaagaacttgaagagtccagacaaaaatgtccaccttggtggtacagatttgcacacaaattcttgatctggaattgctctccatattggataaaattcaaaaagtgtatctattttattgtaatggatccttttgtagatcttgcaattaccatttgcatagttttaaacacattatttatggctatggaacaccacccaatgactgaggaattcaaaaatgtacttgctataggaaatttggtctttactggaatctttgcagctgaaatggtattaaaactgattgccatggatccatatgagtatttccaagtaggctggaatatttttgacagccttattgtgactttaagtttagtggagctctttctagcagatgtggaaggattgtcagttctgcgatcattcagactgctccgagtcttcaagttggcaaaatcctggccaacattgaacatgctgattaagatcattggtaactcagtaggggctctaggtaacctcaccttagtgttggccatcatcgtcttcatttttgctgtggtcggcatgcagctctttggtaagagctacaaagaatgtgtctgcaagatcaatgatgactgtacgctcccacggtggcacatgaacgacttcttccactccttcctgattgtgttccgcgtgctgtgtggagagtggatagagaccatgtgggactgtatggaggtcgctggtcaagctatgtgccttattgtttacatgatggtcatggtcattggaaacctggtggtcctaaacctatttctggccttattattgagctcatttagttcagacaatcttacagcaattgaagaagaccctgatgcaaacaacctccagattgcagtgactagaattaaaaagggaataaattatgtgaaacaaaccttacgtgaatttattctaaaagcattttccaaaaagccaaagatttccagggagataagacaagcagaagatctgaatactaagaaggaaaactatatttctaaccatacacttgctgaaatgagcaaaggtcacaatttcctcaaggaaaaagataaaatcagtggttttggaagcagcgtggacaaacacttgatggaagacagtgatggtcaatcatttattcacaatcccagcctcacagtgacagtgccaattgcacctggggaatccgatttggaaaatatgaatgctgaggaacttagcagtgattcggatagtgaatacagcaaagtgagattaaaccggtcaagctcctcagagtgcagcacagttgataaccctttgcctggagaaggagaagaagcagaggctgaacctatgaattccgatgagccagaggcctgtttcacagatggttgtgtatggaggttctcatgctgccaagttaacatagagtcagggaaaggaaaaatctggtggaacatcaggaaaacctgctacaagattgttgaacacagttggtttgaaagcttcattgtcctcatgatcctgctcagcagtggtgccctggcttttgaagatatttatattgaaaggaaaaagaccattaagattatcctggagtatgcagacaagatcttcacttacatcttcattctggaaatgcttctaaaatggatagcatatggttataaaacatatttcaccaatgcctggtgttggctggatttcctaattgttgatgtttctttggttactttagtggcaaacactcttggctactcagatcttggccccattaaatcccttcggacactgagagctttaagacctctaagagccttatctagatttgaaggaatgagggtcgttgtgaatgcactcataggagcaattccttccatcatgaatgtgctacttgtgtgtcttatattctggctgatattcagcatcatgggagtaaatttgtttgctggcaagttctatgagtgtattaacaccacagatgggtcacggtttcctgcaagtcaagttccaaatcgttccgaatgttttgcccttatgaatgttagtcaaaatgtgcgatggaaaaacctgaaagtgaactttgataatgtcggacttggttacctatctctgcttcaagttgcaacttttaagggatggacgattattatgtatgcagcagtggattctgttaatgtagacaagcagcccaaatatgaatatagcctctacatgtatatttattttgtcgtctttatcatctttgggtcattcttcactttgaacttgttcattggtgtcatcatagataatttcaaccaacagaaaaagaagcttggaggtcaagacatctttatgacagaagaacagaagaaatactataatgcaatgaaaaagctggggtccaagaagccacaaaagccaattcctcgaccagggaacaaaatccaaggatgtatatttgacctagtgacaaatcaagcctttgatattagtatcatggttcttatctgtctcaacatggtaaccatgatggtagaaaaggagggtcaaagtcaacatatgactgaagttttatattggataaatgtggtttttataatccttttcactggagaatgtgtgctaaaactgatctccctcagacactactacttcactgtaggatggaatatttttgattttgtggttgtgattatctccattgtaggtatgtttctagctgatttgattgaaacgtattttgtgtcccctaccctgttccgagtgatccgtcttgccaggattggccgaatcctacgtctagtcaaaggagcaaaggggatccgcacgctgctctttgctttgatgatgtcccttcctgcgttgtttaacatcggcctcctgctcttcctggtcatgttcatctacgccatctttggaatgtccaactttgcctatgttaaaaaggaagatggaattaatgacatgttcaattttgagacctttggcaacagtatgatttgcctgttccaaattacaacctctgctggctgggatggattgctagcacctattcttaacagtaagccacccgactgtgacccaaaaaaagttcatcctggaagttcagttgaaggagactgtggtaacccatctgttggaatattctactttgttagttatatcatcatatccttcctggttgtggtgaacatgtacattgcagtcatactggagaattttagtgttgccactgaagaaagtactgaacctctgagtgaggatgactttgagatgttctatgaggtttgggagaagtttgatcccgatgcgacccagtttatagagttctctaaactctctgattttgcagctgccctggatcctcctcttctcatagcaaaacccaacaaagtccagctcattgccatggatctgcccatggttagtggtgaccggatccattgtcttgacatcttatttgcttttacaaagcgtgttttgggtgagagtggggagatggattctcttcgttcacagatggaagaaaggttcatgtctgcaaatccttccaaagtgtcctatgaacccatcacaaccacactaaaacggaaacaagaggatgtgtctgctactgtcattcagcgtgcttatagacgttaccgcttaaggcaaaatgtcaaaaatatatcaagtatatacataaaagatggagacagagatgatgatttactcaataaaaaagatatggcttttgataatgttaatgagaactcaagtccagaaaaaacagatgccacttcatccaccacctctccaccttcatatgatagtgtaacaaagccagacaaagagaaatatgaacaagacagaacagaaaaggaagacaaagggaaagacagcaaggaaagcaaaaaatagagcttcatttttgatatattgtttacagcctgtgaaagtgatttatttgtgttaataaaactcttttgaggaagtctatgccaaaatcctttttatcaaaatattctcgaaggcagtgcagtcactaactctgatttcctaagaaaggtgggcagcattagcagatggttatttttgcactgatgattctttaagaatcgtaagagaactctgtaggaattattgattatagcatacaaaagtgattcagttttttggtttttaataaatcagaagaccatgtagaaaacttttacatctgccttgtcatcttttcacaggattgtaattagtcttgtttcccatgtaaataaacaacacacgcatacagaaaaatctattatttatctattatttggaaatcaacaaaagtatttgccttggctttgcaatgaaatgcttgatagaagtaatggacattagttatgaatgtttagttaaaatgcattattagggagcttgactttttatcaatgtacagaggttattctatattttgaggtgcttaaatttattctacattgcatcagaaccaatttatatgtgcctataaaatgccatgggattaaaaatatatgtaggctattcatttctacaaatgtttttcattcatcttgactcacatgccaacaaggataagacttacctttagagtattgtgtttcatagcctttcttctttcatatccctttttgttcatagaataaccacagaacttgaaaaattattctaagtacatattacactcctcaaaaaaaacaaagataactgagaaaaaagttattgacagaagttctatttgctattatttacatagcctaacatttgactgtgctgcccaaaatactgataatagtctcttaaactcttttgtcaaattttcctgctttcttatgcagtattgtttagtcatcctttcgctgtaagcaaagttgatgaaatccttcctgatatgcagttagttgtttgaccacggtacatacttgagcagataataacttgggcacagtatttattgcatcacttgtatacaatcccgtgtttggcaagctttcaaatcatgtaatatgacagactttacacagatatgtgtttagtatgaataaaaaagcattgaaatagggattcttgccaacttgctctcttgccaccaacttactttcctaaattatggaagtaatcttttttggatatacttcaatgtatacaatgaggaagatgtcaccttctccttaaaattctatgatgtgaaatatattttgcctcaatcaacacagtaccatgggcttctaatttatcaagcacatattcattttgcattagctgtagacatctagttttttgaaaacacctattaatagtaatttgaaaagaaataaccataatgctttttttcgtgagtttatttcaggaatatgagatctttcttctataaagttattcatgcacaggcaaaaattgagctacacaggtagaatgtagttttacttagaagatttttgtgggaggttttgaagcaaatatataaaacaactttcactaatttgctttccatatttaaaaaataataaattacatttatataataaatgtttaaagcacatattttttgttgttctggcaatttaaaaagaaagaggatttaaacgtacctatagaaacaaagatttatggttaaagaatgagatcagaagtctagaatgtttttaaattgtgatatattttacaacatccgttattactttgagacatttgtcctaatctacgtataaaactcaatctagggctaaagattctttataccatcttaggttcattcatcttaggctatttgaaccactttttaatttaatatgaaagacaccatgcagtgttttccgagactacatagatcattttatcacatacctaccaagcctgttggaaataggttttgataatttaagtagggacctatacaaaatatattacatttatcagatttttaaatacattcaattaagaatttaacatcaccttaaatttgaattcaatctaccgttatttcaaactcacaaatataactgcattatgaatacttacataatgtagtaagacaagatgtttgacaggttcgtgtgtaattttctattaatgtttttacattgccttgtttttatgtaaaataaaaaatatgggcaactggtttgttaacaacacaatttcttcttagcatttcaaaaatatatataaagttgttctttttcctatttcatgaactatgtttttttttaaaataacatggttaagttttatatatatttacgtttgtttcaggaatgtctacttgtgactttttatcaattaaaaataatatttggaagaaagagcttattaagtataagcttgaagtaaaattagacctctctttccatgtagattactgtttgtactgatggtttcacccttcagaaggcactgtcatattaatatttaaattttataatcgctgaacttattacacccaacaatacagaaaggcagttacactgaagaacttaacttagaataaaatggaagcaaacaggttttctaaaaacttttttaagtgaccaggtctcgctctgtcacccaggctagagtgcaatggcatgatcatagctctctgcagcctcaactctgggctcaagcaaccctcctgcctcagcctcccaagtagctaagactacaggtacatgccaccatgcctggctaatatttaaatttttgtagataaggggtcttgctatgttgcccaggctagtctcaaactcctggcttcaagtgttcctactgtcatgacctgccaacatgctggggttacaggcatgagccaccatgccccaaacaggtttgaacacaaatctttcggatgaaaattagagaacctaattttagctttttgatagttacctagtttgcaaaagatttgggtgacttgtgagctgtttttaaatgctgattgttgaacatcacaacccaaaatacttagcatgattttatagagttttgatagctttattaaaaagagtgaaaataaaatgcatatgtaaataaagcagttctaaatagctatttcagagaaatgttaatagaagtgctgaaagaagggccaactaaattaggatggccagggaattggcctgggtttaggacctatgtatgaaggccaccaattttttaaaaatatctgtggtttattatgttattatcttcttgaggaaaacaatcaagaattgcttcatgaaaataaataaatagccatgaatatcataaagctgtttacataggattctttacaaatttcatagatctatgaatgctcaaaatgtttgagtttgccataaattatattgtagttatattgtagttatacttgagactgacacattgtaatataatctaagaataaaagttatacaaaataaaa

SEQ ID NO: 182686 - DNA, 5967 bp, Homo sapiens
  Payload ID: 15997
  Gene Symbol: SCN9A
  Gene Name: sodium channel, voltage gated, type IX alpha subunit
  Uniprot ID: Q15858
  ENST ID: ENST00000409435
  CDS Start-End: 1-5967
atggcaatgttgcctcccccaggacctcagagctttgtccatttcacaaaacagtctcttgccctcattgaacaacgcattgctgaaagaaaatcaaaggaacccaaagaagaaaagaaagatgatgatgaagaagccccaaagccaagcagtgacttggaagctggcaaacagctgcccttcatctatggggacattcctcccggcatggtgtcagagcccctggaggacttggacccctactatgcagacaaaaagactttcatagtattgaacaaagggaaaacaatcttccgtttcaatgccacacctgctttatatatgctttctcctttcagtcctctaagaagaatatctattaagattttagtacactccttattcagcatgctcatcatgtgcactattctgacaaactgcatatttatgaccatgaataacccaccggactggaccaaaaatgtcgagtacacttttactggaatatatacttttgaatcacttgtaaaaatccttgcaagaggcttctgtgtaggagaattcacttttcttcgtgacccgtggaactggctggattttgtcgtcattgtttttgcgtatttaacagaatttgtaaacctaggcaatgtttcagctcttcgaactttcagagtattgagagctttgaaaactatttctgtaatcccaggcctgaagacaattgtaggggctttgatccagtcagtgaagaagctttctgatgtcatgatcctgactgtgttctgtctgagtgtgtttgcactaattggactacagctgttcatgggaaacctgaagcataaatgttttcgaaattcacttgaaaataatgaaacattagaaagcataatgaataccctagagagtgaagaagactttagaaaatatttttattacttggaaggatccaaagatgctctcctttgtggtttcagcacagattcaggtcagtgtccagaggggtacacctgtgtgaaaattggcagaaaccctgattatggctacacgagctttgacactttcagctgggccttcttagccttgtttaggctaatgacccaagattactgggaaaacctttaccaacagacgctgcgtgctgctggcaaaacctacatgatcttctttgtcgtagtgattttcctgggctccttttatctaataaacttgatcctggctgtggttgccatggcatatgaagaacagaaccaggcaaacattgaagaagctaaacagaaagaattagaatttcaacagatgttagaccgtcttaaaaaagagcaagaagaagctgaggcaattgcagcggcagcggctgaatatacaagtattaggagaagcagaattatgggcctctcagagagttcttctgaaacatccaaactgagctctaaaagtgctaaagaaagaagaaacagaagaaagaaaaagaatcaaaagaagctctccagtggagaggaaaagggagatgctgagaaattgtcgaaatcagaatcagaggacagcatcagaagaaaaagtttccaccttggtgtcgaagggcataggcgagcacatgaaaagaggttgtctacccccaatcagtcaccactcagcattcgtggctccttgttttctgcaaggcgaagcagcagaacaagtctttttagtttcaaaggcagaggaagagatataggatctgagactgaatttgccgatgatgagcacagcatttttggagacaatgagagcagaaggggctcactgtttgtgccccacagaccccaggagcgacgcagcagtaacatcagccaagccagtaggtccccaccaatgctgccggtgaacgggaaaatgcacagtgctgtggactgcaacggtgtggtctccctggttgatggacgctcagccctcatgctccccaatggacagcttctgccagaggtgataatagataaggcaacttctgatgacagcggcacgaccaatcaaatacacaagaaaaggcgttgtagttcctatctcctttcagaggatatgctgaatgatcccaacctcagacagagagcaatgagtagagcaagcatattaacaaacactgtggaagaacttgaagagtccagacaaaaatgtccaccttggtggtacagatttgcacacaaattcttgatctggaattgctctccatattggataaaattcaaaaagtgtatctattttattgtaatggatccttttgtagatcttgcaattaccatttgcatagttttaaacacattatttatggctatggaacaccacccaatgactgaggaattcaaaaatgtacttgctataggaaatttggtctttactggaatctttgcagctgaaatggtattaaaactgattgccatggatccatatgagtatttccaagtaggctggaatatttttgacagccttattgtgactttaagtttagtggagctctttctagcagatgtggaaggattgtcagttctgcgatcattcagactgctccgagtcttcaagttggcaaaatcctggccaacattgaacatgctgattaagatcattggtaactcagtaggggctctaggtaacctcaccttagtgttggccatcatcgtcttcatttttgctgtggtcggcatgcagctctttggtaagagctacaaagaatgtgtctgcaagatcaatgatgactgtacgctcccacggtggcacatgaacgacttcttccactccttcctgattgtgttccgcgtgctgtgtggagagtggatagagaccatgtgggactgtatggaggtcgctggtcaagctatgtgccttattgtttacatgatggtcatggtcattggaaacctggtggtcctaaacctatttctggccttattattgagctcatttagttcagacaatcttacagcaattgaagaagaccctgatgcaaacaacctccagattgcagtgactagaattaaaaagggaataaattatgtgaaacaaaccttacgtgaatttattctaaaagcattttccaaaaagccaaagatttccagggagataagacaagcagaagatctgaatactaagaaggaaaactatatttctaaccatacacttgctgaaatgagcaaaggtcacaatttcctcaaggaaaaagataaaatcagtggttttggaagcagcgtggacaaacacttgatggaagacagtgatggtcaatcatttattcacaatcccagcctcacagtgacagtgccaattgcacctggggaatccgatttggaaaatatgaatgctgaggaacttagcagtgattcggatagtgaatacagcaaagtgagattaaaccggtcaagctcctcagagtgcagcacagttgataaccctttgcctggagaaggagaagaagcagaggctgaacctatgaattccgatgagccagaggcctgtttcacagatggttgtgtatggaggttctcatgctgccaagttaacatagagtcagggaaaggaaaaatctggtggaacatcaggaaaacctgctacaagattgttgaacacagttggtttgaaagcttcattgtcctcatgatcctgctcagcagtggtgccctggcttttgaagatatttatattgaaaggaaaaagaccattaagattatcctggagtatgcagacaagatcttcacttacatcttcattctggaaatgcttctaaaatggatagcatatggttataaaacatatttcaccaatgcctggtgttggctggatttcctaattgttgatgtttctttggttactttagtggcaaacactcttggctactcagatcttggccccattaaatcccttcggacactgagagctttaagacctctaagagccttatctagatttgaaggaatgagggtcgttgtgaatgcactcataggagcaattccttccatcatgaatgtgctacttgtgtgtcttatattctggctgatattcagcatcatgggagtaaatttgtttgctggcaagttctatgagtgtattaacaccacagatgggtcacggtttcctgcaagtcaagttccaaatcgttccgaatgttttgcccttatgaatgttagtcaaaatgtgcgatggaaaaacctgaaagtgaactttgataatgtcggacttggttacctatctctgcttcaagttgcaacttttaagggatggacgattattatgtatgcagcagtggattctgttaatgtagacaagcagcccaaatatgaatatagcctctacatgtatatttattttgtcgtctttatcatctttgggtcattcttcactttgaacttgttcattggtgtcatcatagataatttcaaccaacagaaaaagaagcttggaggtcaagacatctttatgacagaagaacagaagaaatactataatgcaatgaaaaagctggggtccaagaagccacaaaagccaattcctcgaccagggaacaaaatccaaggatgtatatttgacctagtgacaaatcaagcctttgatattagtatcatggttcttatctgtctcaacatggtaaccatgatggtagaaaaggagggtcaaagtcaacatatgactgaagttttatattggataaatgtggtttttataatccttttcactggagaatgtgtgctaaaactgatctccctcagacactactacttcactgtaggatggaatatttttgattttgtggttgtgattatctccattgtaggtatgtttctagctgatttgattgaaacgtattttgtgtcccctaccctgttccgagtgatccgtcttgccaggattggccgaatcctacgtctagtcaaaggagcaaaggggatccgcacgctgctctttgctttgatgatgtcccttcctgcgttgtttaacatcggcctcctgctcttcctggtcatgttcatctacgccatctttggaatgtccaactttgcctatgttaaaaaggaagatggaattaatgacatgttcaattttgagacctttggcaacagtatgatttgcctgttccaaattacaacctctgctggctgggatggattgctagcacctattcttaacagtaagccacccgactgtgacccaaaaaaagttcatcctggaagttcagttgaaggagactgtggtaacccatctgttggaatattctactttgttagttatatcatcatatccttcctggttgtggtgaacatgtacattgcagtcatactggagaattttagtgttgccactgaagaaagtactgaacctctgagtgaggatgactttgagatgttctatgaggtttgggagaagtttgatcccgatgcgacccagtttatagagttctctaaactctctgattttgcagctgccctggatcctcctcttctcatagcaaaacccaacaaagtccagctcattgccatggatctgcccatggttagtggtgaccggatccattgtcttgacatcttatttgcttttacaaagcgtgttttgggtgagagtggggagatggattctcttcgttcacagatggaagaaaggttcatgtctgcaaatccttccaaagtgtcctatgaacccatcacaaccacactaaaacggaaacaagaggatgtgtctgctactgtcattcagcgtgcttatagacgttaccgcttaaggcaaaatgtcaaaaatatatcaagtatatacataaaagatggagacagagatgatgatttactcaataaaaaagatatggcttttgataatgttaatgagaactcaagtccagaaaaaacagatgccacttcatccaccacctctccaccttcatatgatagtgtaacaaagccagacaaagagaaatatgaacaagacagaacagaaaaggaagacaaagggaaagacagcaaggaaagcaaaaaatag

SEQ ID NO: 182687 - DNA, 1618 bp, Homo sapiens
  Payload ID: 15997
  Gene Symbol: SCN9A
  Gene Name: sodium channel, voltage gated, type IX alpha subunit
  ENST ID: ENST00000452182
  CDS Start-End: 1-1618
attctgacaaactgcatatttatgaccatgaataacccaccggactggaccaaaaatgtcgagtacacttttactggaatatatacttttgaatcacttgtaaaaatccttgcaagaggcttctgtgtaggagaattcacttttcttcgtgacccgtggaactggctggattttgtcgtcattgtttttgcatatgtgacagagtttgtggacctgggcaatgtctcagcattgagaacattcagagttctccgagcattgaaaacaatttcagtcattccaggcctgaagacaattgtaggggctttgatccagtcagtgaagaagctttctgatgtcatgatcctgactgtgttctgtctgagtgtgtttgcactaattggactacagctgttcatgggaaacctgaagcataaatgttttcgaaattcacttgaaaataatgaaacattagaaagcataatgaataccctagagagtgaagaagactttagaaaatatttttattacttggaaggatccaaagatgctctcctttgtggtttcagcacagattcaggtcagtgtccagaggggtacacctgtgtgaaaattggcagaaaccctgattatggctacacgagctttgacactttcagctgggccttcttagccttgtttaggctaatgacccaagattactgggaaaacctttaccaacagacgctgcgtgctgctggcaaaacctacatgatcttctttgtcgtagtgattttcctgggctccttttatctaataaacttgatcctggctgtggttgccatggcatatgaagaacagaaccaggcaaacattgaagaagctaaacagaaagaattagaatttcaacagatgttagaccgtcttaaaaaagagcaagaagaagctgaggcaattgcagcggcagcggctgaatatacaagtattaggagaagcagaattatgggcctctcagagagttcttctgaaacatccaaactgagctctaaaagtgctaaagaaagaagaaacagaagaaagaaaaagaatcaaaagaagctctccagtggagaggaaaagggagatgctgagaaattgtcgaaatcagaatcagaggacagcatcagaagaaaaagtttccaccttggtgtcgaagggcataggcgagcacatgaaaagaggttgtctacccccaatcagtcaccactcagcattcgtggctccttgttttctgcaaggcgaagcagcagaacaagtctttttagtttcaaaggcagaggaagagatataggatctgagactgaatttgccgatgatgagcacagcatttttggagacaatgagagcagaaggggctcactgtttgtgccccacagaccccaggagcgacgcagcagtaacatcagccaagccagtaggtccccaccaatgctgccggtgaacgggaaaatgcacagtgctgtggactgcaacggtgtggtctccctggttgatggacgctcagccctcatgctccccaatggacagcttctgccagaggtgataatagataaggcaacttctgatgacagcggcacgaccaatcaaatacacaagaaaaggcgttgtagttcctatctcc

SEQ ID NO: 182688 - DNA, 1585 bp, Homo sapiens
  Payload ID: 15997
  Gene Symbol: SCN9A
  Gene Name: sodium channel, voltage gated, type IX alpha subunit
  ENST ID: ENST00000454569
  CDS Start-End: 1-1585
attctgacaaactgcatatttatgaccatgaataacccaccggactggaccaaaaatgtcgagtacacttttactggaatatatacttttgaatcacttgtaaaaatccttgcaagaggcttctgtgtaggagaattcacttttcttcgtgacccgtggaactggctggattttgtcgtcattgtttttgcatatgtgacagagtttgtggacctgggcaatgtctcagcattgagaacattcagagttctccgagcattgaaaacaatttcagtcattccaggcctgaagacaattgtaggggctttgatccagtcagtgaagaagctttctgatgtcatgatcctgactgtgttctgtctgagtgtgtttgcactaattggactacagctgttcatgggaaacctgaagcataaatgttttcgaaattcacttgaaaataatgaaacattagaaagcataatgaataccctagagagtgaagaagactttagaaaatatttttattacttggaaggatccaaagatgctctcctttgtggtttcagcacagattcaggtcagtgtccagaggggtacacctgtgtgaaaattggcagaaaccctgattatggctacacgagctttgacactttcagctgggccttcttagccttgtttaggctaatgacccaagattactgggaaaacctttaccaacagacgctgcgtgctgctggcaaaacctacatgatcttctttgtcgtagtgattttcctgggctccttttatctaataaacttgatcctggctgtggttgccatggcatatgaagaacagaaccaggcaaacattgaagaagctaaacagaaagaattagaatttcaacagatgttagaccgtcttaaaaaagagcaagaagaagctgaggcaattgcagcggcagcggctgaatatacaagtattaggagaagcagaattatgggcctctcagagagttcttctgaaacatccaaactgagctctaaaagtgctaaagaaagaagaaacagaagaaagaaaaagaatcaaaagaagctctccagtggagaggaaaagggagatgctgagaaattgtcgaaatcagaatcagaggacagcatcagaagaaaaagtttccaccttggtgtcgaagggcataggcgagcacatgaaaagaggttgtctacccccaatcagtcaccactcagcattcgtggctccttgttttctgcaaggcgaagcagcagaacaagtctttttagtttcaaaggcagaggaagagatataggatctgagactgaatttgccgatgatgagcacagcatttttggagacaatgagagcagaaggggctcactgtttgtgccccacagaccccaggagcgacgcagcagtaacatcagccaagccagtaggtccccaccaatgctgccggtgaacgggaaaatgcacagtgctgtggactgcaacggtgtggtctccctggttgatggacgctcagccctcatgctccccaatggacagcttctgccagagggcacgaccaatcaaatacacaagaaaaggcgttgtagttcctatctcc

SEQ ID NO: 182689 - DNA, 8456 bp, Homo sapiens
  Payload ID: 15998
  Gene Symbol: SCN5A
  Gene Name: sodium channel, voltage gated, type V alpha subunit
  Uniprot ID: Q14524
  ENST ID: ENST00000333535
  CDS Start-End: 151-6201
gccgctgagcctgcgcccagtgccccgagccccgcgccgagccgagtccgcgccaagcagcagccgcccaccccggggcccggccgggggaccagcagcttccccacaggcaacgtgaggagagcctgtgcccagaagcaggatgagaagatggcaaacttcctattacctcggggcaccagcagcttccgcaggttcacacgggagtccctggcagccatcgagaagcgcatggcagagaagcaagcccgcggctcaaccaccttgcaggagagccgagaggggctgcccgaggaggaggctccccggccccagctggacctgcaggcctccaaaaagctgccagatctctatggcaatccaccccaagagctcatcggagagcccctggaggacctggaccccttctatagcacccaaaagactttcatcgtactgaataaaggcaagaccatcttccggttcagtgccaccaacgccttgtatgtcctcagtcccttccaccccatccggagagcggctgtgaagattctggttcactcgctcttcaacatgctcatcatgtgcaccatcctcaccaactgcgtgttcatggcccagcacgaccctccaccctggaccaagtatgtcgagtacaccttcaccgccatttacacctttgagtctctggtcaagattctggctcgaggcttctgcctgcacgcgttcactttccttcgggacccatggaactggctggactttagtgtgattatcatggcatacacaactgaatttgtggacctgggcaatgtctcagccttacgcaccttccgagtcctccgggccctgaaaactatatcagtcatttcagggctgaagaccatcgtgggggccctgatccagtctgtgaagaagctggctgatgtgatggtcctcacagtcttctgcctcagcgtctttgccctcatcggcctgcagctcttcatgggcaacctaaggcacaagtgcgtgcgcaacttcacagcgctcaacggcaccaacggctccgtggaggccgacggcttggtctgggaatccctggacctttacctcagtgatccagaaaattacctgctcaagaacggcacctctgatgtgttactgtgtgggaacagctctgacgctgggacatgtccggagggctaccggtgcctaaaggcaggcgagaaccccgaccacggctacaccagcttcgattcctttgcctgggcctttcttgcactcttccgcctgatgacgcaggactgctgggagcgcctctatcagcagaccctcaggtccgcagggaagatctacatgatcttcttcatgcttgtcatcttcctggggtccttctacctggtgaacctgatcctggccgtggtcgcaatggcctatgaggagcaaaaccaagccaccatcgctgagaccgaggagaaggaaaagcgcttccaggaggccatggaaatgctcaagaaagaacacgaggccctcaccatcaggggtgtggataccgtgtcccgtagctccttggagatgtcccctttggccccagtaaacagccatgagagaagaagcaagaggagaaaacggatgtcttcaggaactgaggagtgtggggaggacaggctccccaagtctgactcagaagatggtcccagagcaatgaatcatctcagcctcacccgtggcctcagcaggacttctatgaagccacgttccagccgcgggagcattttcacctttcgcaggcgagacctgggttctgaagcagattttgcagatgatgaaaacagcacagcgggggagagcgagagccaccacacatcactgctggtgccctggcccctgcgccggaccagtgcccagggacagcccagtcccggaacctcggctcctggccacgccctccatggcaaaaagaacagcactgtggactgcaatggggtggtctcattactgggggcaggcgacccagaggccacatccccaggaagccacctcctccgccctgtgatgctagagcacccgccagacacgaccacgccatcggaggagccaggcgggccccagatgctgacctcccaggctccgtgtgtagatggcttcgaggagccaggagcacggcagcgggccctcagcgcagtcagcgtcctcaccagcgcactggaagagttagaggagtctcgccacaagtgtccaccatgctggaaccgtctcgcccagcgctacctgatctgggagtgctgcccgctgtggatgtccatcaagcagggagtgaagttggtggtcatggacccgtttactgacctcaccatcactatgtgcatcgtactcaacacactcttcatggcgctggagcactacaacatgacaagtgaattcgaggagatgctgcaggtcggaaacctggtcttcacagggattttcacagcagagatgaccttcaagatcattgccctcgacccctactactacttccaacagggctggaacatcttcgacagcatcatcgtcatccttagcctcatggagctgggcctgtcccgcatgagcaacttgtcggtgctgcgctccttccgcctgctgcgggtcttcaagctggccaaatcatggcccaccctgaacacactcatcaagatcatcgggaactcagtgggggcactggggaacctgacactggtgctagccatcatcgtgttcatctttgctgtggtgggcatgcagctctttggcaagaactactcggagctgagggacagcgactcaggcctgctgcctcgctggcacatgatggacttctttcatgccttcctcatcatcttccgcatcctctgtggagagtggatcgagaccatgtgggactgcatggaggtgtcggggcagtcattatgcctgctggtcttcttgcttgttatggtcattggcaaccttgtggtcctgaatctcttcctggccttgctgctcagctccttcagtgcagacaacctcacagcccctgatgaggacagagagatgaacaacctccagctggccctggcccgcatccagaggggcctgcgctttgtcaagcggaccacctgggatttctgctgtggtctcctgcggcagcggcctcagaagcccgcagcccttgccgcccagggccagctgcccagctgcattgccaccccctactccccgccacccccagagacggagaaggtgcctcccacccgcaaggaaacacggtttgaggaaggcgagcaaccaggccagggcacccccggggatccagagcccgtgtgtgtgcccatcgctgtggccgagtcagacacagatgaccaagaagaagatgaggagaacagcctgggcacggaggaggagtccagcaagcagcaggaatcccagcctgtgtccggtggcccagaggcccctccggattccaggacctggagccaggtgtcagcgactgcctcctctgaggccgaggccagtgcatctcaggccgactggcggcagcagtggaaagcggaaccccaggccccagggtgcggtgagaccccagaggacagttgctccgagggcagcacagcagacatgaccaacaccgctgagctcctggagcagatccctgacctcggccaggatgtcaaggacccagaggactgcttcactgaaggctgtgtccggcgctgtccctgctgtgcggtggacaccacacaggccccagggaaggtctggtggcggttgcgcaagacctgctaccacatcgtggagcacagctggttcgagacattcatcatcttcatgatcctactcagcagtggagcgctggccttcgaggacatctacctagaggagcggaagaccatcaaggttctgcttgagtatgccgacaagatgttcacatatgtcttcgtgctggagatgctgctcaagtgggtggcctacggcttcaagaagtacttcaccaatgcctggtgctggctcgacttcctcatcgtagacgtctctctggtcagcctggtggccaacaccctgggctttgccgagatgggccccatcaagtcactgcggacgctgcgtgcactccgtcctctgagagctctgtcacgatttgagggcatgagggtggtggtcaatgccctggtgggcgccatcccgtccatcatgaacgtcctcctcgtctgcctcatcttctggctcatcttcagcatcatgggcgtgaacctctttgcggggaagtttgggaggtgcatcaaccagacagagggagacttgcctttgaactacaccatcgtgaacaacaagagccagtgtgagtccttgaacttgaccggagaattgtactggaccaaggtgaaagtcaactttgacaacgtgggggccgggtacctggcccttctgcaggtggcaacatttaaaggctggatggacattatgtatgcagctgtggactccagggggtatgaagagcagcctcagtgggaatacaacctctacatgtacatctattttgtcattttcatcatctttgggtctttcttcaccctgaacctctttattggtgtcatcattgacaacttcaaccaacagaagaaaaagttagggggccaggacatcttcatgacagaggagcagaagaagtactacaatgccatgaagaagctgggctccaagaagccccagaagcccatcccacggcccctgaacaagtaccagggcttcatattcgacattgtgaccaagcaggcctttgacgtcaccatcatgtttctgatctgcttgaatatggtgaccatgatggtggagacagatgaccaaagtcctgagaaaatcaacatcttggccaagatcaacctgctctttgtggccatcttcacaggcgagtgtattgtcaagctggctgccctgcgccactactacttcaccaacagctggaatatcttcgacttcgtggttgtcatcctctccatcgtgggcactgtgctctcggacatcatccagaagtacttcttctccccgacgctcttccgagtcatccgcctggcccgaataggccgcatcctcagactgatccgaggggccaaggggatccgcacgctgctctttgccctcatgatgtccctgcctgccctcttcaacatcgggctgctgctcttcctcgtcatgttcatctactccatctttggcatggccaacttcgcttatgtcaagtgggaggctggcatcgacgacatgttcaacttccagaccttcgccaacagcatgctgtgcctcttccagatcaccacgtcggccggctgggatggcctcctcagccccatcctcaacactgggccgccctactgcgaccccactctgcccaacagcaatggctctcggggggactgcgggagcccagccgtgggcatcctcttcttcaccacctacatcatcatctccttcctcatcgtggtcaacatgtacattgccatcatcctggagaacttcagcgtggccacggaggagagcaccgagcccctgagtgaggacgacttcgatatgttctatgagatctgggagaaatttgacccagaggccactcagtttattgagtattcggtcctgtctgactttgccgatgccctgtctgagccactccgtatcgccaagcccaaccagataagcctcatcaacatggacctgcccatggtgagtggggaccgcatccattgcatggacattctctttgccttcaccaaaagggtcctgggggagtctggggagatggacgccctgaagatccagatggaggagaagttcatggcagccaacccatccaagatctcctacgagcccatcaccaccacactccggcgcaagcacgaagaggtgtcggccatggttatccagagagccttccgcaggcacctgctgcaacgctctttgaagcatgcctccttcctcttccgtcagcaggcgggcagcggcctctccgaagaggatgcccctgagcgagagggcctcatcgcctacgtgatgagtgagaacttctcccgaccccttggcccaccctccagctcctccatctcctccacttccttcccaccctcctatgacagtgtcactagagccaccagcgataacctccaggtgcgggggtctgactacagccacagtgaagatctcgccgacttccccccttctccggacagggaccgtgagtccatcgtgtgagcctcggcctggctggccaggacacactgaaaagcagcctttttcaccatggcaaacctaaatgcagtcagtcacaaaccagcctggggccttcctggctttgggagtaagaaatgggcctcagccccgcggatcaaccaggcagagttctgtggcgccgcgtggacagccggagcagttggcctgtgcttggaggcctcagatagacctgtgacctggtctggtcaggcaatgccctgcggctctggaaagcaacttcatcccagctgctgaggcgaaatataaaactgagactgtatatgttgtgaatgggctttcataaatttattatatttgatatttttttacttgagcaaagaactaaggatttttccatggacatgggcagcaattcacgctgtctcttcttaaccctgaacaagagtgtctatggagcagccggaagtctgttctcaaagcagaagtggaatccagtgtggctcccacaggtcttcactgcccaggggtcgaatggggtccccctcccacttgacctgagatgctgggagggctgaacccccactcacacaagcacacacacacagtcctcacacacggaggccagacacaggccgtgggacccaggctcccagcctaagggagacaggcctttccctgccggccccccaaggatggggttcttgtccacggggctcactctggccccctattgtctccaaggtcccattttccccctgtgttttcacgcaggtcatattgtcagtcctacaaaaataaaaggcttccagaggagagtggcctgggtcccagggctggccctaggcactgatagttgccttttcttcccctcctgtaagagtattaacaaaaccaaaggacacaagggtgcaagccccattcacggcctggcatgcagcttgtccttgctcctggaacctggcaggccctgcccagccagccatcggaagagagggctgagccatgggggtttggggctaagaagttcaccagccctgagccatggcggcccctcagcctgcctgaagagaggaaactggcgatctcccagggctctctggaccatacgcggaggagttttctgtgtggtctccagctcctctccagacacagagacatgggagtggggagcggagcttggccctgcgccctgtgcagggaaagggatggtcaggcccagttctcgtgcccttagaggggaatgaaccatggcacctttgagagagggggcactgtggtcaggcccagcctctctggctcagcccgggatcctgatggcacccacacagaggacctctttggggcaagatccaggtggtcccataggtcttgtgaaaaggctttttcagggaaaaatattttactagtccaatcacccccaggacctcttcagctgctgacaatcctatttagcatatgcaaatcttttaacatagagaactgtcaccctgaggtaacagggtcaactggcgaagcctgagcaggcaggggcttggctgccccattccagctctcccatggagcccctccaccgggcgcatgcctcccaggccacctcagtctcacctgccggctctgggctggctgctcctaacctacctcgccgagctgtcggagggctggacatttgtggcagtgctgaagggggcattgccggcgagtaaagtattatgtttcttcttgtcaccccagttcccttggtggcaaccccagacccaacccatgcccctgacagatctagttctcttctcctgtgttccctttgagtccagtgtgggacacggtttaactgtcccagcgacatttctccaagtggaaatcctatttttgtagatctccatgctttgctctcaaggcttggagaggtatgtgcccctcctgggtgctcaccgcctgctacacaggcaggaatgcggttgggaggcaggtcgggctgccagcccagctggccggaaggagactgtggtttttgtgtgtgtggacagcccgggagctttgagacaggtgcctggggctggctgcagacggtgtggttgggggtgggaggtgagctagacccaacccttagcttttagcctggctgtcacctttttaatttccagaactgcacaatgaccagcaggagggaaggacagacatcaagtgccagatgttgtctgaactaatcgagcacttctcaccaaacttcatgtataaataaaatacatatttttaaaacaaaccaataaatggcttac

SEQ ID NO: 182690 - DNA, 335 bp, Homo sapiens
  Payload ID: 15998
  Gene Symbol: SCN5A
  Gene Name: sodium channel, voltage gated, type V alpha subunit
  ENST ID: ENST00000327956
  CDS Start-End: 139-335
agtggacactgtgggcatgcgtgtccgtgcagcacatcgccatgcaggagcctgggggaaggcctttccctcagtgagggctgcagcttccccacaggcaacgtgaggagagcctgtgcccagaagcaggatgagaagatggcaaacttcctattacctcggggcaccagcagcttccgcaggttcacacgggagtccctggcagccatcgagaagcgcatggcagagaagcaagcccgcggctcaaccaccttgcaggagagccgagaggggctgcccgaggaggaggctccccggccccagctggacctgcaggcctccaaaaagctgccaga

SEQ ID NO: 182691 - DNA, 8343 bp, Homo sapiens
  Payload ID: 15998
  Gene Symbol: SCN5A
  Gene Name: sodium channel, voltage gated, type V alpha subunit
  ENST ID: ENST00000451551
  CDS Start-End: 196-6084
gagacggcggcggcgcccgtaggatgcagggatcgctcccccggggccgctgagcctgcgcccagtgccccgagccccgcgccgagccgagtccgcgccaagcagcagccgcccaccccggggcccggccgggggaccagcagcttccccacaggcaacgtgaggagagcctgtgcccagaagcaggatgagaagatggcaaacttcctattacctcggggcaccagcagcttccgcaggttcacacgggagtccctggcagccatcgagaagcgcatggcagagaagcaagcccgcggctcaaccaccttgcaggagagccgagaggggctgcccgaggaggaggctccccggccccagctggacctgcaggcctccaaaaagctgccagatctctatggcaatccaccccaagagctcatcggagagcccctggaggacctggaccccttctatagcacccaaaagactttcatcgtactgaataaaggcaagaccatcttccggttcagtgccaccaacgccttgtatgtcctcagtcccttccaccccatccggagagcggctgtgaagattctggttcactcgctcttcaacatgctcatcatgtgcaccatcctcaccaactgcgtgttcatggcccagcacgaccctccaccctggaccaagtatgtcgagtacaccttcaccgccatttacacctttgagtctctggtcaagattctggctcgaggcttctgcctgcacgcgttcactttccttcgggacccatggaactggctggactttagtgtgattatcatggcgtatgtatcagaaaatataaaactaggcaatttgtcggctcttcgaactttcagagtcctgagagctctaaaaactatttcagttatcccagggctgaagaccatcgtgggggccctgatccagtctgtgaagaagctggctgatgtgatggtcctcacagtcttctgcctcagcgtctttgccctcatcggcctgcagctcttcatgggcaacctaaggcacaagtgcgtgcgcaacttcacagcgctcaacggcaccaacggctccgtggaggccgacggcttggtctgggaatccctggacctttacctcagtgatccagaaaattacctgctcaagaacggcacctctgatgtgttactgtgtgggaacagctctgacgctgggacatgtccggagggctaccggtgcctaaaggcaggcgagaaccccgaccacggctacaccagcttcgattcctttgcctgggcctttcttgcactcttccgcctgatgacgcaggactgctgggagcgcctctatcagcagaccctcaggtccgcagggaagatctacatgatcttcttcatgcttgtcatcttcctggggtccttctacctggtgaacctgatcctggccgtggtcgcaatggcctatgaggagcaaaaccaagccaccatcgctgagaccgaggagaaggaaaagcgcttccaggaggccatggaaatgctcaagaaagaacacgaggccctcaccatcaggggtgtggataccgtgtcccgtagctccttggagatgtcccctttggccccagtaaacagccatgagagaagaagcaagaggagaaaacggatgtcttcaggaactgaggagtgtggggaggacaggctccccaagtctgactcagaagatggtcccagagcaatgaatcatctcagcctcacccgtggcctcagcaggacttctatgaagccacgttccagccgcgggagcattttcacctttcgcaggcgagacctgggttctgaagcagattttgcagatgatgaaaacagcacagcgggggagagcgagagccaccacacatcactgctggtgccctggcccctgcgccggaccagtgcccagggacagcccagtcccggaacctcggctcctggccacgccctccatggcaaaaagaacagcactgtggactgcaatggggtggtctcattactgggggcaggcgacccagaggccacatccccaggaagccacctcctccgccctgtgatgctagagcacccgccagacacgaccacgccatcggaggagccaggcgggccccagatgctgacctcccaggctccgtgtgtagatggcttcgaggagccaggagcacggcagcgggccctcagcgcagtcagcgtcctcaccagcgcactggaagagttagaggagtctcgccacaagtgtccaccatgctggaaccgtctcgcccagcgctacctgatctgggagtgctgcccgctgtggatgtccatcaagcagggagtgaagttggtggtcatggacccgtttactgacctcaccatcactatgtgcatcgtactcaacacactcttcatggcgctggagcactacaacatgacaagtgaattcgaggagatgctgcaggtcggaaacctggtcttcacagggattttcacagcagagatgaccttcaagatcattgccctcgacccctactactacttccaacagggctggaacatcttcgacagcatcatcgtcatccttagcctcatggagctgggcctgtcccgcatgagcaacttgtcggtgctgcgctccttccgcctgctgcgggtcttcaagctggccaaatcatggcccaccctgaacacactcatcaagatcatcgggaactcagtgggggcactggggaacctgacactggtgctagccatcatcgtgttcatctttgctgtggtgggcatgcagctctttggcaagaactactcggagctgagggacagcgactcaggcctgctgcctcgctggcacatgatggacttctttcatgccttcctcatcatcttccgcatcctctgtggagagtggatcgagaccatgtgggactgcatggaggtgtcggggcagtcattatgcctgctggtcttcttgcttgttatggtcattggcaaccttgtggtcctgaatctcttcctggccttgctgctcagctccttcagtgcagacaacctcacagcccctgatgaggacagagagatgaacaacctccagctggccctggcccgcatccagaggggcctgcgctttgtcaagcggaccacctgggatttctgctgtggtctcctgcggcagcggcctcagaagcccgcagcccttgccgcccagggccagctgcccagctgcattgccaccccctactccccgccacccccagagacggagaaggtgcctcccacccgcaaggaaacacggtttgaggaaggcgagcaaccaggccagggcacccccggggatccagagcccgtgtgtgtgcccatcgctgtggccgagtcagacacagatgaccaagaagaagatgaggagaacagcctgggcacggaggaggagtccagcaagcagaccccagaggacagttgctccgagggcagcacagcagacatgaccaacaccgctgagctcctggagcagatccctgacctcggccaggatgtcaaggacccagaggactgcttcactgaaggctgtgtccggcgctgtccctgctgtgcggtggacaccacacaggccccagggaaggtctggtggcggttgcgcaagacctgctaccacatcgtggagcacagctggttcgagacattcatcatcttcatgatcctactcagcagtggagcgctggccttcgaggacatctacctagaggagcggaagaccatcaaggttctgcttgagtatgccgacaagatgttcacatatgtcttcgtgctggagatgctgctcaagtgggtggcctacggcttcaagaagtacttcaccaatgcctggtgctggctcgacttcctcatcgtagacgtctctctggtcagcctggtggccaacaccctgggctttgccgagatgggccccatcaagtcactgcggacgctgcgtgcactccgtcctctgagagctctgtcacgatttgagggcatgagggtggtggtcaatgccctggtgggcgccatcccgtccatcatgaacgtcctcctcgtctgcctcatcttctggctcatcttcagcatcatgggcgtgaacctctttgcggggaagtttgggaggtgcatcaaccagacagagggagacttgcctttgaactacaccatcgtgaacaacaagagccagtgtgagtccttgaacttgaccggagaattgtactggaccaaggtgaaagtcaactttgacaacgtgggggccgggtacctggcccttctgcaggtggcaacatttaaaggctggatggacattatgtatgcagctgtggactccagggggtatgaagagcagcctcagtgggaatacaacctctacatgtacatctattttgtcattttcatcatctttgggtctttcttcaccctgaacctctttattggtgtcatcattgacaacttcaaccaacagaagaaaaagttagggggccaggacatcttcatgacagaggagcagaagaagtactacaatgccatgaagaagctgggctccaagaagccccagaagcccatcccacggcccctgaacaagtaccagggcttcatattcgacattgtgaccaagcaggcctttgacgtcaccatcatgtttctgatctgcttgaatatggtgaccatgatggtggagacagatgaccaaagtcctgagaaaatcaacatcttggccaagatcaacctgctctttgtggccatcttcacaggcgagtgtattgtcaagctggctgccctgcgccactactacttcaccaacagctggaatatcttcgacttcgtggttgtcatcctctccatcgtgggcactgtgctctcggacatcatccagaagtacttcttctccccgacgctcttccgagtcatccgcctggcccgaataggccgcatcctcagactgatccgaggggccaaggggatccgcacgctgctctttgccctcatgatgtccctgcctgccctcttcaacatcgggctgctgctcttcctcgtcatgttcatctactccatctttggcatggccaacttcgcttatgtcaagtgggaggctggcatcgacgacatgttcaacttccagaccttcgccaacagcatgctgtgcctcttccagatcaccacgtcggccggctgggatggcctcctcagccccatcctcaacactgggccgccctactgcgaccccactctgcccaacagcaatggctctcggggggactgcgggagcccagccgtgggcatcctcttcttcaccacctacatcatcatctccttcctcatcgtggtcaacatgtacattgccatcatcctggagaacttcagcgtggccacggaggagagcaccgagcccctgagtgaggacgacttcgatatgttctatgagatctgggagaaatttgacccagaggccactcagtttattgagtattcggtcctgtctgactttgccgatgccctgtctgagccactccgtatcgccaagcccaaccagataagcctcatcaacatggacctgcccatggtgagtggggaccgcatccattgcatggacattctctttgccttcaccaaaagggtcctgggggagtctggggagatggacgccctgaagatccagatggaggagaagttcatggcagccaacccatccaagatctcctacgagcccatcaccaccacactccggcgcaagcacgaagaggtgtcggccatggttatccagagagccttccgcaggcacctgctgcaacgctctttgaagcatgcctccttcctcttccgtcagcaggcgggcagcggcctctccgaagaggatgcccctgagcgagagggcctcatcgcctacgtgatgagtgagaacttctcccgaccccttggcccaccctccagctcctccatctcctccacttccttcccaccctcctatgacagtgtcactagagccaccagcgataacctccaggtgcgggggtctgactacagccacagtgaagatctcgccgacttccccccttctccggacagggaccgtgagtccatcgtgtgagcctcggcctggctggccaggacacactgaaaagcagcctttttcaccatggcaaacctaaatgcagtcagtcacaaaccagcctggggccttcctggctttgggagtaagaaatgggcctcagccccgcggatcaaccaggcagagttctgtggcgccgcgtggacagccggagcagttggcctgtgcttggaggcctcagatagacctgtgacctggtctggtcaggcaatgccctgcggctctggaaagcaacttcatcccagctgctgaggcgaaatataaaactgagactgtatatgttgtgaatgggctttcataaatttattatatttgatatttttttacttgagcaaagaactaaggatttttccatggacatgggcagcaattcacgctgtctcttcttaaccctgaacaagagtgtctatggagcagccggaagtctgttctcaaagcagaagtggaatccagtgtggctcccacaggtcttcactgcccaggggtcgaatggggtccccctcccacttgacctgagatgctgggagggctgaacccccactcacacaagcacacacacacagtcctcacacacggaggccagacacaggccgtgggacccaggctcccagcctaagggagacaggcctttccctgccggccccccaaggatggggttcttgtccacggggctcactctggccccctattgtctccaaggtcccattttccccctgtgttttcacgcaggtcatattgtcagtcctacaaaaataaaaggcttccagaggagagtggcctgggtcccagggctggccctaggcactgatagttgccttttcttcccctcctgtaagagtattaacaaaaccaaaggacacaagggtgcaagccccattcacggcctggcatgcagcttgtccttgctcctggaacctggcaggccctgcccagccagccatcggaagagagggctgagccatgggggtttggggctaagaagttcaccagccctgagccatggcggcccctcagcctgcctgaagagaggaaactggcgatctcccagggctctctggaccatacgcggaggagttttctgtgtggtctccagctcctctccagacacagagacatgggagtggggagcggagcttggccctgcgccctgtgcagggaaagggatggtcaggcccagttctcgtgcccttagaggggaatgaaccatggcacctttgagagagggggcactgtggtcaggcccagcctctctggctcagcccgggatcctgatggcacccacacagaggacctctttggggcaagatccaggtggtcccataggtcttgtgaaaaggctttttcagggaaaaatattttactagtccaatcacccccaggacctcttcagctgctgacaatcctatttagcatatgcaaatcttttaacatagagaactgtcaccctgaggtaacagggtcaactggcgaagcctgagcaggcaggggcttggctgccccattccagctctcccatggagcccctccaccgggcgcatgcctcccaggccacctcagtctcacctgccggctctgggctggctgctcctaacctacctcgccgagctgtcggagggctggacatttgtggcagtgctgaagggggcattgccggcgagtaaagtattatgtttcttcttgtcaccccagttcccttggtggcaaccccagacccaacccatgcccctgacagatctagttctcttctcctgtgttccctttgagtccagtgtgggacacggtttaactgtcccagcgacatttctccaagtggaaatcctatttttgtagatctccatgctttgctctcaaggcttggagaggtatgtgcccctcctgggtgctcaccgcctgctacacaggcaggaatgcggttgggaggcaggtcgggctgccagcccagctggccggaaggagactgtggtttttgtgtgtgtggacagcccgggagctttgagacaggtgcctggggctggctgcagacggtgtggttgggggtgggaggtgagctagacccaacccttagcttttagcctggctgtcacctttttaatttccagaactgcacaatgaccagcaggagggaaggacagacatcaagtgccagatgttgtctgaactaatcgagcacttctcaccaaacttcatgtataaataaaatacatatttttaaaacaaaccaataaatggcttacatga

SEQ ID NO: 182692 - DNA, 8362 bp, Homo sapiens
  Payload ID: 15998
  Gene Symbol: SCN5A
  Gene Name: sodium channel, voltage gated, type V alpha subunit
  Uniprot ID: Q14524
  ENST ID: ENST00000423572
  CDS Start-End: 56-6103
cagcttccccacaggcaacgtgaggagagcctgtgcccagaagcaggatgagaagatggcaaacttcctattacctcggggcaccagcagcttccgcaggttcacacgggagtccctggcagccatcgagaagcgcatggcagagaagcaagcccgcggctcaaccaccttgcaggagagccgagaggggctgcccgaggaggaggctccccggccccagctggacctgcaggcctccaaaaagctgccagatctctatggcaatccaccccaagagctcatcggagagcccctggaggacctggaccccttctatagcacccaaaagactttcatcgtactgaataaaggcaagaccatcttccggttcagtgccaccaacgccttgtatgtcctcagtcccttccaccccatccggagagcggctgtgaagattctggttcactcgctcttcaacatgctcatcatgtgcaccatcctcaccaactgcgtgttcatggcccagcacgaccctccaccctggaccaagtatgtcgagtacaccttcaccgccatttacacctttgagtctctggtcaagattctggctcgaggcttctgcctgcacgcgttcactttccttcgggacccatggaactggctggactttagtgtgattatcatggcatacacaactgaatttgtggacctgggcaatgtctcagccttacgcaccttccgagtcctccgggccctgaaaactatatcagtcatttcagggctgaagaccatcgtgggggccctgatccagtctgtgaagaagctggctgatgtgatggtcctcacagtcttctgcctcagcgtctttgccctcatcggcctgcagctcttcatgggcaacctaaggcacaagtgcgtgcgcaacttcacagcgctcaacggcaccaacggctccgtggaggccgacggcttggtctgggaatccctggacctttacctcagtgatccagaaaattacctgctcaagaacggcacctctgatgtgttactgtgtgggaacagctctgacgctgggacatgtccggagggctaccggtgcctaaaggcaggcgagaaccccgaccacggctacaccagcttcgattcctttgcctgggcctttcttgcactcttccgcctgatgacgcaggactgctgggagcgcctctatcagcagaccctcaggtccgcagggaagatctacatgatcttcttcatgcttgtcatcttcctggggtccttctacctggtgaacctgatcctggccgtggtcgcaatggcctatgaggagcaaaaccaagccaccatcgctgagaccgaggagaaggaaaagcgcttccaggaggccatggaaatgctcaagaaagaacacgaggccctcaccatcaggggtgtggataccgtgtcccgtagctccttggagatgtcccctttggccccagtaaacagccatgagagaagaagcaagaggagaaaacggatgtcttcaggaactgaggagtgtggggaggacaggctccccaagtctgactcagaagatggtcccagagcaatgaatcatctcagcctcacccgtggcctcagcaggacttctatgaagccacgttccagccgcgggagcattttcacctttcgcaggcgagacctgggttctgaagcagattttgcagatgatgaaaacagcacagcgggggagagcgagagccaccacacatcactgctggtgccctggcccctgcgccggaccagtgcccagggacagcccagtcccggaacctcggctcctggccacgccctccatggcaaaaagaacagcactgtggactgcaatggggtggtctcattactgggggcaggcgacccagaggccacatccccaggaagccacctcctccgccctgtgatgctagagcacccgccagacacgaccacgccatcggaggagccaggcgggccccagatgctgacctcccaggctccgtgtgtagatggcttcgaggagccaggagcacggcagcgggccctcagcgcagtcagcgtcctcaccagcgcactggaagagttagaggagtctcgccacaagtgtccaccatgctggaaccgtctcgcccagcgctacctgatctgggagtgctgcccgctgtggatgtccatcaagcagggagtgaagttggtggtcatggacccgtttactgacctcaccatcactatgtgcatcgtactcaacacactcttcatggcgctggagcactacaacatgacaagtgaattcgaggagatgctgcaggtcggaaacctggtcttcacagggattttcacagcagagatgaccttcaagatcattgccctcgacccctactactacttccaacagggctggaacatcttcgacagcatcatcgtcatccttagcctcatggagctgggcctgtcccgcatgagcaacttgtcggtgctgcgctccttccgcctgctgcgggtcttcaagctggccaaatcatggcccaccctgaacacactcatcaagatcatcgggaactcagtgggggcactggggaacctgacactggtgctagccatcatcgtgttcatctttgctgtggtgggcatgcagctctttggcaagaactactcggagctgagggacagcgactcaggcctgctgcctcgctggcacatgatggacttctttcatgccttcctcatcatcttccgcatcctctgtggagagtggatcgagaccatgtgggactgcatggaggtgtcggggcagtcattatgcctgctggtcttcttgcttgttatggtcattggcaaccttgtggtcctgaatctcttcctggccttgctgctcagctccttcagtgcagacaacctcacagcccctgatgaggacagagagatgaacaacctccagctggccctggcccgcatccagaggggcctgcgctttgtcaagcggaccacctgggatttctgctgtggtctcctgcggcagcggcctcagaagcccgcagcccttgccgcccagggccagctgcccagctgcattgccaccccctactccccgccacccccagagacggagaaggtgcctcccacccgcaaggaaacacggtttgaggaaggcgagcaaccaggccagggcacccccggggatccagagcccgtgtgtgtgcccatcgctgtggccgagtcagacacagatgaccaagaagaagatgaggagaacagcctgggcacggaggaggagtccagcaagcaggaatcccagcctgtgtccggtggcccagaggcccctccggattccaggacctggagccaggtgtcagcgactgcctcctctgaggccgaggccagtgcatctcaggccgactggcggcagcagtggaaagcggaaccccaggccccagggtgcggtgagaccccagaggacagttgctccgagggcagcacagcagacatgaccaacaccgctgagctcctggagcagatccctgacctcggccaggatgtcaaggacccagaggactgcttcactgaaggctgtgtccggcgctgtccctgctgtgcggtggacaccacacaggccccagggaaggtctggtggcggttgcgcaagacctgctaccacatcgtggagcacagctggttcgagacattcatcatcttcatgatcctactcagcagtggagcgctggccttcgaggacatctacctagaggagcggaagaccatcaaggttctgcttgagtatgccgacaagatgttcacatatgtcttcgtgctggagatgctgctcaagtgggtggcctacggcttcaagaagtacttcaccaatgcctggtgctggctcgacttcctcatcgtagacgtctctctggtcagcctggtggccaacaccctgggctttgccgagatgggccccatcaagtcactgcggacgctgcgtgcactccgtcctctgagagctctgtcacgatttgagggcatgagggtggtggtcaatgccctggtgggcgccatcccgtccatcatgaacgtcctcctcgtctgcctcatcttctggctcatcttcagcatcatgggcgtgaacctctttgcggggaagtttgggaggtgcatcaaccagacagagggagacttgcctttgaactacaccatcgtgaacaacaagagccagtgtgagtccttgaacttgaccggagaattgtactggaccaaggtgaaagtcaactttgacaacgtgggggccgggtacctggcccttctgcaggtggcaacatttaaaggctggatggacattatgtatgcagctgtggactccagggggtatgaagagcagcctcagtgggaatacaacctctacatgtacatctattttgtcattttcatcatctttgggtctttcttcaccctgaacctctttattggtgtcatcattgacaacttcaaccaacagaagaaaaagttagggggccaggacatcttcatgacagaggagcagaagaagtactacaatgccatgaagaagctgggctccaagaagccccagaagcccatcccacggcccctgaacaagtaccagggcttcatattcgacattgtgaccaagcaggcctttgacgtcaccatcatgtttctgatctgcttgaatatggtgaccatgatggtggagacagatgaccaaagtcctgagaaaatcaacatcttggccaagatcaacctgctctttgtggccatcttcacaggcgagtgtattgtcaagctggctgccctgcgccactactacttcaccaacagctggaatatcttcgacttcgtggttgtcatcctctccatcgtgggcactgtgctctcggacatcatccagaagtacttcttctccccgacgctcttccgagtcatccgcctggcccgaataggccgcatcctcagactgatccgaggggccaaggggatccgcacgctgctctttgccctcatgatgtccctgcctgccctcttcaacatcgggctgctgctcttcctcgtcatgttcatctactccatctttggcatggccaacttcgcttatgtcaagtgggaggctggcatcgacgacatgttcaacttccagaccttcgccaacagcatgctgtgcctcttccagatcaccacgtcggccggctgggatggcctcctcagccccatcctcaacactgggccgccctactgcgaccccactctgcccaacagcaatggctctcggggggactgcgggagcccagccgtgggcatcctcttcttcaccacctacatcatcatctccttcctcatcgtggtcaacatgtacattgccatcatcctggagaacttcagcgtggccacggaggagagcaccgagcccctgagtgaggacgacttcgatatgttctatgagatctgggagaaatttgacccagaggccactcagtttattgagtattcggtcctgtctgactttgccgatgccctgtctgagccactccgtatcgccaagcccaaccagataagcctcatcaacatggacctgcccatggtgagtggggaccgcatccattgcatggacattctctttgccttcaccaaaagggtcctgggggagtctggggagatggacgccctgaagatccagatggaggagaagttcatggcagccaacccatccaagatctcctacgagcccatcaccaccacactccggcgcaagcacgaagaggtgtcggccatggttatccagagagccttccgcaggcacctgctgcaacgctctttgaagcatgcctccttcctcttccgtcagcaggcgggcagcggcctctccgaagaggatgcccctgagcgagagggcctcatcgcctacgtgatgagtgagaacttctcccgaccccttggcccaccctccagctcctccatctcctccacttccttcccaccctcctatgacagtgtcactagagccaccagcgataacctccaggtgcgggggtctgactacagccacagtgaagatctcgccgacttccccccttctccggacagggaccgtgagtccatcgtgtgagcctcggcctggctggccaggacacactgaaaagcagcctttttcaccatggcaaacctaaatgcagtcagtcacaaaccagcctggggccttcctggctttgggagtaagaaatgggcctcagccccgcggatcaaccaggcagagttctgtggcgccgcgtggacagccggagcagttggcctgtgcttggaggcctcagatagacctgtgacctggtctggtcaggcaatgccctgcggctctggaaagcaacttcatcccagctgctgaggcgaaatataaaactgagactgtatatgttgtgaatgggctttcataaatttattatatttgatatttttttacttgagcaaagaactaaggatttttccatggacatgggcagcaattcacgctgtctcttcttaaccctgaacaagagtgtctatggagcagccggaagtctgttctcaaagcagaagtggaatccagtgtggctcccacaggtcttcactgcccaggggtcgaatggggtccccctcccacttgacctgagatgctgggagggctgaacccccactcacacaagcacacacacacagtcctcacacacggaggccagacacaggccgtgggacccaggctcccagcctaagggagacaggcctttccctgccggccccccaaggatggggttcttgtccacggggctcactctggccccctattgtctccaaggtcccattttccccctgtgttttcacgcaggtcatattgtcagtcctacaaaaataaaaggcttccagaggagagtggcctgggtcccagggctggccctaggcactgatagttgccttttcttcccctcctgtaagagtattaacaaaaccaaaggacacaagggtgcaagccccattcacggcctggcatgcagcttgtccttgctcctggaacctggcaggccctgcccagccagccatcggaagagagggctgagccatgggggtttggggctaagaagttcaccagccctgagccatggcggcccctcagcctgcctgaagagaggaaactggcgatctcccagggctctctggaccatacgcggaggagttttctgtgtggtctccagctcctctccagacacagagacatgggagtggggagcggagcttggccctgcgccctgtgcagggaaagggatggtcaggcccagttctcgtgcccttagaggggaatgaaccatggcacctttgagagagggggcactgtggtcaggcccagcctctctggctcagcccgggatcctgatggcacccacacagaggacctctttggggcaagatccaggtggtcccataggtcttgtgaaaaggctttttcagggaaaaatattttactagtccaatcacccccaggacctcttcagctgctgacaatcctatttagcatatgcaaatcttttaacatagagaactgtcaccctgaggtaacagggtcaactggcgaagcctgagcaggcaggggcttggctgccccattccagctctcccatggagcccctccaccgggcgcatgcctcccaggccacctcagtctcacctgccggctctgggctggctgctcctaacctacctcgccgagctgtcggagggctggacatttgtggcagtgctgaagggggcattgccggcgagtaaagtattatgtttcttcttgtcaccccagttcccttggtggcaaccccagacccaacccatgcccctgacagatctagttctcttctcctgtgttccctttgagtccagtgtgggacacggtttaactgtcccagcgacatttctccaagtggaaatcctatttttgtagatctccatgctttgctctcaaggcttggagaggtatgtgcccctcctgggtgctcaccgcctgctacacaggcaggaatgcggttgggaggcaggtcgggctgccagcccagctggccggaaggagactgtggtttttgtgtgtgtggacagcccgggagctttgagacaggtgcctggggctggctgcagacggtgtggttgggggtgggaggtgagctagacccaacccttagcttttagcctggctgtcacctttttaatttccagaactgcacaatgaccagcaggagggaaggacagacatcaagtgccagatgttgtctgaactaatcgagcacttctcaccaaacttcatgtataaataaaatacatatttttaaaacaaaccaataaatggcttacatga

SEQ ID NO: 182693 - DNA, 8303 bp, Homo sapiens
  Payload ID: 15998
  Gene Symbol: SCN5A
  Gene Name: sodium channel, voltage gated, type V alpha subunit
  ENST ID: ENST00000414099
  CDS Start-End: 43-6039
ggcaacgtgaggagagcctgtgcccagaagcaggatgagaagatggcaaacttcctattacctcggggcaccagcagcttccgcaggttcacacgggagtccctggcagccatcgagaagcgcatggcagagaagcaagcccgcggctcaaccaccttgcaggagagccgagaggggctgcccgaggaggaggctccccggccccagctggacctgcaggcctccaaaaagctgccagatctctatggcaatccaccccaagagctcatcggagagcccctggaggacctggaccccttctatagcacccaaaagactttcatcgtactgaataaaggcaagaccatcttccggttcagtgccaccaacgccttgtatgtcctcagtcccttccaccccatccggagagcggctgtgaagattctggttcactcgctcttcaacatgctcatcatgtgcaccatcctcaccaactgcgtgttcatggcccagcacgaccctccaccctggaccaagtatgtcgagtacaccttcaccgccatttacacctttgagtctctggtcaagattctggctcgaggcttctgcctgcacgcgttcactttccttcgggacccatggaactggctggactttagtgtgattatcatggcgtatgtatcagaaaatataaaactaggcaatttgtcggctcttcgaactttcagagtcctgagagctctaaaaactatttcagttatcccagggctgaagaccatcgtgggggccctgatccagtctgtgaagaagctggctgatgtgatggtcctcacagtcttctgcctcagcgtctttgccctcatcggcctgcagctcttcatgggcaacctaaggcacaagtgcgtgcgcaacttcacagcgctcaacggcaccaacggctccgtggaggccgacggcttggtctgggaatccctggacctttacctcagtgatccagaaaattacctgctcaagaacggcacctctgatgtgttactgtgtgggaacagctctgacgctgggacatgtccggagggctaccggtgcctaaaggcaggcgagaaccccgaccacggctacaccagcttcgattcctttgcctgggcctttcttgcactcttccgcctgatgacgcaggactgctgggagcgcctctatcagcagaccctcaggtccgcagggaagatctacatgatcttcttcatgcttgtcatcttcctggggtccttctacctggtgaacctgatcctggccgtggtcgcaatggcctatgaggagcaaaaccaagccaccatcgctgagaccgaggagaaggaaaagcgcttccaggaggccatggaaatgctcaagaaagaacacgaggccctcaccatcaggggtgtggataccgtgtcccgtagctccttggagatgtcccctttggccccagtaaacagccatgagagaagaagcaagaggagaaaacggatgtcttcaggaactgaggagtgtggggaggacaggctccccaagtctgactcagaagatggtcccagagcaatgaatcatctcagcctcacccgtggcctcagcaggacttctatgaagccacgttccagccgcgggagcattttcacctttcgcaggcgagacctgggttctgaagcagattttgcagatgatgaaaacagcacagcgggggagagcgagagccaccacacatcactgctggtgccctggcccctgcgccggaccagtgcccagggacagcccagtcccggaacctcggctcctggccacgccctccatggcaaaaagaacagcactgtggactgcaatggggtggtctcattactgggggcaggcgacccagaggccacatccccaggaagccacctcctccgccctgtgatgctagagcacccgccagacacgaccacgccatcggaggagccaggcgggccccagatgctgacctcccaggctccgtgtgtagatggcttcgaggagccaggagcacggcagcgggccctcagcgcagtcagcgtcctcaccagcgcactggaagagttagaggagtctcgccacaagtgtccaccatgctggaaccgtctcgcccagcgctacctgatctgggagtgctgcccgctgtggatgtccatcaagcagggagtgaagttggtggtcatggacccgtttactgacctcaccatcactatgtgcatcgtactcaacacactcttcatggcgctggagcactacaacatgacaagtgaattcgaggagatgctgcaggtcggaaacctggtcttcacagggattttcacagcagagatgaccttcaagatcattgccctcgacccctactactacttccaacagggctggaacatcttcgacagcatcatcgtcatccttagcctcatggagctgggcctgtcccgcatgagcaacttgtcggtgctgcgctccttccgcctgctgcgggtcttcaagctggccaaatcatggcccaccctgaacacactcatcaagatcatcgggaactcagtgggggcactggggaacctgacactggtgctagccatcatcgtgttcatctttgctgtggtgggcatgcagctctttggcaagaactactcggagctgagggacagcgactcaggcctgctgcctcgctggcacatgatggacttctttcatgccttcctcatcatcttccgcatcctctgtggagagtggatcgagaccatgtgggactgcatggaggtgtcggggcagtcattatgcctgctggtcttcttgcttgttatggtcattggcaaccttgtggtcctgaatctcttcctggccttgctgctcagctccttcagtgcagacaacctcacagcccctgatgaggacagagagatgaacaacctccagctggccctggcccgcatccagaggggcctgcgctttgtcaagcggaccacctgggatttctgctgtggtctcctgcggcagcggcctcagaagcccgcagcccttgccgcccagggccagctgcccagctgcattgccaccccctactccccgccacccccagagacggagaaggtgcctcccacccgcaaggaaacacggtttgaggaaggcgagcaaccaggccagggcacccccggggatccagagcccgtgtgtgtgcccatcgctgtggccgagtcagacacagatgaccaagaagaagatgaggagaacagcctgggcacggaggaggagtccagcaagcagcaggaatcccagcctgtgtccggtggcccagaggcccctccggattccaggacctggagccaggtgtcagcgactgcctcctctgaggccgaggccagtgcatctcaggccgactggcggcagcagtggaaagcggaaccccaggccccagggtgcggtgagaccccagaggacagttgctccgagggcagcacagcagacatgaccaacaccgctgagctcctggagcagatccctgacctcggccaggatgtcaaggacccagaggactgcttcactgaaggctgtgtccggcgctgtccctgctgtgcggtggacaccacacaggccccagggaaggtctggtggcggttgcgcaagacctgctaccacatcgtggagcacagctggttcgagacattcatcatcttcatgatcctactcagcagtggagcgctggccttcgaggacatctacctagaggagcggaagaccatcaaggttctgcttgagtatgccgacaagatgttcacatatgtcttcgtgctggagatgctgctcaagtgggtggcctacggcttcaagaagtacttcaccaatgcctggtgctggctcgacttcctcatcgtagacgtctctctggtcagcctggtggccaacaccctgggctttgccgagatgggccccatcaagtcactgcggacgctgcgtgcactccgtcctctgagagctctgtcacgatttgagggcatgagggtggtggtcaatgccctggtgggcgccatcccgtccatcatgaacgtcctcctcgtctgcctcatcttctggctcatcttcagcatcatgggcgtgaacctctttgcggggaagtttgggaggtgcatcaaccagacagagggagacttgcctttgaactacaccatcgtgaacaacaagagccagtgtgagtccttgaacttgaccggagaattgtactggaccaaggtgaaagtcaactttgacaacgtgggggccgggtacctggcccttctgcaggtgtatgaagagcagcctcagtgggaatacaacctctacatgtacatctattttgtcattttcatcatctttgggtctttcttcaccctgaacctctttattggtgtcatcattgacaacttcaaccaacagaagaaaaagttagggggccaggacatcttcatgacagaggagcagaagaagtactacaatgccatgaagaagctgggctccaagaagccccagaagcccatcccacggcccctgaacaagtaccagggcttcatattcgacattgtgaccaagcaggcctttgacgtcaccatcatgtttctgatctgcttgaatatggtgaccatgatggtggagacagatgaccaaagtcctgagaaaatcaacatcttggccaagatcaacctgctctttgtggccatcttcacaggcgagtgtattgtcaagctggctgccctgcgccactactacttcaccaacagctggaatatcttcgacttcgtggttgtcatcctctccatcgtgggcactgtgctctcggacatcatccagaagtacttcttctccccgacgctcttccgagtcatccgcctggcccgaataggccgcatcctcagactgatccgaggggccaaggggatccgcacgctgctctttgccctcatgatgtccctgcctgccctcttcaacatcgggctgctgctcttcctcgtcatgttcatctactccatctttggcatggccaacttcgcttatgtcaagtgggaggctggcatcgacgacatgttcaacttccagaccttcgccaacagcatgctgtgcctcttccagatcaccacgtcggccggctgggatggcctcctcagccccatcctcaacactgggccgccctactgcgaccccactctgcccaacagcaatggctctcggggggactgcgggagcccagccgtgggcatcctcttcttcaccacctacatcatcatctccttcctcatcgtggtcaacatgtacattgccatcatcctggagaacttcagcgtggccacggaggagagcaccgagcccctgagtgaggacgacttcgatatgttctatgagatctgggagaaatttgacccagaggccactcagtttattgagtattcggtcctgtctgactttgccgatgccctgtctgagccactccgtatcgccaagcccaaccagataagcctcatcaacatggacctgcccatggtgagtggggaccgcatccattgcatggacattctctttgccttcaccaaaagggtcctgggggagtctggggagatggacgccctgaagatccagatggaggagaagttcatggcagccaacccatccaagatctcctacgagcccatcaccaccacactccggcgcaagcacgaagaggtgtcggccatggttatccagagagccttccgcaggcacctgctgcaacgctctttgaagcatgcctccttcctcttccgtcagcaggcgggcagcggcctctccgaagaggatgcccctgagcgagagggcctcatcgcctacgtgatgagtgagaacttctcccgaccccttggcccaccctccagctcctccatctcctccacttccttcccaccctcctatgacagtgtcactagagccaccagcgataacctccaggtgcgggggtctgactacagccacagtgaagatctcgccgacttccccccttctccggacagggaccgtgagtccatcgtgtgagcctcggcctggctggccaggacacactgaaaagcagcctttttcaccatggcaaacctaaatgcagtcagtcacaaaccagcctggggccttcctggctttgggagtaagaaatgggcctcagccccgcggatcaaccaggcagagttctgtggcgccgcgtggacagccggagcagttggcctgtgcttggaggcctcagatagacctgtgacctggtctggtcaggcaatgccctgcggctctggaaagcaacttcatcccagctgctgaggcgaaatataaaactgagactgtatatgttgtgaatgggctttcataaatttattatatttgatatttttttacttgagcaaagaactaaggatttttccatggacatgggcagcaattcacgctgtctcttcttaaccctgaacaagagtgtctatggagcagccggaagtctgttctcaaagcagaagtggaatccagtgtggctcccacaggtcttcactgcccaggggtcgaatggggtccccctcccacttgacctgagatgctgggagggctgaacccccactcacacaagcacacacacacagtcctcacacacggaggccagacacaggccgtgggacccaggctcccagcctaagggagacaggcctttccctgccggccccccaaggatggggttcttgtccacggggctcactctggccccctattgtctccaaggtcccattttccccctgtgttttcacgcaggtcatattgtcagtcctacaaaaataaaaggcttccagaggagagtggcctgggtcccagggctggccctaggcactgatagttgccttttcttcccctcctgtaagagtattaacaaaaccaaaggacacaagggtgcaagccccattcacggcctggcatgcagcttgtccttgctcctggaacctggcaggccctgcccagccagccatcggaagagagggctgagccatgggggtttggggctaagaagttcaccagccctgagccatggcggcccctcagcctgcctgaagagaggaaactggcgatctcccagggctctctggaccatacgcggaggagttttctgtgtggtctccagctcctctccagacacagagacatgggagtggggagcggagcttggccctgcgccctgtgcagggaaagggatggtcaggcccagttctcgtgcccttagaggggaatgaaccatggcacctttgagagagggggcactgtggtcaggcccagcctctctggctcagcccgggatcctgatggcacccacacagaggacctctttggggcaagatccaggtggtcccataggtcttgtgaaaaggctttttcagggaaaaatattttactagtccaatcacccccaggacctcttcagctgctgacaatcctatttagcatatgcaaatcttttaacatagagaactgtcaccctgaggtaacagggtcaactggcgaagcctgagcaggcaggggcttggctgccccattccagctctcccatggagcccctccaccgggcgcatgcctcccaggccacctcagtctcacctgccggctctgggctggctgctcctaacctacctcgccgagctgtcggagggctggacatttgtggcagtgctgaagggggcattgccggcgagtaaagtattatgtttcttcttgtcaccccagttcccttggtggcaaccccagacccaacccatgcccctgacagatctagttctcttctcctgtgttccctttgagtccagtgtgggacacggtttaactgtcccagcgacatttctccaagtggaaatcctatttttgtagatctccatgctttgctctcaaggcttggagaggtatgtgcccctcctgggtgctcaccgcctgctacacaggcaggaatgcggttgggaggcaggtcgggctgccagcccagctggccggaaggagactgtggtttttgtgtgtgtggacagcccgggagctttgagacaggtgcctggggctggctgcagacggtgtggttgggggtgggaggtgagctagacccaacccttagcttttagcctggctgtcacctttttaatttccagaactgcacaatgaccagcaggagggaaggacagacatcaagtgccagatgttgtctgaactaatcgagcacttctcaccaaacttcatgtataaataaaatacatatttttaaaacaaaccaataaatggcttacatgacctgg

SEQ ID NO: 182694 - DNA, 7170 bp, Homo sapiens
  Payload ID: 15998
  Gene Symbol: SCN5A
  Gene Name: sodium channel, voltage gated, type V alpha subunit
  ENST ID: ENST00000455624
  CDS Start-End: 26-5977
ctgtgcccagaagcaggatgagaagatggcaaacttcctattacctcggggcaccagcagcttccgcaggttcacacgggagtccctggcagccatcgagaagcgcatggcagagaagcaagcccgcggctcaaccaccttgcaggagagccgagaggggctgcccgaggaggaggctccccggccccagctggacctgcaggcctccaaaaagctgccagatctctatggcaatccaccccaagagctcatcggagagcccctggaggacctggaccccttctatagcacccaaaagactttcatcgtactgaataaaggcaagaccatcttccggttcagtgccaccaacgccttgtatgtcctcagtcccttccaccccatccggagagcggctgtgaagattctggttcactcgctcttcaacatgctcatcatgtgcaccatcctcaccaactgcgtgttcatggcccagcacgaccctccaccctggaccaagtatgtcgagtacaccttcaccgccatttacacctttgagtctctggtcaagattctggctcgaggcttctgcctgcacgcgttcactttccttcgggacccatggaactggctggactttagtgtgattatcatggcgtatgtatcagaaaatataaaactaggcaatttgtcggctcttcgaactttcagagtcctgagagctctaaaaactatttcagttatcccagggctgaagaccatcgtgggggccctgatccagtctgtgaagaagctggctgatgtgatggtcctcacagtcttctgcctcagcgtctttgccctcatcggcctgcagctcttcatgggcaacctaaggcacaagtgcgtgcgcaacttcacagcgctcaacggcaccaacggctccgtggaggccgacggcttggtctgggaatccctggacctttacctcagtgatccagaaaattacctgctcaagaacggcacctctgatgtgttactgtgtgggaacagctctgacgctgggacatgtccggagggctaccggtgcctaaaggcaggcgagaaccccgaccacggctacaccagcttcgattcctttgcctgggcctttcttgcactcttccgcctgatgacgcaggactgctgggagcgcctctatcagcagaccctcaggtccgcagggaagatctacatgatcttcttcatgcttgtcatcttcctggggtccttctacctggtgaacctgatcctggccgtggtcgcaatggcctatgaggagcaaaaccaagccaccatcgctgagaccgaggagaaggaaaagcgcttccaggaggccatggaaatgctcaagaaagaacacgaggccctcaccatcaggggtgtggataccgtgtcccgtagctccttggagatgtcccctttggccccagtaaacagccatgagagaagaagcaagaggagaaaacggatgtcttcaggaactgaggagtgtggggaggacaggctccccaagtctgactcagaagatggtcccagagcaatgaatcatctcagcctcacccgtggcctcagcaggacttctatgaagccacgttccagccgcgggagcattttcacctttcgcaggcgagacctgggttctgaagcagattttgcagatgatgaaaacagcacagcgggggagagcgagagccaccacacatcactgctggtgccctggcccctgcgccggaccagtgcccagggacagcccagtcccggaacctcggctcctggccacgccctccatggcaaaaagaacagcactgtggactgcaatggggtggtctcattactgggggcaggcgacccagaggccacatccccaggaagccacctcctccgccctgtgatgctagagcacccgccagacacgaccacgccatcggaggagccaggcgggccccagatgctgacctcccaggctccgtgtgtagatggcttcgaggagccaggagcacggcagcgggccctcagcgcagtcagcgtcctcaccagcgcactggaagagttagaggagtctcgccacaagtgtccaccatgctggaaccgtctcgcccagcgctacctgatctgggagtgctgcccgctgtggatgtccatcaagcagggagtgaagttggtggtcatggacccgtttactgacctcaccatcactatgtgcatcgtactcaacacactcttcatggcgctggagcactacaacatgacaagtgaattcgaggagatgctgcaggtcggaaacctggtcttcacagggattttcacagcagagatgaccttcaagatcattgccctcgacccctactactacttccaacagggctggaacatcttcgacagcatcatcgtcatccttagcctcatggagctgggcctgtcccgcatgagcaacttgtcggtgctgcgctccttccgcctgctgcgggtcttcaagctggccaaatcatggcccaccctgaacacactcatcaagatcatcgggaactcagtgggggcactggggaacctgacactggtgctagccatcatcgtgttcatctttgctgtggtgggcatgcagctctttggcaagaactactcggagctgagggacagcgactcaggcctgctgcctcgctggcacatgatggacttctttcatgccttcctcatcatcttccgcatcctctgtggagagtggatcgagaccatgtgggactgcatggaggtgtcggggcagtcattatgcctgctggtcttcttgcttgttatggtcattggcaaccttgtggtcctgaatctcttcctggccttgctgctcagctccttcagtgcagacaacctcacagcccctgatgaggacagagagatgaacaacctccagctggccctggcccgcatccagaggggcctgcgctttgtcaagcggaccacctgggatttctgctgtggtctcctgcggcagcggcctcagaagcccgcagcccttgccgcccagggccagctgcccagctgcattgccaccccctactccccgccacccccagagacggagaaggtgcctcccacccgcaaggaaacacggtttgaggaaggcgagcaaccaggccagggcacccccggggatccagagcccgtgtgtgtgcccatcgctgtggccgagtcagacacagatgaccaagaagaagatgaggagaacagcctgggcacggaggaggagtccagcaagcaggaatcccagcctgtgtccggtggcccagaggcccctccggattccaggacctggagccaggtgtcagcgactgcctcctctgaggccgaggccagtgcatctcaggccgactggcggcagcagtggaaagcggaaccccaggccccagggtgcggtgagaccccagaggacagttgctccgagggcagcacagcagacatgaccaacaccgctgagctcctggagcagatccctgacctcggccaggatgtcaaggacccagaggactgcttcactgaaggctgtgtccggcgctgtccctgctgtgcggtggacaccacacaggccccagggaaggtctggtggcggttgcgcaagacctgctaccacatcgtggagcacagctggttcgagacattcatcatcttcatgatcctactcagcagtggagcgctggccttcgaggacatctacctagaggagcggaagaccatcaaggttctgcttgagtatgccgacaagatgttcacatatgtcttcgtgctggagatgctgctcaagtgggtggcctacggcttcaagaagtacttcaccaatgcctggtgctggctcgacttcctcatcgtagacgtctctctggtcagcctggtggccaacaccctgggctttgccgagatgggccccatcaagtcactgcggacgctgcgtgcactccgtcctctgagagctctgtcacgatttgagggcatgagggtggtggtcaatgccctggtgggcgccatcccgtccatcatgaacgtcctcctcgtctgcctcatcttctggctcatcttcagcatcatgggcgtgaacctctttgcggggaagtttgggaggtgcatcaaccagacagagggagacttgcctttgaactacaccatcgtgaacaacaagagccagtgtgagtccttgaacttgaccggagaattgtactggaccaaggtgaaagtcaactttgacaacgtgggggccgggtacctggcccttctgcaggtggcaacatttaaaggctggatggacattatgtatgcagctgtggactccagggggtatgaagagcagcctcagtgggaatacaacctctacatgtacatctattttgtcattttcatcatctttgggtctttcttcaccctgaacctctttattggtgtcatcattgacaacttcaaccaacagaagaaaaagttagggggccaggacatcttcatgacagaggagcagaagaagtactacaatgccatgaagaagctgggctccaagaagccccagaagcccatcccacggcccctgaacaagtaccagggcttcatattcgacattgtgaccaagcaggcctttgacgtcaccatcatgtttctgatctgcttgaatatggtgaccatgatggtggagacagatgaccaaagtcctgagaaaatcaacatcttggccaagatcaacctgctctttgtggccatcttcacaggcactgtgctctcggacatcatccagaagtacttcttctccccgacgctcttccgagtcatccgcctggcccgaataggccgcatcctcagactgatccgaggggccaaggggatccgcacgctgctctttgccctcatgatgtccctgcctgccctcttcaacatcgggctgctgctcttcctcgtcatgttcatctactccatctttggcatggccaacttcgcttatgtcaagtgggaggctggcatcgacgacatgttcaacttccagaccttcgccaacagcatgctgtgcctcttccagatcaccacgtcggccggctgggatggcctcctcagccccatcctcaacactgggccgccctactgcgaccccactctgcccaacagcaatggctctcggggggactgcgggagcccagccgtgggcatcctcttcttcaccacctacatcatcatctccttcctcatcgtggtcaacatgtacattgccatcatcctggagaacttcagcgtggccacggaggagagcaccgagcccctgagtgaggacgacttcgatatgttctatgagatctgggagaaatttgacccagaggccactcagtttattgagtattcggtcctgtctgactttgccgatgccctgtctgagccactccgtatcgccaagcccaaccagataagcctcatcaacatggacctgcccatggtgagtggggaccgcatccattgcatggacattctctttgccttcaccaaaagggtcctgggggagtctggggagatggacgccctgaagatccagatggaggagaagttcatggcagccaacccatccaagatctcctacgagcccatcaccaccacactccggcgcaagcacgaagaggtgtcggccatggttatccagagagccttccgcaggcacctgctgcaacgctctttgaagcatgcctccttcctcttccgtcagcaggcgggcagcggcctctccgaagaggatgcccctgagcgagagggcctcatcgcctacgtgatgagtgagaacttctcccgaccccttggcccaccctccagctcctccatctcctccacttccttcccaccctcctatgacagtgtcactagagccaccagcgataacctccaggtgcgggggtctgactacagccacagtgaagatctcgccgacttccccccttctccggacagggaccgtgagtccatcgtgtgagcctcggcctggctggccaggacacactgaaaagcagcctttttcaccatggcaaacctaaatgcagtcagtcacaaaccagcctggggccttcctggctttgggagtaagaaatgggcctcagccccgcggatcaaccaggcagagttctgtggcgccgcgtggacagccggagcagttggcctgtgcttggaggcctcagatagacctgtgacctggtctggtcaggcaatgccctgcggctctggaaagcaacttcatcccagctgctgaggcgaaatataaaactgagactgtatatgttgtgaatgggctttcataaatttattatatttgatatttttttacttgagcaaagaactaaggatttttccatggacatgggcagcaattcacgctgtctcttcttaaccctgaacaagagtgtctatggagcagccggaagtctgttctcaaagcagaagtggaatccagtgtggctcccacaggtcttcactgcccaggggtcgaatggggtccccctcccacttgacctgagatgctgggagggctgaacccccactcacacaagcacacacacacagtcctcacacacggaggccagacacaggccgtgggacccaggctcccagcctaagggagacaggcctttccctgccggccccccaaggatggggttcttgtccacggggctcactctggccccctattgtctccaaggtcccattttccccctgtgttttcacgcaggtcatattgtcagtcctacaaaaataaaaggcttccagaggagagtggcctgggtcccagggctggccctaggcactgatagttgccttttcttcccctcctgtaagagtattaacaaaaccaaaggacacaagggtgcaagccccattcacggcctggcatgcagcttgtccttgctcctggaacctggcaggccctgcccagccagccatcggaagagagggctgagccatgggggtttggggctaagaagttcaccagccctgagccatggcggcccctcagcctgcctgaagagaggaaactggcgatctcccagggctctctggaccatacgcggaggagttttctgtgtggtctccagctcctctccagacacagagacatgggagtggggagcggagcttggccctgcgccctgtgcagggaaagggatggtcagg

SEQ ID NO: 182695 - DNA, 6284 bp, Homo sapiens
  Payload ID: 15998
  Gene Symbol: SCN5A
  Gene Name: sodium channel, voltage gated, type V alpha subunit
  ENST ID: ENST00000450102
  CDS Start-End: 43-5931
ggcaacgtgaggagagcctgtgcccagaagcaggatgagaagatggcaaacttcctattacctcggggcaccagcagcttccgcaggttcacacgggagtccctggcagccatcgagaagcgcatggcagagaagcaagcccgcggctcaaccaccttgcaggagagccgagaggggctgcccgaggaggaggctccccggccccagctggacctgcaggcctccaaaaagctgccagatctctatggcaatccaccccaagagctcatcggagagcccctggaggacctggaccccttctatagcacccaaaagactttcatcgtactgaataaaggcaagaccatcttccggttcagtgccaccaacgccttgtatgtcctcagtcccttccaccccatccggagagcggctgtgaagattctggttcactcgctcttcaacatgctcatcatgtgcaccatcctcaccaactgcgtgttcatggcccagcacgaccctccaccctggaccaagtatgtcgagtacaccttcaccgccatttacacctttgagtctctggtcaagattctggctcgaggcttctgcctgcacgcgttcactttccttcgggacccatggaactggctggactttagtgtgattatcatggcgtatgtatcagaaaatataaaactaggcaatttgtcggctcttcgaactttcagagtcctgagagctctaaaaactatttcagttatcccagggctgaagaccatcgtgggggccctgatccagtctgtgaagaagctggctgatgtgatggtcctcacagtcttctgcctcagcgtctttgccctcatcggcctgcagctcttcatgggcaacctaaggcacaagtgcgtgcgcaacttcacagcgctcaacggcaccaacggctccgtggaggccgacggcttggtctgggaatccctggacctttacctcagtgatccagaaaattacctgctcaagaacggcacctctgatgtgttactgtgtgggaacagctctgacgctgggacatgtccggagggctaccggtgcctaaaggcaggcgagaaccccgaccacggctacaccagcttcgattcctttgcctgggcctttcttgcactcttccgcctgatgacgcaggactgctgggagcgcctctatcagcagaccctcaggtccgcagggaagatctacatgatcttcttcatgcttgtcatcttcctggggtccttctacctggtgaacctgatcctggccgtggtcgcaatggcctatgaggagcaaaaccaagccaccatcgctgagaccgaggagaaggaaaagcgcttccaggaggccatggaaatgctcaagaaagaacacgaggccctcaccatcaggggtgtggataccgtgtcccgtagctccttggagatgtcccctttggccccagtaaacagccatgagagaagaagcaagaggagaaaacggatgtcttcaggaactgaggagtgtggggaggacaggctccccaagtctgactcagaagatggtcccagagcaatgaatcatctcagcctcacccgtggcctcagcaggacttctatgaagccacgttccagccgcgggagcattttcacctttcgcaggcgagacctgggttctgaagcagattttgcagatgatgaaaacagcacagcgggggagagcgagagccaccacacatcactgctggtgccctggcccctgcgccggaccagtgcccagggacagcccagtcccggaacctcggctcctggccacgccctccatggcaaaaagaacagcactgtggactgcaatggggtggtctcattactgggggcaggcgacccagaggccacatccccaggaagccacctcctccgccctgtgatgctagagcacccgccagacacgaccacgccatcggaggagccaggcgggccccagatgctgacctcccaggctccgtgtgtagatggcttcgaggagccaggagcacggcagcgggccctcagcgcagtcagcgtcctcaccagcgcactggaagagttagaggagtctcgccacaagtgtccaccatgctggaaccgtctcgcccagcgctacctgatctgggagtgctgcccgctgtggatgtccatcaagcagggagtgaagttggtggtcatggacccgtttactgacctcaccatcactatgtgcatcgtactcaacacactcttcatggcgctggagcactacaacatgacaagtgaattcgaggagatgctgcaggtcggaaacctggtcttcacagggattttcacagcagagatgaccttcaagatcattgccctcgacccctactactacttccaacagggctggaacatcttcgacagcatcatcgtcatccttagcctcatggagctgggcctgtcccgcatgagcaacttgtcggtgctgcgctccttccgcctgctgcgggtcttcaagctggccaaatcatggcccaccctgaacacactcatcaagatcatcgggaactcagtgggggcactggggaacctgacactggtgctagccatcatcgtgttcatctttgctgtggtgggcatgcagctctttggcaagaactactcggagctgagggacagcgactcaggcctgctgcctcgctggcacatgatggacttctttcatgccttcctcatcatcttccgcatcctctgtggagagtggatcgagaccatgtgggactgcatggaggtgtcggggcagtcattatgcctgctggtcttcttgcttgttatggtcattggcaaccttgtggtcctgaatctcttcctggccttgctgctcagctccttcagtgcagacaacctcacagcccctgatgaggacagagagatgaacaacctccagctggccctggcccgcatccagaggggcctgcgctttgtcaagcggaccacctgggatttctgctgtggtctcctgcggcagcggcctcagaagcccgcagcccttgccgcccagggccagctgcccagctgcattgccaccccctactccccgccacccccagagacggagaaggtgcctcccacccgcaaggaaacacggtttgaggaaggcgagcaaccaggccagggcacccccggggatccagagcccgtgtgtgtgcccatcgctgtggccgagtcagacacagatgaccaagaagaagatgaggagaacagcctgggcacggaggaggagtccagcaagcagaccccagaggacagttgctccgagggcagcacagcagacatgaccaacaccgctgagctcctggagcagatccctgacctcggccaggatgtcaaggacccagaggactgcttcactgaaggctgtgtccggcgctgtccctgctgtgcggtggacaccacacaggccccagggaaggtctggtggcggttgcgcaagacctgctaccacatcgtggagcacagctggttcgagacattcatcatcttcatgatcctactcagcagtggagcgctggccttcgaggacatctacctagaggagcggaagaccatcaaggttctgcttgagtatgccgacaagatgttcacatatgtcttcgtgctggagatgctgctcaagtgggtggcctacggcttcaagaagtacttcaccaatgcctggtgctggctcgacttcctcatcgtagacgtctctctggtcagcctggtggccaacaccctgggctttgccgagatgggccccatcaagtcactgcggacgctgcgtgcactccgtcctctgagagctctgtcacgatttgagggcatgagggtggtggtcaatgccctggtgggcgccatcccgtccatcatgaacgtcctcctcgtctgcctcatcttctggctcatcttcagcatcatgggcgtgaacctctttgcggggaagtttgggaggtgcatcaaccagacagagggagacttgcctttgaactacaccatcgtgaacaacaagagccagtgtgagtccttgaacttgaccggagaattgtactggaccaaggtgaaagtcaactttgacaacgtgggggccgggtacctggcccttctgcaggtggcaacatttaaaggctggatggacattatgtatgcagctgtggactccagggggtatgaagagcagcctcagtgggaatacaacctctacatgtacatctattttgtcattttcatcatctttgggtctttcttcaccctgaacctctttattggtgtcatcattgacaacttcaaccaacagaagaaaaagttagggggccaggacatcttcatgacagaggagcagaagaagtactacaatgccatgaagaagctgggctccaagaagccccagaagcccatcccacggcccctgaacaagtaccagggcttcatattcgacattgtgaccaagcaggcctttgacgtcaccatcatgtttctgatctgcttgaatatggtgaccatgatggtggagacagatgaccaaagtcctgagaaaatcaacatcttggccaagatcaacctgctctttgtggccatcttcacaggcgagtgtattgtcaagctggctgccctgcgccactactacttcaccaacagctggaatatcttcgacttcgtggttgtcatcctctccatcgtgggcactgtgctctcggacatcatccagaagtacttcttctccccgacgctcttccgagtcatccgcctggcccgaataggccgcatcctcagactgatccgaggggccaaggggatccgcacgctgctctttgccctcatgatgtccctgcctgccctcttcaacatcgggctgctgctcttcctcgtcatgttcatctactccatctttggcatggccaacttcgcttatgtcaagtgggaggctggcatcgacgacatgttcaacttccagaccttcgccaacagcatgctgtgcctcttccagatcaccacgtcggccggctgggatggcctcctcagccccatcctcaacactgggccgccctactgcgaccccactctgcccaacagcaatggctctcggggggactgcgggagcccagccgtgggcatcctcttcttcaccacctacatcatcatctccttcctcatcgtggtcaacatgtacattgccatcatcctggagaacttcagcgtggccacggaggagagcaccgagcccctgagtgaggacgacttcgatatgttctatgagatctgggagaaatttgacccagaggccactcagtttattgagtattcggtcctgtctgactttgccgatgccctgtctgagccactccgtatcgccaagcccaaccagataagcctcatcaacatggacctgcccatggtgagtggggaccgcatccattgcatggacattctctttgccttcaccaaaagggtcctgggggagtctggggagatggacgccctgaagatccagatggaggagaagttcatggcagccaacccatccaagatctcctacgagcccatcaccaccacactccggcgcaagcacgaagaggtgtcggccatggttatccagagagccttccgcaggcacctgctgcaacgctctttgaagcatgcctccttcctcttccgtcagcaggcgggcagcggcctctccgaagaggatgcccctgagcgagagggcctcatcgcctacgtgatgagtgagaacttctcccgaccccttggcccaccctccagctcctccatctcctccacttccttcccaccctcctatgacagtgtcactagagccaccagcgataacctccaggtgcgggggtctgactacagccacagtgaagatctcgccgacttccccccttctccggacagggaccgtgagtccatcgtgtgagcctcggcctggctggccaggacacactgaaaagcagcctttttcaccatggcaaacctaaatgcagtcagtcacaaaccagcctggggccttcctggctttgggagtaagaaatgggcctcagccccgcggatcaaccaggcagagttctgtggcgccgcgtggacagccggagcagttggcctgtgcttggaggcctcagatagacctgtgacctggtctggtcaggcaatgccctgcggctctggaaagcaacttcatcccagctgctgaggcgaaatataaaactgagactgtatatgttgtgaatgggctttcataaatttattatatttgatatttttttacttgag

SEQ ID NO: 182696 - DNA, 8504 bp, Homo sapiens
  Payload ID: 15998
  Gene Symbol: SCN5A
  Gene Name: sodium channel, voltage gated, type V alpha subunit
  ENST ID: ENST00000413689
  CDS Start-End: 195-6245
agacggcggcggcgcccgtaggatgcagggatcgctcccccggggccgctgagcctgcgcccagtgccccgagccccgcgccgagccgagtccgcgccaagcagcagccgcccaccccggggcccggccgggggaccagcagcttccccacaggcaacgtgaggagagcctgtgcccagaagcaggatgagaagatggcaaacttcctattacctcggggcaccagcagcttccgcaggttcacacgggagtccctggcagccatcgagaagcgcatggcagagaagcaagcccgcggctcaaccaccttgcaggagagccgagaggggctgcccgaggaggaggctccccggccccagctggacctgcaggcctccaaaaagctgccagatctctatggcaatccaccccaagagctcatcggagagcccctggaggacctggaccccttctatagcacccaaaagactttcatcgtactgaataaaggcaagaccatcttccggttcagtgccaccaacgccttgtatgtcctcagtcccttccaccccatccggagagcggctgtgaagattctggttcactcgctcttcaacatgctcatcatgtgcaccatcctcaccaactgcgtgttcatggcccagcacgaccctccaccctggaccaagtatgtcgagtacaccttcaccgccatttacacctttgagtctctggtcaagattctggctcgaggcttctgcctgcacgcgttcactttccttcgggacccatggaactggctggactttagtgtgattatcatggcgtatgtatcagaaaatataaaactaggcaatttgtcggctcttcgaactttcagagtcctgagagctctaaaaactatttcagttatcccagggctgaagaccatcgtgggggccctgatccagtctgtgaagaagctggctgatgtgatggtcctcacagtcttctgcctcagcgtctttgccctcatcggcctgcagctcttcatgggcaacctaaggcacaagtgcgtgcgcaacttcacagcgctcaacggcaccaacggctccgtggaggccgacggcttggtctgggaatccctggacctttacctcagtgatccagaaaattacctgctcaagaacggcacctctgatgtgttactgtgtgggaacagctctgacgctgggacatgtccggagggctaccggtgcctaaaggcaggcgagaaccccgaccacggctacaccagcttcgattcctttgcctgggcctttcttgcactcttccgcctgatgacgcaggactgctgggagcgcctctatcagcagaccctcaggtccgcagggaagatctacatgatcttcttcatgcttgtcatcttcctggggtccttctacctggtgaacctgatcctggccgtggtcgcaatggcctatgaggagcaaaaccaagccaccatcgctgagaccgaggagaaggaaaagcgcttccaggaggccatggaaatgctcaagaaagaacacgaggccctcaccatcaggggtgtggataccgtgtcccgtagctccttggagatgtcccctttggccccagtaaacagccatgagagaagaagcaagaggagaaaacggatgtcttcaggaactgaggagtgtggggaggacaggctccccaagtctgactcagaagatggtcccagagcaatgaatcatctcagcctcacccgtggcctcagcaggacttctatgaagccacgttccagccgcgggagcattttcacctttcgcaggcgagacctgggttctgaagcagattttgcagatgatgaaaacagcacagcgggggagagcgagagccaccacacatcactgctggtgccctggcccctgcgccggaccagtgcccagggacagcccagtcccggaacctcggctcctggccacgccctccatggcaaaaagaacagcactgtggactgcaatggggtggtctcattactgggggcaggcgacccagaggccacatccccaggaagccacctcctccgccctgtgatgctagagcacccgccagacacgaccacgccatcggaggagccaggcgggccccagatgctgacctcccaggctccgtgtgtagatggcttcgaggagccaggagcacggcagcgggccctcagcgcagtcagcgtcctcaccagcgcactggaagagttagaggagtctcgccacaagtgtccaccatgctggaaccgtctcgcccagcgctacctgatctgggagtgctgcccgctgtggatgtccatcaagcagggagtgaagttggtggtcatggacccgtttactgacctcaccatcactatgtgcatcgtactcaacacactcttcatggcgctggagcactacaacatgacaagtgaattcgaggagatgctgcaggtcggaaacctggtcttcacagggattttcacagcagagatgaccttcaagatcattgccctcgacccctactactacttccaacagggctggaacatcttcgacagcatcatcgtcatccttagcctcatggagctgggcctgtcccgcatgagcaacttgtcggtgctgcgctccttccgcctgctgcgggtcttcaagctggccaaatcatggcccaccctgaacacactcatcaagatcatcgggaactcagtgggggcactggggaacctgacactggtgctagccatcatcgtgttcatctttgctgtggtgggcatgcagctctttggcaagaactactcggagctgagggacagcgactcaggcctgctgcctcgctggcacatgatggacttctttcatgccttcctcatcatcttccgcatcctctgtggagagtggatcgagaccatgtgggactgcatggaggtgtcggggcagtcattatgcctgctggtcttcttgcttgttatggtcattggcaaccttgtggtcctgaatctcttcctggccttgctgctcagctccttcagtgcagacaacctcacagcccctgatgaggacagagagatgaacaacctccagctggccctggcccgcatccagaggggcctgcgctttgtcaagcggaccacctgggatttctgctgtggtctcctgcggcagcggcctcagaagcccgcagcccttgccgcccagggccagctgcccagctgcattgccaccccctactccccgccacccccagagacggagaaggtgcctcccacccgcaaggaaacacggtttgaggaaggcgagcaaccaggccagggcacccccggggatccagagcccgtgtgtgtgcccatcgctgtggccgagtcagacacagatgaccaagaagaagatgaggagaacagcctgggcacggaggaggagtccagcaagcagcaggaatcccagcctgtgtccggtggcccagaggcccctccggattccaggacctggagccaggtgtcagcgactgcctcctctgaggccgaggccagtgcatctcaggccgactggcggcagcagtggaaagcggaaccccaggccccagggtgcggtgagaccccagaggacagttgctccgagggcagcacagcagacatgaccaacaccgctgagctcctggagcagatccctgacctcggccaggatgtcaaggacccagaggactgcttcactgaaggctgtgtccggcgctgtccctgctgtgcggtggacaccacacaggccccagggaaggtctggtggcggttgcgcaagacctgctaccacatcgtggagcacagctggttcgagacattcatcatcttcatgatcctactcagcagtggagcgctggccttcgaggacatctacctagaggagcggaagaccatcaaggttctgcttgagtatgccgacaagatgttcacatatgtcttcgtgctggagatgctgctcaagtgggtggcctacggcttcaagaagtacttcaccaatgcctggtgctggctcgacttcctcatcgtagacgtctctctggtcagcctggtggccaacaccctgggctttgccgagatgggccccatcaagtcactgcggacgctgcgtgcactccgtcctctgagagctctgtcacgatttgagggcatgagggtggtggtcaatgccctggtgggcgccatcccgtccatcatgaacgtcctcctcgtctgcctcatcttctggctcatcttcagcatcatgggcgtgaacctctttgcggggaagtttgggaggtgcatcaaccagacagagggagacttgcctttgaactacaccatcgtgaacaacaagagccagtgtgagtccttgaacttgaccggagaattgtactggaccaaggtgaaagtcaactttgacaacgtgggggccgggtacctggcccttctgcaggtggcaacatttaaaggctggatggacattatgtatgcagctgtggactccagggggtatgaagagcagcctcagtgggaatacaacctctacatgtacatctattttgtcattttcatcatctttgggtctttcttcaccctgaacctctttattggtgtcatcattgacaacttcaaccaacagaagaaaaagttagggggccaggacatcttcatgacagaggagcagaagaagtactacaatgccatgaagaagctgggctccaagaagccccagaagcccatcccacggcccctgaacaagtaccagggcttcatattcgacattgtgaccaagcaggcctttgacgtcaccatcatgtttctgatctgcttgaatatggtgaccatgatggtggagacagatgaccaaagtcctgagaaaatcaacatcttggccaagatcaacctgctctttgtggccatcttcacaggcgagtgtattgtcaagctggctgccctgcgccactactacttcaccaacagctggaatatcttcgacttcgtggttgtcatcctctccatcgtgggcactgtgctctcggacatcatccagaagtacttcttctccccgacgctcttccgagtcatccgcctggcccgaataggccgcatcctcagactgatccgaggggccaaggggatccgcacgctgctctttgccctcatgatgtccctgcctgccctcttcaacatcgggctgctgctcttcctcgtcatgttcatctactccatctttggcatggccaacttcgcttatgtcaagtgggaggctggcatcgacgacatgttcaacttccagaccttcgccaacagcatgctgtgcctcttccagatcaccacgtcggccggctgggatggcctcctcagccccatcctcaacactgggccgccctactgcgaccccactctgcccaacagcaatggctctcggggggactgcgggagcccagccgtgggcatcctcttcttcaccacctacatcatcatctccttcctcatcgtggtcaacatgtacattgccatcatcctggagaacttcagcgtggccacggaggagagcaccgagcccctgagtgaggacgacttcgatatgttctatgagatctgggagaaatttgacccagaggccactcagtttattgagtattcggtcctgtctgactttgccgatgccctgtctgagccactccgtatcgccaagcccaaccagataagcctcatcaacatggacctgcccatggtgagtggggaccgcatccattgcatggacattctctttgccttcaccaaaagggtcctgggggagtctggggagatggacgccctgaagatccagatggaggagaagttcatggcagccaacccatccaagatctcctacgagcccatcaccaccacactccggcgcaagcacgaagaggtgtcggccatggttatccagagagccttccgcaggcacctgctgcaacgctctttgaagcatgcctccttcctcttccgtcagcaggcgggcagcggcctctccgaagaggatgcccctgagcgagagggcctcatcgcctacgtgatgagtgagaacttctcccgaccccttggcccaccctccagctcctccatctcctccacttccttcccaccctcctatgacagtgtcactagagccaccagcgataacctccaggtgcgggggtctgactacagccacagtgaagatctcgccgacttccccccttctccggacagggaccgtgagtccatcgtgtgagcctcggcctggctggccaggacacactgaaaagcagcctttttcaccatggcaaacctaaatgcagtcagtcacaaaccagcctggggccttcctggctttgggagtaagaaatgggcctcagccccgcggatcaaccaggcagagttctgtggcgccgcgtggacagccggagcagttggcctgtgcttggaggcctcagatagacctgtgacctggtctggtcaggcaatgccctgcggctctggaaagcaacttcatcccagctgctgaggcgaaatataaaactgagactgtatatgttgtgaatgggctttcataaatttattatatttgatatttttttacttgagcaaagaactaaggatttttccatggacatgggcagcaattcacgctgtctcttcttaaccctgaacaagagtgtctatggagcagccggaagtctgttctcaaagcagaagtggaatccagtgtggctcccacaggtcttcactgcccaggggtcgaatggggtccccctcccacttgacctgagatgctgggagggctgaacccccactcacacaagcacacacacacagtcctcacacacggaggccagacacaggccgtgggacccaggctcccagcctaagggagacaggcctttccctgccggccccccaaggatggggttcttgtccacggggctcactctggccccctattgtctccaaggtcccattttccccctgtgttttcacgcaggtcatattgtcagtcctacaaaaataaaaggcttccagaggagagtggcctgggtcccagggctggccctaggcactgatagttgccttttcttcccctcctgtaagagtattaacaaaaccaaaggacacaagggtgcaagccccattcacggcctggcatgcagcttgtccttgctcctggaacctggcaggccctgcccagccagccatcggaagagagggctgagccatgggggtttggggctaagaagttcaccagccctgagccatggcggcccctcagcctgcctgaagagaggaaactggcgatctcccagggctctctggaccatacgcggaggagttttctgtgtggtctccagctcctctccagacacagagacatgggagtggggagcggagcttggccctgcgccctgtgcagggaaagggatggtcaggcccagttctcgtgcccttagaggggaatgaaccatggcacctttgagagagggggcactgtggtcaggcccagcctctctggctcagcccgggatcctgatggcacccacacagaggacctctttggggcaagatccaggtggtcccataggtcttgtgaaaaggctttttcagggaaaaatattttactagtccaatcacccccaggacctcttcagctgctgacaatcctatttagcatatgcaaatcttttaacatagagaactgtcaccctgaggtaacagggtcaactggcgaagcctgagcaggcaggggcttggctgccccattccagctctcccatggagcccctccaccgggcgcatgcctcccaggccacctcagtctcacctgccggctctgggctggctgctcctaacctacctcgccgagctgtcggagggctggacatttgtggcagtgctgaagggggcattgccggcgagtaaagtattatgtttcttcttgtcaccccagttcccttggtggcaaccccagacccaacccatgcccctgacagatctagttctcttctcctgtgttccctttgagtccagtgtgggacacggtttaactgtcccagcgacatttctccaagtggaaatcctatttttgtagatctccatgctttgctctcaaggcttggagaggtatgtgcccctcctgggtgctcaccgcctgctacacaggcaggaatgcggttgggaggcaggtcgggctgccagcccagctggccggaaggagactgtggtttttgtgtgtgtggacagcccgggagctttgagacaggtgcctggggctggctgcagacggtgtggttgggggtgggaggtgagctagacccaacccttagcttttagcctggctgtcacctttttaatttccagaactgcacaatgaccagcaggagggaaggacagacatcaagtgccagatgttgtctgaactaatcgagcacttctcaccaaacttcatgtataaataaaatacatatttttaaaacaaaccaataaatggcttacatga

SEQ ID NO: 182697 - DNA, 5898 bp, Homo sapiens
  Payload ID: 15998
  Gene Symbol: SCN5A
  Gene Name: sodium channel, voltage gated, type V alpha subunit
  ENST ID: ENST00000449557
  CDS Start-End: 10-5898
gatgagaagatggcaaacttcctattacctcggggcaccagcagcttccgcaggttcacacgggagtccctggcagccatcgagaagcgcatggcagagaagcaagcccgcggctcaaccaccttgcaggagagccgagaggggctgcccgaggaggaggctccccggccccagctggacctgcaggcctccaaaaagctgccagatctctatggcaatccaccccaagagctcatcggagagcccctggaggacctggaccccttctatagcacccaaaagactttcatcgtactgaataaaggcaagaccatcttccggttcagtgccaccaacgccttgtatgtcctcagtcccttccaccccatccggagagcggctgtgaagattctggttcactcgctcttcaacatgctcatcatgtgcaccatcctcaccaactgcgtgttcatggcccagcacgaccctccaccctggaccaagtatgtcgagtacaccttcaccgccatttacacctttgagtctctggtcaagattctggctcgaggcttctgcctgcacgcgttcactttccttcgggacccatggaactggctggactttagtgtgattatcatggcatacacaactgaatttgtggacctgggcaatgtctcagccttacgcaccttccgagtcctccgggccctgaaaactatatcagtcatttcagggctgaagaccatcgtgggggccctgatccagtctgtgaagaagctggctgatgtgatggtcctcacagtcttctgcctcagcgtctttgccctcatcggcctgcagctcttcatgggcaacctaaggcacaagtgcgtgcgcaacttcacagcgctcaacggcaccaacggctccgtggaggccgacggcttggtctgggaatccctggacctttacctcagtgatccagaaaattacctgctcaagaacggcacctctgatgtgttactgtgtgggaacagctctgacgctgggacatgtccggagggctaccggtgcctaaaggcaggcgagaaccccgaccacggctacaccagcttcgattcctttgcctgggcctttcttgcactcttccgcctgatgacgcaggactgctgggagcgcctctatcagcagaccctcaggtccgcagggaagatctacatgatcttcttcatgcttgtcatcttcctggggtccttctacctggtgaacctgatcctggccgtggtcgcaatggcctatgaggagcaaaaccaagccaccatcgctgagaccgaggagaaggaaaagcgcttccaggaggccatggaaatgctcaagaaagaacacgaggccctcaccatcaggggtgtggataccgtgtcccgtagctccttggagatgtcccctttggccccagtaaacagccatgagagaagaagcaagaggagaaaacggatgtcttcaggaactgaggagtgtggggaggacaggctccccaagtctgactcagaagatggtcccagagcaatgaatcatctcagcctcacccgtggcctcagcaggacttctatgaagccacgttccagccgcgggagcattttcacctttcgcaggcgagacctgggttctgaagcagattttgcagatgatgaaaacagcacagcgggggagagcgagagccaccacacatcactgctggtgccctggcccctgcgccggaccagtgcccagggacagcccagtcccggaacctcggctcctggccacgccctccatggcaaaaagaacagcactgtggactgcaatggggtggtctcattactgggggcaggcgacccagaggccacatccccaggaagccacctcctccgccctgtgatgctagagcacccgccagacacgaccacgccatcggaggagccaggcgggccccagatgctgacctcccaggctccgtgtgtagatggcttcgaggagccaggagcacggcagcgggccctcagcgcagtcagcgtcctcaccagcgcactggaagagttagaggagtctcgccacaagtgtccaccatgctggaaccgtctcgcccagcgctacctgatctgggagtgctgcccgctgtggatgtccatcaagcagggagtgaagttggtggtcatggacccgtttactgacctcaccatcactatgtgcatcgtactcaacacactcttcatggcgctggagcactacaacatgacaagtgaattcgaggagatgctgcaggtcggaaacctggtcttcacagggattttcacagcagagatgaccttcaagatcattgccctcgacccctactactacttccaacagggctggaacatcttcgacagcatcatcgtcatccttagcctcatggagctgggcctgtcccgcatgagcaacttgtcggtgctgcgctccttccgcctgctgcgggtcttcaagctggccaaatcatggcccaccctgaacacactcatcaagatcatcgggaactcagtgggggcactggggaacctgacactggtgctagccatcatcgtgttcatctttgctgtggtgggcatgcagctctttggcaagaactactcggagctgagggacagcgactcaggcctgctgcctcgctggcacatgatggacttctttcatgccttcctcatcatcttccgcatcctctgtggagagtggatcgagaccatgtgggactgcatggaggtgtcggggcagtcattatgcctgctggtcttcttgcttgttatggtcattggcaaccttgtggtcctgaatctcttcctggccttgctgctcagctccttcagtgcagacaacctcacagcccctgatgaggacagagagatgaacaacctccagctggccctggcccgcatccagaggggcctgcgctttgtcaagcggaccacctgggatttctgctgtggtctcctgcggcagcggcctcagaagcccgcagcccttgccgcccagggccagctgcccagctgcattgccaccccctactccccgccacccccagagacggagaaggtgcctcccacccgcaaggaaacacggtttgaggaaggcgagcaaccaggccagggcacccccggggatccagagcccgtgtgtgtgcccatcgctgtggccgagtcagacacagatgaccaagaagaagatgaggagaacagcctgggcacggaggaggagtccagcaagcagaccccagaggacagttgctccgagggcagcacagcagacatgaccaacaccgctgagctcctggagcagatccctgacctcggccaggatgtcaaggacccagaggactgcttcactgaaggctgtgtccggcgctgtccctgctgtgcggtggacaccacacaggccccagggaaggtctggtggcggttgcgcaagacctgctaccacatcgtggagcacagctggttcgagacattcatcatcttcatgatcctactcagcagtggagcgctggccttcgaggacatctacctagaggagcggaagaccatcaaggttctgcttgagtatgccgacaagatgttcacatatgtcttcgtgctggagatgctgctcaagtgggtggcctacggcttcaagaagtacttcaccaatgcctggtgctggctcgacttcctcatcgtagacgtctctctggtcagcctggtggccaacaccctgggctttgccgagatgggccccatcaagtcactgcggacgctgcgtgcactccgtcctctgagagctctgtcacgatttgagggcatgagggtggtggtcaatgccctggtgggcgccatcccgtccatcatgaacgtcctcctcgtctgcctcatcttctggctcatcttcagcatcatgggcgtgaacctctttgcggggaagtttgggaggtgcatcaaccagacagagggagacttgcctttgaactacaccatcgtgaacaacaagagccagtgtgagtccttgaacttgaccggagaattgtactggaccaaggtgaaagtcaactttgacaacgtgggggccgggtacctggcccttctgcaggtggcaacatttaaaggctggatggacattatgtatgcagctgtggactccagggggtatgaagagcagcctcagtgggaatacaacctctacatgtacatctattttgtcattttcatcatctttgggtctttcttcaccctgaacctctttattggtgtcatcattgacaacttcaaccaacagaagaaaaagttagggggccaggacatcttcatgacagaggagcagaagaagtactacaatgccatgaagaagctgggctccaagaagccccagaagcccatcccacggcccctgaacaagtaccagggcttcatattcgacattgtgaccaagcaggcctttgacgtcaccatcatgtttctgatctgcttgaatatggtgaccatgatggtggagacagatgaccaaagtcctgagaaaatcaacatcttggccaagatcaacctgctctttgtggccatcttcacaggcgagtgtattgtcaagctggctgccctgcgccactactacttcaccaacagctggaatatcttcgacttcgtggttgtcatcctctccatcgtgggcactgtgctctcggacatcatccagaagtacttcttctccccgacgctcttccgagtcatccgcctggcccgaataggccgcatcctcagactgatccgaggggccaaggggatccgcacgctgctctttgccctcatgatgtccctgcctgccctcttcaacatcgggctgctgctcttcctcgtcatgttcatctactccatctttggcatggccaacttcgcttatgtcaagtgggaggctggcatcgacgacatgttcaacttccagaccttcgccaacagcatgctgtgcctcttccagatcaccacgtcggccggctgggatggcctcctcagccccatcctcaacactgggccgccctactgcgaccccactctgcccaacagcaatggctctcggggggactgcgggagcccagccgtgggcatcctcttcttcaccacctacatcatcatctccttcctcatcgtggtcaacatgtacattgccatcatcctggagaacttcagcgtggccacggaggagagcaccgagcccctgagtgaggacgacttcgatatgttctatgagatctgggagaaatttgacccagaggccactcagtttattgagtattcggtcctgtctgactttgccgatgccctgtctgagccactccgtatcgccaagcccaaccagataagcctcatcaacatggacctgcccatggtgagtggggaccgcatccattgcatggacattctctttgccttcaccaaaagggtcctgggggagtctggggagatggacgccctgaagatccagatggaggagaagttcatggcagccaacccatccaagatctcctacgagcccatcaccaccacactccggcgcaagcacgaagaggtgtcggccatggttatccagagagccttccgcaggcacctgctgcaacgctctttgaagcatgcctccttcctcttccgtcagcaggcgggcagcggcctctccgaagaggatgcccctgagcgagagggcctcatcgcctacgtgatgagtgagaacttctcccgaccccttggcccaccctccagctcctccatctcctccacttccttcccaccctcctatgacagtgtcactagagccaccagcgataacctccaggtgcgggggtctgactacagccacagtgaagatctcgccgacttccccccttctccggacagggaccgtgagtccatcgtgtga

SEQ ID NO: 182698 - DNA, 8450 bp, Homo sapiens
  Payload ID: 15998
  Gene Symbol: SCN5A
  Gene Name: sodium channel, voltage gated, type V alpha subunit
  ENST ID: ENST00000425664
  CDS Start-End: 195-6191
agacggcggcggcgcccgtaggatgcagggatcgctcccccggggccgctgagcctgcgcccagtgccccgagccccgcgccgagccgagtccgcgccaagcagcagccgcccaccccggggcccggccgggggaccagcagcttccccacaggcaacgtgaggagagcctgtgcccagaagcaggatgagaagatggcaaacttcctattacctcggggcaccagcagcttccgcaggttcacacgggagtccctggcagccatcgagaagcgcatggcagagaagcaagcccgcggctcaaccaccttgcaggagagccgagaggggctgcccgaggaggaggctccccggccccagctggacctgcaggcctccaaaaagctgccagatctctatggcaatccaccccaagagctcatcggagagcccctggaggacctggaccccttctatagcacccaaaagactttcatcgtactgaataaaggcaagaccatcttccggttcagtgccaccaacgccttgtatgtcctcagtcccttccaccccatccggagagcggctgtgaagattctggttcactcgctcttcaacatgctcatcatgtgcaccatcctcaccaactgcgtgttcatggcccagcacgaccctccaccctggaccaagtatgtcgagtacaccttcaccgccatttacacctttgagtctctggtcaagattctggctcgaggcttctgcctgcacgcgttcactttccttcgggacccatggaactggctggactttagtgtgattatcatggcgtatgtatcagaaaatataaaactaggcaatttgtcggctcttcgaactttcagagtcctgagagctctaaaaactatttcagttatcccagggctgaagaccatcgtgggggccctgatccagtctgtgaagaagctggctgatgtgatggtcctcacagtcttctgcctcagcgtctttgccctcatcggcctgcagctcttcatgggcaacctaaggcacaagtgcgtgcgcaacttcacagcgctcaacggcaccaacggctccgtggaggccgacggcttggtctgggaatccctggacctttacctcagtgatccagaaaattacctgctcaagaacggcacctctgatgtgttactgtgtgggaacagctctgacgctgggacatgtccggagggctaccggtgcctaaaggcaggcgagaaccccgaccacggctacaccagcttcgattcctttgcctgggcctttcttgcactcttccgcctgatgacgcaggactgctgggagcgcctctatcagcagaccctcaggtccgcagggaagatctacatgatcttcttcatgcttgtcatcttcctggggtccttctacctggtgaacctgatcctggccgtggtcgcaatggcctatgaggagcaaaaccaagccaccatcgctgagaccgaggagaaggaaaagcgcttccaggaggccatggaaatgctcaagaaagaacacgaggccctcaccatcaggggtgtggataccgtgtcccgtagctccttggagatgtcccctttggccccagtaaacagccatgagagaagaagcaagaggagaaaacggatgtcttcaggaactgaggagtgtggggaggacaggctccccaagtctgactcagaagatggtcccagagcaatgaatcatctcagcctcacccgtggcctcagcaggacttctatgaagccacgttccagccgcgggagcattttcacctttcgcaggcgagacctgggttctgaagcagattttgcagatgatgaaaacagcacagcgggggagagcgagagccaccacacatcactgctggtgccctggcccctgcgccggaccagtgcccagggacagcccagtcccggaacctcggctcctggccacgccctccatggcaaaaagaacagcactgtggactgcaatggggtggtctcattactgggggcaggcgacccagaggccacatccccaggaagccacctcctccgccctgtgatgctagagcacccgccagacacgaccacgccatcggaggagccaggcgggccccagatgctgacctcccaggctccgtgtgtagatggcttcgaggagccaggagcacggcagcgggccctcagcgcagtcagcgtcctcaccagcgcactggaagagttagaggagtctcgccacaagtgtccaccatgctggaaccgtctcgcccagcgctacctgatctgggagtgctgcccgctgtggatgtccatcaagcagggagtgaagttggtggtcatggacccgtttactgacctcaccatcactatgtgcatcgtactcaacacactcttcatggcgctggagcactacaacatgacaagtgaattcgaggagatgctgcaggtcggaaacctggtcttcacagggattttcacagcagagatgaccttcaagatcattgccctcgacccctactactacttccaacagggctggaacatcttcgacagcatcatcgtcatccttagcctcatggagctgggcctgtcccgcatgagcaacttgtcggtgctgcgctccttccgcctgctgcgggtcttcaagctggccaaatcatggcccaccctgaacacactcatcaagatcatcgggaactcagtgggggcactggggaacctgacactggtgctagccatcatcgtgttcatctttgctgtggtgggcatgcagctctttggcaagaactactcggagctgagggacagcgactcaggcctgctgcctcgctggcacatgatggacttctttcatgccttcctcatcatcttccgcatcctctgtggagagtggatcgagaccatgtgggactgcatggaggtgtcggggcagtcattatgcctgctggtcttcttgcttgttatggtcattggcaaccttgtggtcctgaatctcttcctggccttgctgctcagctccttcagtgcagacaacctcacagcccctgatgaggacagagagatgaacaacctccagctggccctggcccgcatccagaggggcctgcgctttgtcaagcggaccacctgggatttctgctgtggtctcctgcggcagcggcctcagaagcccgcagcccttgccgcccagggccagctgcccagctgcattgccaccccctactccccgccacccccagagacggagaaggtgcctcccacccgcaaggaaacacggtttgaggaaggcgagcaaccaggccagggcacccccggggatccagagcccgtgtgtgtgcccatcgctgtggccgagtcagacacagatgaccaagaagaagatgaggagaacagcctgggcacggaggaggagtccagcaagcagcaggaatcccagcctgtgtccggtggcccagaggcccctccggattccaggacctggagccaggtgtcagcgactgcctcctctgaggccgaggccagtgcatctcaggccgactggcggcagcagtggaaagcggaaccccaggccccagggtgcggtgagaccccagaggacagttgctccgagggcagcacagcagacatgaccaacaccgctgagctcctggagcagatccctgacctcggccaggatgtcaaggacccagaggactgcttcactgaaggctgtgtccggcgctgtccctgctgtgcggtggacaccacacaggccccagggaaggtctggtggcggttgcgcaagacctgctaccacatcgtggagcacagctggttcgagacattcatcatcttcatgatcctactcagcagtggagcgctggccttcgaggacatctacctagaggagcggaagaccatcaaggttctgcttgagtatgccgacaagatgttcacatatgtcttcgtgctggagatgctgctcaagtgggtggcctacggcttcaagaagtacttcaccaatgcctggtgctggctcgacttcctcatcgtagacgtctctctggtcagcctggtggccaacaccctgggctttgccgagatgggccccatcaagtcactgcggacgctgcgtgcactccgtcctctgagagctctgtcacgatttgagggcatgagggtggtggtcaatgccctggtgggcgccatcccgtccatcatgaacgtcctcctcgtctgcctcatcttctggctcatcttcagcatcatgggcgtgaacctctttgcggggaagtttgggaggtgcatcaaccagacagagggagacttgcctttgaactacaccatcgtgaacaacaagagccagtgtgagtccttgaacttgaccggagaattgtactggaccaaggtgaaagtcaactttgacaacgtgggggccgggtacctggcccttctgcaggtgtatgaagagcagcctcagtgggaatacaacctctacatgtacatctattttgtcattttcatcatctttgggtctttcttcaccctgaacctctttattggtgtcatcattgacaacttcaaccaacagaagaaaaagttagggggccaggacatcttcatgacagaggagcagaagaagtactacaatgccatgaagaagctgggctccaagaagccccagaagcccatcccacggcccctgaacaagtaccagggcttcatattcgacattgtgaccaagcaggcctttgacgtcaccatcatgtttctgatctgcttgaatatggtgaccatgatggtggagacagatgaccaaagtcctgagaaaatcaacatcttggccaagatcaacctgctctttgtggccatcttcacaggcgagtgtattgtcaagctggctgccctgcgccactactacttcaccaacagctggaatatcttcgacttcgtggttgtcatcctctccatcgtgggcactgtgctctcggacatcatccagaagtacttcttctccccgacgctcttccgagtcatccgcctggcccgaataggccgcatcctcagactgatccgaggggccaaggggatccgcacgctgctctttgccctcatgatgtccctgcctgccctcttcaacatcgggctgctgctcttcctcgtcatgttcatctactccatctttggcatggccaacttcgcttatgtcaagtgggaggctggcatcgacgacatgttcaacttccagaccttcgccaacagcatgctgtgcctcttccagatcaccacgtcggccggctgggatggcctcctcagccccatcctcaacactgggccgccctactgcgaccccactctgcccaacagcaatggctctcggggggactgcgggagcccagccgtgggcatcctcttcttcaccacctacatcatcatctccttcctcatcgtggtcaacatgtacattgccatcatcctggagaacttcagcgtggccacggaggagagcaccgagcccctgagtgaggacgacttcgatatgttctatgagatctgggagaaatttgacccagaggccactcagtttattgagtattcggtcctgtctgactttgccgatgccctgtctgagccactccgtatcgccaagcccaaccagataagcctcatcaacatggacctgcccatggtgagtggggaccgcatccattgcatggacattctctttgccttcaccaaaagggtcctgggggagtctggggagatggacgccctgaagatccagatggaggagaagttcatggcagccaacccatccaagatctcctacgagcccatcaccaccacactccggcgcaagcacgaagaggtgtcggccatggttatccagagagccttccgcaggcacctgctgcaacgctctttgaagcatgcctccttcctcttccgtcagcaggcgggcagcggcctctccgaagaggatgcccctgagcgagagggcctcatcgcctacgtgatgagtgagaacttctcccgaccccttggcccaccctccagctcctccatctcctccacttccttcccaccctcctatgacagtgtcactagagccaccagcgataacctccaggtgcgggggtctgactacagccacagtgaagatctcgccgacttccccccttctccggacagggaccgtgagtccatcgtgtgagcctcggcctggctggccaggacacactgaaaagcagcctttttcaccatggcaaacctaaatgcagtcagtcacaaaccagcctggggccttcctggctttgggagtaagaaatgggcctcagccccgcggatcaaccaggcagagttctgtggcgccgcgtggacagccggagcagttggcctgtgcttggaggcctcagatagacctgtgacctggtctggtcaggcaatgccctgcggctctggaaagcaacttcatcccagctgctgaggcgaaatataaaactgagactgtatatgttgtgaatgggctttcataaatttattatatttgatatttttttacttgagcaaagaactaaggatttttccatggacatgggcagcaattcacgctgtctcttcttaaccctgaacaagagtgtctatggagcagccggaagtctgttctcaaagcagaagtggaatccagtgtggctcccacaggtcttcactgcccaggggtcgaatggggtccccctcccacttgacctgagatgctgggagggctgaacccccactcacacaagcacacacacacagtcctcacacacggaggccagacacaggccgtgggacccaggctcccagcctaagggagacaggcctttccctgccggccccccaaggatggggttcttgtccacggggctcactctggccccctattgtctccaaggtcccattttccccctgtgttttcacgcaggtcatattgtcagtcctacaaaaataaaaggcttccagaggagagtggcctgggtcccagggctggccctaggcactgatagttgccttttcttcccctcctgtaagagtattaacaaaaccaaaggacacaagggtgcaagccccattcacggcctggcatgcagcttgtccttgctcctggaacctggcaggccctgcccagccagccatcggaagagagggctgagccatgggggtttggggctaagaagttcaccagccctgagccatggcggcccctcagcctgcctgaagagaggaaactggcgatctcccagggctctctggaccatacgcggaggagttttctgtgtggtctccagctcctctccagacacagagacatgggagtggggagcggagcttggccctgcgccctgtgcagggaaagggatggtcaggcccagttctcgtgcccttagaggggaatgaaccatggcacctttgagagagggggcactgtggtcaggcccagcctctctggctcagcccgggatcctgatggcacccacacagaggacctctttggggcaagatccaggtggtcccataggtcttgtgaaaaggctttttcagggaaaaatattttactagtccaatcacccccaggacctcttcagctgctgacaatcctatttagcatatgcaaatcttttaacatagagaactgtcaccctgaggtaacagggtcaactggcgaagcctgagcaggcaggggcttggctgccccattccagctctcccatggagcccctccaccgggcgcatgcctcccaggccacctcagtctcacctgccggctctgggctggctgctcctaacctacctcgccgagctgtcggagggctggacatttgtggcagtgctgaagggggcattgccggcgagtaaagtattatgtttcttcttgtcaccccagttcccttggtggcaaccccagacccaacccatgcccctgacagatctagttctcttctcctgtgttccctttgagtccagtgtgggacacggtttaactgtcccagcgacatttctccaagtggaaatcctatttttgtagatctccatgctttgctctcaaggcttggagaggtatgtgcccctcctgggtgctcaccgcctgctacacaggcaggaatgcggttgggaggcaggtcgggctgccagcccagctggccggaaggagactgtggtttttgtgtgtgtggacagcccgggagctttgagacaggtgcctggggctggctgcagacggtgtggttgggggtgggaggtgagctagacccaacccttagcttttagcctggctgtcacctttttaatttccagaactgcacaatgaccagcaggagggaaggacagacatcaagtgccagatgttgtctgaactaatcgagcacttctcaccaaacttcatgtataaataaaatacatatttttaaaacaaaccaataaatggcttacatga

SEQ ID NO: 182699 - DNA, 714 bp, Homo sapiens
  Payload ID: 15998
  Gene Symbol: SCN5A
  Gene Name: sodium channel, voltage gated, type V alpha subunit
  ENST ID: ENST00000612060
  CDS Start-End: 43-714
ggcaacgtgaggagagcctgtgcccagaagcaggatgagaagatggcaaacttcctattacctcggggcaccagcagcttccgcaggttcacacgggagtccctggcagccatcgagaagcgcatggcagagaagcaagcccgcggctcaaccaccttgcaggagagccgagaggggctgcccgaggaggaggctccccggccccagctggacctgcaggcctccaaaaagctgccagatctctatggcaatccaccccaagagctcatcggagagcccctggaggacctggaccccttctatagcacccaaaagactttcatcgtactgaataaaggcaagaccatcttccggttcagtgccaccaacgccttgtatgtcctcagtcccttccaccccatccggagagcggctgtgaagattctggttcactcactcttcaacatgctcatcatgtgcaccatcctcaccaactgcgtgttcatggcccagcacgaccctccaccctggaccaagtatgtcgagtacaccttcaccgccatttacacctttgagtctctggtcaagattctggctcgaggcttctgcctgcacgcgttcactttccttcgggacccatggaactggctggactttagtgtgattatcatggctgcctctgtcttgggaactctgttttttccaatgagtattcaggccacctccacctcatga

SEQ ID NO: 182700 - DNA, 7183 bp, Homo sapiens
  Payload ID: 15999
  Gene Symbol: SCN7A
  Gene Name: sodium channel, voltage gated, type VII alpha subunit
  Uniprot ID: Q01118
  ENST ID: ENST00000409855
  CDS Start-End: 128-5176
gtcctccaccatgtgaatgccaacatggccaggtcattagagctgagggaaaactagtgcccaaagatatgaaaagagtgtggatcttctggagaagtgctgttgttcaacaggtacaaaattggaaatgttggcttcaccagaacctaagggccttgttcccttcactaaagagtcttttgaacttataaaacagcatattgctaaaacacataatgaagaccatgaagaagaagacttaaagccaactcctgatttggaagttggcaaaaagcttccatttatttatggaaacctttctcaaggaatggtgtcagagcccttggaagatgtggacccatattactacaagaaaaaaaatactttcatagtattaaataaaaatagaacaatcttcagattcaatgcggcttccatcttgtgtacattgtctcctttcaattgtattagaagaacaactatcaaggttttggtacatccctttttccaactgtttattctaattagtgtcctgattgattgcgtattcatgtccctgactaatttgccaaaatggagaccagtattagagaatactttgcttggaatttacacatttgaaatacttgtaaaactctttgcaagaggtgtctgggcaggatcattttccttcctcggtgatccatggaactggctcgatttcagcgtaactgtgtttgaggttattataagatactcacctctggacttcattccaacgcttcaaactgcaagaactttgagaattttaaaaattattcctttaaatcaaggtctgaaatcccttgtaggggtcctgatccactgcttgaagcagcttattggtgtcattatcctaactctgttttttctgagcatattttctctaattgggatggggctcttcatgggcaacttgaaacataaatgttttcgatggccccaagagaatgaaaatgaaaccctgcacaacagaactggaaacccatattatattcgagaaacagaaaacttttattatttggaaggagaaagatatgctctcctttgtggcaacaggacagatgctggtcagtgtcctgaaggatatgtgtgtgtaaaagctggcataaatcctgatcaaggcttcacaaattttgacagttttggctgggccttatttgccctatttcggttaatggctcaggattaccctgaagtactttatcaccagatactttatgcttctgggaaggtctacatgatattttttgtggtggtaagttttttgttttccttttatatggcaagtttgttcttaggcatacttgccatggcctatgaagaagaaaagcagagagttggtgaaatatctaagaagattgaaccaaaatttcaacagactggaaaagaacttcaagaaggaaatgaaacagatgaggccaagaccatacaaatagaaatgaagaaaaggtcaccaatttccacagacacatcattggatgtgttggaagatgctactctcagacataaggaagaacttgaaaaatccaagaagatatgcccattatactggtataagtttgctaaaactttcttgatctggaattgttctccctgttggttaaaattgaaagagtttgtccataggattataatggcaccatttactgatcttttccttatcatatgcataattttaaacgtatgttttctgaccttggagcattatccaatgagtaaacaaactaacactcttctcaacattggaaacctggttttcattggaattttcacagcagaaatgatttttaaaataattgcaatgcatccatatgggtatttccaagtaggttggaacatttttgatagcatgatagtgttccatggtttaatagaactttgtctagcaaatgttgcaggaatggctcttcttcgattattcaggatgttaagaattttcaagttgggaaagtattggccaacattccagattttgatgtggtctcttagtaactcatgggtggccctgaaagacttggtcctgttgttgttcacattcatcttcttttctgctgcattcggcatgaagctgtttggtaagaattatgaagaatttgtctgccacatagacaaagactgtcaactcccacgctggcacatgcatgactttttccactccttcctgaatgtgttccgaattctctgtggagagtgggtagagaccttgtgggactgtatggaggttgcaggccaatcctggtgtattcctttttacctgatggtcattttaattggaaatttactggtactttacctgtttctggcattggtgagctcatttagttcatgcaaggatgtaacagctgaagagaataatgaagcaaaaaatctccagcttgcagtggcaagaattaaaaaaggaataaactatgtgcttcttaaaatactatgcaaaacacaaaatgtcccaaaggacacaatggaccatgtaaatgaggtatatgttaaagaagatatttctgaccataccctttctgaattgagcaacacccaagattttctcaaagataaggaaaaaagcagtggcacagagaaaaacgctactgaaaatgagagccaatcacttatccccagtcctagtgtctcagaaactgtaccaattgcttcaggagaatctgatatagaaaatctggataataaggagattcagagtaagtctggtgatggaggcagcaaagagaaaataaagcaatctagctcatctgaatgcagtactgttgatattgctatctctgaagaagaagaaatgttctatggaggtgaaagatcaaagcatctgaaaaatggttgcagacgcggatcttcacttggtcaaatcagtggagcatccaagaaaggaaaaatctggcagaacatcaggaaaacctgctgcaagattgtagagaacaattggtttaagtgttttattgggcttgttactctgctcagcactggcactctggcttttgaagatatatatatggatcagagaaagacaattaaaattttattagaatatgctgacatgatctttacttatatcttcattctggaaatgcttctaaaatggatggcatatggttttaaggcctatttctctaatggctggtacaggctggacttcgtggttgttattgtgttttgtcttagcttaataggcaaaactcgggaagaactaaaacctcttatttccatgaaattccttcggcccctcagagttctatctcaatttgaaagaatgaaggtggttgtgagagctttgatcaaaacaaccttacccactttgaatgtgtttcttgtctgcctgatgatctggctgatttttagtatcatgggagtagacttatttgctggcagattctatgaatgcattgacccaacaagtggagaaaggtttccttcatctgaagtcatgaataagagtcggtgtgaaagccttctgtttaacgaatccatgctatgggaaaatgcaaaaatgaactttgataatgttggaaatggtttcctttctctgcttcaagtagcaacatttaatggatggatcactattatgaattcagcaattgattctgttgctgttaatatacagcctcattttgaagtcaacatctacatgtattgttactttatcaactttattatatttggagtatttctccctctgagtatgctgattactgttattattgataatttcaacaagcataaaataaagctgggaggctcaaatatctttataacggttaaacagagaaaacagtaccgcaggctgaagaagctaatgtatgaggattctcaaagaccagtacctcgcccattaaacaagctccaaggattcatctttgatgtggtaacaagccaagcttttaatgtcattgttatggttcttatatgtttccaagcaatagccatgatgatagacactgatgttcagagtctacaaatgtccattgctctctactggattaactcaatttttgttatgctatatactatggaatgtatactgaagctcatcgctttccgttgtttttatttcaccattgcgtggaacatttttgattttatggtggttattttctccatcacaggactatgtctgcctatgacagtaggatcctaccttgtgcctccttcacttgtgcaactgatacttctctcacggatcattcacatgctgcgtcttggaaaaggaccaaaggtgtttcataatctgatgcttcctttgatgctgtccctcccagcattattgaacatcattcttctcatcttcctggtcatgttcatctatgccgtatttggaatgtataattttgcctatgttaaaaaagaagctggaattaatgatgtgtctaattttgaaacctttggcaacagtatgctctgtctttttcaagttgcaatatttgctggttgggatgggatgcttgatgcaattttcaacagtaaatggtctgactgtgatcctgataaaattaaccctgggactcaagttagaggagattgtgggaacccctctgttgggattttttattttgtcagttatatcctcatatcatggctgatcattgtaaatatgtacattgttgttgtcatggagtttttaaatattgcttctaagaagaaaaacaagaccttgagtgaagatgattttaggaaattctttcaggtatggaaaaggtttgatcctgataggacccagtacatagactctagcaagctttcagattttgcagctgctcttgatcctcctcttttcatggcaaaaccaaacaagggccagctcattgctttggacctccccatggctgttggggacagaattcattgcctcgatatcttacttgcttttacaaagagagttatgggtcaagatgtgaggatggagaaagttgtttcagaaatagaatcagggtttttgttagccaacccttttaagatcacatgtgagccaattacgactactttgaaacgaaaacaagaggcagtttcagcaaccatcattcaacgtgcttataaaaattaccgcttgaggcgaaatgacaaaaatacatcagatattcatatgatagatggtgacagagatgttcatgctactaaagaaggtgcctattttgacaaagctaaggaaaagtcacctattcaaagccagatctaataccacttaccacctcttttcatatttcttcacatatctgaaaaatgttgaaagcctaagccaggaataaaagaaaagtagagataataatcagttctttacaaccgatggtaattaagcttgtattcacaagacttcatgccaaattcactttttagcattatatctaacaaatcaagagaatccttaatattgctgcagtgagtttaaagtgggttaaagtggccatttgacaatctcatatttgttttctctacatggcttatatgatgtgtgccttctagggaatgaagggaagtggtgatagagatcagcagcagcaggggctttcttttatattttatgtataatttaatgggctttaagtcaccactattaagacttacaaataagcaaatactttcctgatgtgggatggtgaaatgctaatggccattaaatcataaacttgcctagacaaaagccaattggaagaagggagagagcagttctttagaaagtgcctttgagatcaacctcagagattcttgggctgattaaaactgcatttgaaaaagattggttgaagctctgtgtttatttttgtatgttcttgttttcatttggaactgggaatgaataggatttcattgtgctcaagctcctggtttctcatctctggatagtttcacctaagctctggctcttaagcaggacagattcgtaaaacaagaagcataaaggagaggtatagccttttttttttttttttttttcattttcttctcatttacacctatttttttaaaaagtatacatttactaaaatgatgtaataaataacatgttaatagactcaagctttaccttatgaaattgatgtatttttaccagttatttctaatgtaacattgaatatataagatctgacaaatgtatgtttaaacatgaattagaagagttgagaactaccattatgtatagggattctcatagtgtcttggcccttaattggaaagttgtggcaactttaaagtactttttactgtatgttataattctttataacttagagagagacaatggtcactcaaactatgagaactatgaattaggagataaaagtttaaatttgttgttgttttataacagtatgtacaagttagttttcccttatatatttacgttttcaagttttttaatctcatcatatacatccatactctataaaatgttttatattcaaagaactgtaaaatcctaaacattagttttcactattgaaattgttttttaaagataggcataaatagttgtccttagacttattcatacaaatatagtcatttacttctatgtagtttgagattctgagagttattccaactttatgaagattgatttcaatgtgcctgctaagtcctaaaagattcagaaagaaaatttatatattattgatttaaatatcatcctttaaatatgttgtataacattcaatatagtttatgtatcagtgattgtattttattctgaatgcatgatctcaagccttaactactataatctttttctgcccctcagaaattgaataacctaaccaagatgcctttaggggatgccctaagtaaatgtaatttcagatttcagggttttttttttttcctctctaagtgttccttccctttcttctcctgctctccatcatgttatggagaccagtgaggaaccagtgttaacttggtgacaatgtgacagctggtgctttatctaagctccgttttctatttcttgggaatgctttattgtggaaactgcttcagatacttaaattgaatcataacttgcttctgtaaattgcgtaaagacaacaaactgattttagtttgaaaagtttatcttttacttgtaaaccttgtttgccagttaccttccgaaagctgtgtaaagagttatttttaacaaagtcttaacaatatatgttactttttagatactatagaaaataataaatataacctgtaaaccaca

SEQ ID NO: 182701 - DNA, 5337 bp, Homo sapiens
  Payload ID: 15999
  Gene Symbol: SCN7A
  Gene Name: sodium channel, voltage gated, type VII alpha subunit
  ENST ID: ENST00000424326
  CDS Start-End: 128-2416
gtcctccaccatgtgaatgccaacatggccaggtcattagagctgagggaaaactagtgcccaaagatatgaaaagagtgtggatcttctggagaagtgctgttgttcaacaggtacaaaattggaaatgttggcttcaccagaacctaagggccttgttcccttcactaaagagtcttttgaacttataaaacagcatattgctaaaacacataatgaagaccatgaagaagaagacttaaagccaactcctgatttggaagttggcaaaaagcttccatttatttatggaaacctttctcaaggaatggtgtcagagcccttggaagatgtggacccatattactacaagaaaaaaaatactttcatagtattaaataaaaatagaacaatcttcagattcaatgcggcttccatcttgtgtacattgtctcctttcaattgtattagaagaacaactatcaaggttttggtacatccctttttccaactgtttattctaattagtgtcctgattgattgcgtattcatgtccctgactaatttgccaaaatggagaccagtattagagaatactttgcttggaatttacacatttgaaatacttgtaaaactctttgcaagaggtgtctgggcaggatcattttccttcctcggtgatccatggaactggctcgatttcagcgtaactgtgtttgaggttattataagatactcacctctggacttcattccaacgcttcaaactgcaagaactttgagaattttaaaaattattcctttaaatcaaggtctgaaatcccttgtaggggtcctgatccactgcttgaagcagcttattggtgtcattatcctaactctgttttttctgagcatattttctctaattgggatggggctcttcatgggcaacttgaaacataaatgttttcgatggccccaagagaatgaaaatgaaaccctgcacaacagaactggaaacccatattatattcgagaaacagaaaacttttattatttggaaggagaaagatatgctctcctttgtggcaacaggacagatgctggtcagtgtcctgaaggatatgtgtgtgtaaaagctggcataaatcctgatcaaggcttcacaaattttgacagttttggctgggccttatttgccctatttcggttaatggctcaggattaccctgaagtactttatcaccagatactttatgcttctgggaaggtctacatgatattttttgtggtggtaagttttttgttttccttttatatggcaagtttgttcttaggcatacttgccatggcctatgaagaagaaaagcagagagttggtgaaatatctaagaagattgaaccaaaatttcaacagactggaaaagaacttcaagaaggaaatgaaacagatgaggccaagaccatacaaatagaaatgaagaaaaggtcaccaatttccacagacacatcattggatgtgttggaagatgctactctcagacataaggaagaacttgaaaaatccaagaagatatgcccattatactggtataagtttgctaaaactttcttgatctggaattgttctccctgttggttaaaattgaaagagtttgtccataggattataatggcaccatttactgatcttttccttatcatatgcataattttaaacgtatgttttctgaccttggagcattatccaatgagtaaacaaactaacactcttctcaacattggaaacctggttttcattggaattttcacagcagaaatgatttttaaaataattgcaatgcatccatatgggtatttccaagtaggttggaacatttttgatagcatgatagtgttccatggtttaatagaactttgtctagcaaatgttgcaggaatggctcttcttcgattattcaggatgttaagaattttcaagttgggaaagtattggccaacattccagattttgatgtggtctcttagtaactcatgggtggccctgaaagacttggtcctgttgttgttcacattcatcttcttttctgctgcattcggcatgaagctgtttggtaagaattatgaagaatttgtctgccacatagacaaagactgtcaactcccacgctggcacatgcatgactttttccactccttcctgaatgtgttccgaattctctgtggagagtgggtagagaccttgtgggactgtatggaggttgcaggccaatcctggtgtattcctttttacctgatggtcattttaattggaaatttactgggcttgggaggcctcaggaaacttacaatcacggtggaagaggaagcaggcatgtccttcacattgcagcagcaaggagaagtgcagagtgaaggtactttacctgtttctggcattggtgagctcatttagttcatgcaaggatgtaacagctgaagagaataatgaagcaaaaaatctccagcttgcagtggcaagaattaaaaaaggaataaactatgtgcttcttaaaatactatgcaaaacacaaaatgtcccaaaggacacaatggaccatgtaaatgaggtatatgttaaagaagatatttctgaccataccctttctgaattgagcaacacccaagattttctcaaagataaggaaaaaagcagtggcacagagaaaaacgctactgaaaatgagagccaatcacttatccccagtcctagtgtctcagaaactgtaccaattgcttcaggagaatctgatatagaaaatctggataataaggagattcagagtaagtctggtgatggaggcagcaaagagaaaataaagcaatctagctcatctgaatgcagtactgttgatattgctatctctgaagaagaagaaatgttctatggaggtgaaagatcaaagcatctgaaaaatggttgcagacgcggatcttcacttggtcaaatcagtggagcatccaagaaaggaaaaatctggcagaacatcaggaaaacctgctgcaagattgtagagaacaattggtttaagtgttttattgggcttgttactctgctcagcactggcactctggcttttgaagatatatatatggatcagagaaagacaattaaaattttattagaatatgctgacatgatctttacttatatcttcattctggaaatgcttctaaaatggatggcatatggttttaaggcctatttctctaatggctggtacaggctggacttcgtggttgttattgtgttttgtcttagcttaataggcaaaactcgggaagaactaaaacctcttatttccatgaaattccttcggcccctcagagttctatctcaatttgaaagaatgaaggtggttgtgagagctttgatcaaaacaaccttacccactttgaatgtgtttcttgtctgcctgatgatctggctgatttttagtatcatgggagtagacttatttgctggcagattctatgaatgcattgacccaacaagtggagaaaggtttccttcatctgaagtcatgaataagagtcggtgtgaaagccttctgtttaacgaatccatgctatgggaaaatgcaaaaatgaactttgataatgttggaaatggtttcctttctctgcttcaagtagcaacatttaatggatggatcactattatgaattcagcaattgattctgttgctgttaatatacagcctcattttgaagtcaacatctacatgtattgttactttatcaactttattatatttggagtatttctccctctgagtatgctgattactgttattattgataatttcaacaagcataaaataaagctgggaggctcaaatatctttataacggttaaacagagaaaacagtaccgcaggctgaagaagctaatgtatgaggattctcaaagaccagtacctcgcccattaaacaagctccaaggattcatctttgatgtggtaacaagccaagcttttaatgtcattgttatggttcttatatgtttccaagcaatagccatgatgatagacactgatgttcagagtctacaaatgtccattgctctctactggattaactcaatttttgttatgctatatactatggaatgtatactgaagctcatcgctttccgttgtttttatttcaccattgcgtggaacatttttgattttatggtggttattttctccatcacaggactatgtctgcctatgacagtaggatcctaccttgtgcctccttcacttgtgcaactgatacttctctcacggatcattcacatgctgcgtcttggaaaaggaccaaaggtgtttcataatctgatgcttcctttgatgctgtccctcccagcattattgaacatcattcttctcatcttcctggtcatgttcatctatgccgtatttggaatgtataattttgcctatgttaaaaaagaagctggaattaatgatgtgtctaattttgaaacctttggcaacagtatgctctgtctttttcaagttgcaatatttgctggttgggatgggatgcttgatgcaattttcaacagtaaatggtctgactgtgatcctgataaaattaaccctgggactcaagttagaggagattgtgggaacccctctgttgggattttttattttgtcagttatatcctcatatcatggctgatcattgtaaatatgtacattgttgttgtcatggagtttttaaatattgcttctaagaagaaaaacaagaccttgagtgaagatgattttaggaaattctttcaggtatggaaaaggtttgatcctgataggacccagtacatagactctagcaagctttcagattttgcagctgctcttgatcctcctcttttcatggcaaaaccaaacaagggccagctcattgctttggacctccccatggctgttggggacagaattcattgcctcgatatcttacttgcttttacaaagagagttatgggtcaagatgtgaggatggagaaagttgtttcagaaatagaatcagggtttttgttagccaacccttttaagatcacatgtgagccaattacgactactttgaaacgaaaacaagaggcagtttcagcaaccatcattcaacgtgcttataaaaattaccgcttgaggcgaaatgacaaaaatacatcagatattcatatgatagatggtgacagagatgttcatgctactaaagaaggtgcctattttgacaaagctaaggaaaagtcacctattcaaagccagatctaataccacttaccacctcttttcatatttcttcacatatctgaaaaatgttgaaagcctaagccaggaa

SEQ ID NO: 182702 - DNA, 1459 bp, Homo sapiens
  Payload ID: 15999
  Gene Symbol: SCN7A
  Gene Name: sodium channel, voltage gated, type VII alpha subunit
  ENST ID: ENST00000441411
  CDS Start-End: 253-1459
ctggagagtcgccccagtgagtcggtgtctaactggccatttagtggggcccatttactgcagagccacagctggtgaggacagacgccagcctaacagcagcttctgtacaactagagctcagaaaacccgagagatccgtggagaaagagaagcccaggaggaggaaagggctccaaggagccctgctcctgaagggtccctcaggcactggtggagacctgtcgcttcgtagcaagtacaaaattggaaatgttggcttcaccagaacctaagggccttgttcccttcactaaagagtcttttgaacttataaaacagcatattgctaaaacacataatgaagaccatgaagaagaagacttaaagccaactcctgatttggaagttggcaaaaagcttccatttatttatggaaacctttctcaaggaatggtgtcagagcccttggaagatgtggacccatattactacaagaaaaaaaatactttcatagtattaaataaaaatagaacaatcttcagattcaatgcggcttccatcttgtgtacattgtctcctttcaattgtattagaagaacaactatcaaggttttggtacatccctttttccaactgtttattctaattagtgtcctgattgattgcgtattcatgtccctgactaatttgccaaaatggagaccagtattagagaatactttgcttggaatttacacatttgaaatacttgtaaaactctttgcaagaggtgtctgggcaggatcattttccttcctcggtgatccatggaactggctcgatttcagcgtaactgtgtttgaggttattataagatactcacctctggacttcattccaacgcttcaaactgcaagaactttgagaattttaaaaattattcctttaaatcaaggtctgaaatcccttgtaggggtcctgatccactgcttgaagcagcttattggtgtcattatcctaactctgttttttctgagcatattttctctaattgggatggggctcttcatgggcaacttgaaacataaatgttttcgatggccccaagagaatgaaaatgaaaccctgcacaacagaactggaaacccatattatattcgagaaacagaaaacttttattatttggaaggagaaagatatgctctcctttgtggcaacaggacagatgctggtcagtgtcctgaaggatatgtgtgtgtaaaagctggcataaatcctgatcaaggcttcacaaattttgacagttttggctgggccttatttgccctatttcggttaatggctcaggattaccctgaagtactttatcaccagatactttatgcttctgggaaggtctacatgatattttttgtggtggtaagttttttgttttccttttatatggcaagtttgttcttaggcatacttgccatggcctatgaagaagaaaagcaga

SEQ ID NO: 182703 - DNA, 2996 bp, Homo sapiens
  Payload ID: 15999
  Gene Symbol: SCN7A
  Gene Name: sodium channel, voltage gated, type VII alpha subunit
  ENST ID: ENST00000419992
  CDS Start-End: 408-2996
ctccactggacatctgggtaggaggggtctctgggtcagtggctggagagtcgccccagtgagtcggtgtctaactggccatttagtggggcccatttactgcagagccacagctggtgaggacagacgccagcctaacagcagcttctgtacaactagagctcagaaaacccgagagatccgtggagaaagagaagcccaggaggaggaaagggctccaaggagccctgctcctgaagggtccctcaggcactggtggagacctgtcgcttcgtagcaagtcctccaccatgtgaatgccaacatggccaggtcattagagctgagggaaaactagtgcccaaagatatgaaaagagtgtggatcttctggagaagtgctgttgttcaacaggtacaaaattggaaatgttggcttcaccagaacctaagggccttgttcccttcactaaagagtcttttgaacttataaaacagcatattgctaaaacacataatgaagaccatgaagaagaagacttaaagccaactcctgatttggaagttggcaaaaagcttccatttatttatggaaacctttctcaaggaatggtgtcagagcccttggaagatgtggacccatattactacaagaaaaaaaatactttcatagtattaaataaaaatagaacaatcttcagattcaatgcggcttccatcttgtgtacattgtctcctttcaattgtattagaagaacaactatcaaggttttggtacatccctttttccaactgtttattctaattagtgtcctgattgattgcgtattcatgtccctgactaatttgccaaaatggagaccagtattagagaatactttgcttggaatttacacatttgaaatacttgtaaaactctttgcaagaggtgtctgggcaggatcattttccttcctcggtgatccatggaactggctcgatttcagcgtaactgtgtttgaggttattataagatactcacctctggacttcattccaacgcttcaaactgcaagaactttgagaattttaaaaattattcctttaaatcaaggtctgaaatcccttgtaggggtcctgatccactgcttgaagcagcttattggtgtcattatcctaactctgttttttctgagcatattttctctaattgggatggggctcttcatgggcaacttgaaacataaatgttttcgatggccccaagagaatgaaaatgaaaccctgcacaacagaactggaaacccatattatattcgagaaacagaaaacttttattatttggaaggagaaagatatgctctcctttgtggcaacaggacagatgctggtcagtgtcctgaaggatatgtgtgtgtaaaagctggcataaatcctgatcaaggcttcacaaattttgacagttttggctgggccttatttgccctatttcggttaatggctcaggattaccctgaagtactttatcaccagatactttatgcttctgggaaggtctacatgatattttttgtggtggtaagttttttgttttccttttatatggcaagtttgttcttaggcatacttgccatggcctatgaagaagaaaagcagagagttggtgaaatatctaagaagattgaaccaaaatttcaacagactggaaaagaacttcaagaaggaaatgaaacagatgaggccaagaccatacaaatagaaatgaagaaaaggtcaccaatttccacagacacatcattggatgtgttggaagatgctactctcagacataaggaagaacttgaaaaatccaagaagatatgcccattatactggtataagtttgctaaaactttcttgatctggaattgttctccctgttggttaaaattgaaagagtttgtccataggattataatggcaccatttactgatcttttccttatcatatgcataattttaaacgtatgttttctgaccttggagcattatccaatgagtaaacaaactaacactcttctcaacattggaaacctggttttcattggaattttcacagcagaaatgatttttaaaataattgcaatgcatccatatgggtatttccaagtaggttggaacatttttgatagcatgatagtgttccatggtttaatagaactttgtctagcaaatgttgcaggaatggctcttcttcgattattcaggatgttaagaattttcaagttgggaaagtattggccaacattccagattttgatgtggtctcttagtaactcatgggtggccctgaaagacttggtcctgttgttgttcacattcatcttcttttctgctgcattcggcatgaagctgtttggtaagaattatgaagaatttgtctgccacatagacaaagactgtcaactcccacgctggcacatgcatgactttttccactccttcctgaatgtgttccgaattctctgtggagagtgggtagagaccttgtgggactgtatggaggttgcaggccaatcctggtgtattcctttttacctgatggtcattttaattggaaatttactggtactttacctgtttctggcattggtgagctcatttagttcatgcaaggatgtaacagctgaagagaataatgaagcaaaaaatctccagcttgcagtggcaagaattaaaaaaggaataaactatgtgcttcttaaaatactatgcaaaacacaaaatgtcccaaaggacacaatggaccatgtaaatgaggtatatgttaaagaagatatttctgaccataccctttctgaattgagcaacacccaagattttctcaaagataaggaaaaaagcagtggcacagagaaaaacgctactgaaaatgagagccaatcacttatccccagtcctagtgtctcagaaactgtaccaattgcttcaggagaatctgatatagaaaatctggataataaggagattcagagtaagtctggtgatggaggcagcaaa

SEQ ID NO: 182704 - DNA, 7186 bp, Homo sapiens
  Payload ID: 15999
  Gene Symbol: SCN7A
  Gene Name: sodium channel, voltage gated, type VII alpha subunit
  Uniprot ID: Q01118
  ENST ID: ENST00000619410
  CDS Start-End: 131-5179
caggtcctccaccatgtgaatgccaacatggccaggtcattagagctgagggaaaactagtgcccaaagatatgaaaagagtgtggatcttctggagaagtgctgttgttcaacaggtacaaaattggaaatgttggcttcaccagaacctaagggccttgttcccttcactaaagagtcttttgaacttataaaacagcatattgctaaaacacataatgaagaccatgaagaagaagacttaaagccaactcctgatttggaagttggcaaaaagcttccatttatttatggaaacctttctcaaggaatggtgtcagagcccttggaagatgtggacccatattactacaagaaaaaaaatactttcatagtattaaataaaaatagaacaatcttcagattcaatgcggcttccatcttgtgtacattgtctcctttcaattgtattagaagaacaactatcaaggttttggtacatccctttttccaactgtttattctaattagtgtcctgattgattgcgtattcatgtccctgactaatttgccaaaatggagaccagtattagagaatactttgcttggaatttacacatttgaaatacttgtaaaactctttgcaagaggtgtctgggcaggatcattttccttcctcggtgatccatggaactggctcgatttcagcgtaactgtgtttgaggttattataagatactcacctctggacttcattccaacgcttcaaactgcaagaactttgagaattttaaaaattattcctttaaatcaaggtctgaaatcccttgtaggggtcctgatccactgcttgaagcagcttattggtgtcattatcctaactctgttttttctgagcatattttctctaattgggatggggctcttcatgggcaacttgaaacataaatgttttcgatggccccaagagaatgaaaatgaaaccctgcacaacagaactggaaacccatattatattcgagaaacagaaaacttttattatttggaaggagaaagatatgctctcctttgtggcaacaggacagatgctggtcagtgtcctgaaggatatgtgtgtgtaaaagctggcataaatcctgatcaaggcttcacaaattttgacagttttggctgggccttatttgccctatttcggttaatggctcaggattaccctgaagtactttatcaccagatactttatgcttctgggaaggtctacatgatattttttgtggtggtaagttttttgttttccttttatatggcaagtttgttcttaggcatacttgccatggcctatgaagaagaaaagcagagagttggtgaaatatctaagaagattgaaccaaaatttcaacagactggaaaagaacttcaagaaggaaatgaaacagatgaggccaagaccatacaaatagaaatgaagaaaaggtcaccaatttccacagacacatcattggatgtgttggaagatgctactctcagacataaggaagaacttgaaaaatccaagaagatatgcccattatactggtataagtttgctaaaactttcttgatctggaattgttctccctgttggttaaaattgaaagagtttgtccataggattataatggcaccatttactgatcttttccttatcatatgcataattttaaacgtatgttttctgaccttggagcattatccaatgagtaaacaaactaacactcttctcaacattggaaacctggttttcattggaattttcacagcagaaatgatttttaaaataattgcaatgcatccatatgggtatttccaagtaggttggaacatttttgatagcatgatagtgttccatggtttaatagaactttgtctagcaaatgttgcaggaatggctcttcttcgattattcaggatgttaagaattttcaagttgggaaagtattggccaacattccagattttgatgtggtctcttagtaactcatgggtggccctgaaagacttggtcctgttgttgttcacattcatcttcttttctgctgcattcggcatgaagctgtttggtaagaattatgaagaatttgtctgccacatagacaaagactgtcaactcccacgctggcacatgcatgactttttccactccttcctgaatgtgttccgaattctctgtggagagtgggtagagaccttgtgggactgtatggaggttgcaggccaatcctggtgtattcctttttacctgatggtcattttaattggaaatttactggtactttacctgtttctggcattggtgagctcatttagttcatgcaaggatgtaacagctgaagagaataatgaagcaaaaaatctccagcttgcagtggcaagaattaaaaaaggaataaactatgtgcttcttaaaatactatgcaaaacacaaaatgtcccaaaggacacaatggaccatgtaaatgaggtatatgttaaagaagatatttctgaccataccctttctgaattgagcaacacccaagattttctcaaagataaggaaaaaagcagtggcacagagaaaaacgctactgaaaatgagagccaatcacttatccccagtcctagtgtctcagaaactgtaccaattgcttcaggagaatctgatatagaaaatctggataataaggagattcagagtaagtctggtgatggaggcagcaaagagaaaataaagcaatctagctcatctgaatgcagtactgttgatattgctatctctgaagaagaagaaatgttctatggaggtgaaagatcaaagcatctgaaaaatggttgcagacgcggatcttcacttggtcaaatcagtggagcatccaagaaaggaaaaatctggcagaacatcaggaaaacctgctgcaagattgtagagaacaattggtttaagtgttttattgggcttgttactctgctcagcactggcactctggcttttgaagatatatatatggatcagagaaagacaattaaaattttattagaatatgctgacatgatctttacttatatcttcattctggaaatgcttctaaaatggatggcatatggttttaaggcctatttctctaatggctggtacaggctggacttcgtggttgttattgtgttttgtcttagcttaataggcaaaactcgggaagaactaaaacctcttatttccatgaaattccttcggcccctcagagttctatctcaatttgaaagaatgaaggtggttgtgagagctttgatcaaaacaaccttacccactttgaatgtgtttcttgtctgcctgatgatctggctgatttttagtatcatgggagtagacttatttgctggcagattctatgaatgcattgacccaacaagtggagaaaggtttccttcatctgaagtcatgaataagagtcggtgtgaaagccttctgtttaacgaatccatgctatgggaaaatgcaaaaatgaactttgataatgttggaaatggtttcctttctctgcttcaagtagcaacatttaatggatggatcactattatgaattcagcaattgattctgttgctgttaatatacagcctcattttgaagtcaacatctacatgtattgttactttatcaactttattatatttggagtatttctccctctgagtatgctgattactgttattattgataatttcaacaagcataaaataaagctgggaggctcaaatatctttataacggttaaacagagaaaacagtaccgcaggctgaagaagctaatgtatgaggattctcaaagaccagtacctcgcccattaaacaagctccaaggattcatctttgatgtggtaacaagccaagcttttaatgtcattgttatggttcttatatgtttccaagcaatagccatgatgatagacactgatgttcagagtctacaaatgtccattgctctctactggattaactcaatttttgttatgctatatactatggaatgtatactgaagctcatcgctttccgttgtttttatttcaccattgcgtggaacatttttgattttatggtggttattttctccatcacaggactatgtctgcctatgacagtaggatcctaccttgtgcctccttcacttgtgcaactgatacttctctcacggatcattcacatgctgcgtcttggaaaaggaccaaaggtgtttcataatctgatgcttcctttgatgctgtccctcccagcattattgaacatcattcttctcatcttcctggtcatgttcatctatgccgtatttggaatgtataattttgcctatgttaaaaaagaagctggaattaatgatgtgtctaattttgaaacctttggcaacagtatgctctgtctttttcaagttgcaatatttgctggttgggatgggatgcttgatgcaattttcaacagtaaatggtctgactgtgatcctgataaaattaaccctgggactcaagttagaggagattgtgggaacccctctgttgggattttttattttgtcagttatatcctcatatcatggctgatcattgtaaatatgtacattgttgttgtcatggagtttttaaatattgcttctaagaagaaaaacaagaccttgagtgaagatgattttaggaaattctttcaggtatggaaaaggtttgatcctgataggacccagtacatagactctagcaagctttcagattttgcagctgctcttgatcctcctcttttcatggcaaaaccaaacaagggccagctcattgctttggacctccccatggctgttggggacagaattcattgcctcgatatcttacttgcttttacaaagagagttatgggtcaagatgtgaggatggagaaagttgtttcagaaatagaatcagggtttttgttagccaacccttttaagatcacatgtgagccaattacgactactttgaaacgaaaacaagaggcagtttcagcaaccatcattcaacgtgcttataaaaattaccgcttgaggcgaaatgacaaaaatacatcagatattcatatgatagatggtgacagagatgttcatgctactaaagaaggtgcctattttgacaaagctaaggaaaagtcacctattcaaagccagatctaataccacttaccacctcttttcatatttcttcacatatctgaaaaatgttgaaagcctaagccaggaataaaagaaaagtagagataataatcagttctttacaaccgatggtaattaagcttgtattcacaagacttcatgccaaattcactttttagcattatatctaacaaatcaagagaatccttaatattgctgcagtgagtttaaagtgggttaaagtggccatttgacaatctcatatttgttttctctacatggcttatatgatgtgtgccttctagggaatgaagggaagtggtgatagagatcagcagcagcaggggctttcttttatattttatgtataatttaatgggctttaagtcaccactattaagacttacaaataagcaaatactttcctgatgtgggatggtgaaatgctaatggccattaaatcataaacttgcctagacaaaagccaattggaagaagggagagagcagttctttagaaagtgcctttgagatcaacctcagagattcttgggctgattaaaactgcatttgaaaaagattggttgaagctctgtgtttatttttgtatgttcttgttttcatttggaactgggaatgaataggatttcattgtgctcaagctcctggtttctcatctctggatagtttcacctaagctctggctcttaagcaggacagattcgtaaaacaagaagcataaaggagaggtatagccttttttttttttttttttttcattttcttctcatttacacctatttttttaaaaagtatacatttactaaaatgatgtaataaataacatgttaatagactcaagctttaccttatgaaattgatgtatttttaccagttatttctaatgtaacattgaatatataagatctgacaaatgtatgtttaaacatgaattagaagagttgagaactaccattatgtatagggattctcatagtgtcttggcccttaattggaaagttgtggcaactttaaagtactttttactgtatgttataattctttataacttagagagagacaatggtcactcaaactatgagaactatgaattaggagataaaagtttaaatttgttgttgttttataacagtatgtacaagttagttttcccttatatatttacgttttcaagttttttaatctcatcatatacatccatactctataaaatgttttatattcaaagaactgtaaaatcctaaacattagttttcactattgaaattgttttttaaagataggcataaatagttgtccttagacttattcatacaaatatagtcatttacttctatgtagtttgagattctgagagttattccaactttatgaagattgatttcaatgtgcctgctaagtcctaaaagattcagaaagaaaatttatatattattgatttaaatatcatcctttaaatatgttgtataacattcaatatagtttatgtatcagtgattgtattttattctgaatgcatgatctcaagccttaactactataatctttttctgcccctcagaaattgaataacctaaccaagatgcctttaggggatgccctaagtaaatgtaatttcagatttcagggttttttttttttcctctctaagtgttccttccctttcttctcctgctctccatcatgttatggagaccagtgaggaaccagtgttaacttggtgacaatgtgacagctggtgctttatctaagctccgttttctatttcttgggaatgctttattgtggaaactgcttcagatacttaaattgaatcataacttgcttctgtaaattgcgtaaagacaacaaactgattttagtttgaaaagtttatcttttacttgtaaaccttgtttgccagttaccttccgaaagctgtgtaaagagttatttttaacaaagtcttaacaatatatgttactttttagatactatagaaaataataaatataacctgtaaaccaca

SEQ ID NO: 182705 - DNA, 7186 bp, Homo sapiens
  Payload ID: 15999
  Gene Symbol: SCN7A
  Gene Name: sodium channel, voltage gated, type VII alpha subunit
  Uniprot ID: Q01118
  ENST ID: ENST00000621965
  CDS Start-End: 131-5179
caggtcctccaccatgtgaatgccaacatggccaggtcattagagctgagggaaaactagtgcccaaagatatgaaaagagtgtggatcttctggagaagtgctgttgttcaacaggtacaaaattggaaatgttggcttcaccagaacctaagggccttgttcccttcactaaagagtcttttgaacttataaaacagcatattgctaaaacacataatgaagaccatgaagaagaagacttaaagccaactcctgatttggaagttggcaaaaagcttccatttatttatggaaacctttctcaaggaatggtgtcagagcccttggaagatgtggacccatattactacaagaaaaaaaatactttcatagtattaaataaaaatagaacaatcttcagattcaatgcggcttccatcttgtgtacattgtctcctttcaattgtattagaagaacaactatcaaggttttggtacatccatttttccaactgtttattctaattagtgtcctgattgattgcgtattcatgtccctgactaatttgccaaaatggagaccagtattagagaatactttgcttggaatttacacatttgaaatacttgtaaaactctttgcaagaggtgtctgggcaggatcattttccttcctcggtgatccatggaactggctcgatttcagcgtaactgtgtttgaggttattataagatactcacctctggacttcattccaacgcttcaaactgcaagaactttgagaattttaaaaattattcctttaaatcaaggtctgaaatcccttgtaggggtcctgatccactgcttgaagcagcttattggtgtcattatcctaactctgttttttctgagcatattttctctaattgggatggggctcttcatgggcaacttgaaacataaatgttttcgatggccccaagagaatgaaaatgaaaccctgcacaacagaactggaaacccatattatattcgagaaacagaaaacttttattatttggaaggagaaagatatgctctcctttgtggcaacaggacagatgctggtcagtgtcctgaaggatatgtgtgtgtaaaagctggcataaatcctgatcaaggcttcacaaattttgacagttttggctgggccttatttgccctatttcggttaatggctcaggattaccctgaagtactttatcaccagatactttatgcttctgggaaggtctacatgatattttttgtggtggtaagttttttgttttccttttatatggcaagtttgttcttaggcatacttgccatggcctatgaagaagaaaagcagagagttggtgaaatatctaagaagattgaaccaaaatttcaacagactggaaaagaacttcaagaaggaaatgaaacagatgaggccaagaccatacaaatagaaatgaagaaaaggtcaccaatttccacagacacatcattggatgtgttggaagatgctactctcagacataaggaagaacttgaaaaatccaagaagatatgcccattatactggtataagtttgctaaaactttcttgatctggaattgttctccctgttggttaaaattgaaagagtttgtccataggattataatggcaccatttactgatcttttccttatcatatgcataattttaaacgtatgttttctgaccttggagcattatccaatgagtaaacaaactaacactcttctcaacattggaaacctggttttcattggaattttcacagcagaaatgatttttaaaataattgcaatgcatccatatgggtatttccaagtaggttggaacatttttgatagcatgatagtgttccatggtttaatagaactttgtctagcaaatgttgcaggaatggctcttcttcgattattcaggatgttaagaattttcaagttgggaaagtattggccaacattccagattttgatgtggtctcttagtaactcatgggtggccctgaaagacttggtcctgttgttgttcacattcatcttcttttctgctgcattcggcatgaagctgtttggtaagaattatgaagaatttgtctgccacatagacaaagactgtcaactcccacgctggcacatgcatgactttttccactccttcctgaatgtgttccgaattctctgtggagagtgggtagagaccttgtgggactgtatggaggttgcaggccaatcctggtgtattcctttttacctgatggtcattttaattggaaatttactggtactttacctgtttctggcattggtgagctcatttagttcatgcaaggatgtaacagctgaagagaataatgaagcaaaaaatctccagcttgcagtggcaagaattaaaaaaggaataaactatgtgcttcttaaaatactatgcaaaacacaaaatgtcccaaaggacacaatggaccatgtaaatgaggtatatgttaaagaagatatttctgaccataccctttctgaattgagcaacacccaagattttctcaaagataaggaaaaaagcagtggcacagagaaaaacgctactgaaaatgagagccaatcacttatccccagtcctagtgtctcagaaactgtaccaattgcttcaggagaatctgatatagaaaatctggataataaggagattcagagtaagtctggtgatggaggcagcaaagagaaaataaagcaatctagctcatctgaatgcagtactgttgatattgctatctctgaagaagaagaaatgttctatggaggtgaaagatcaaagcatctgaaaaatggttgcagacgcggatcttcacttggtcaaatcagtggagcatccaagaaaggaaaaatctggcagaacatcaggaaaacctgctgcaagattgtagagaacaattggtttaagtgttttattgggcttgttactctgctcagcactggcactctggcttttgaagatatatatatggatcagagaaagacaattaaaattttattagaatatgctgacatgatctttacttatatcttcattctggaaatgcttctaaaatggatggcatatggttttaaggcctatttctctaatggctggtacaggctggacttcgtggttgttattgtgttttgtcttagcttaataggcaaaactcgggaagaactaaaacctcttatttccatgaaattccttcggcccctcagagttctatctcaatttgaaagaatgaaggtggttgtgagagctttgatcaaaacaaccttacccactttgaatgtgtttcttgtctgcctgatgatctggctgatttttagtatcatgggagtagacttatttgctggcagattctatgaatgcattgacccaacaagtggagaaaggtttccttcatctgaagtcatgaataagagtcggtgtgaaagccttctgtttaacgaatccatgctatgggaaaatgcaaaaatgaactttgataatgttggaaatggtttcctttctctgcttcaagtagcaacatttaatggatggatcactattatgaattcagcaattgattctgttgctgttaatatacagcctcattttgaagtcaacatctacatgtattgttactttatcaactttattatatttggagtatttctccctctgagtatgctgattactgttattattgataatttcaacaagcataaaataaagctgggaggctcaaatatctttataacggttaaacagagaaaacagtaccgcaggctgaagaagctaatgtatgaggattctcaaagaccagtacctcgcccattaaacaagctccaaggattcatctttgatgtggtaacaagccaagcttttaatgtcattgttatggttcttatatgtttccaagcaatagccatgatgatagacactgatgttcagagtctacaaatgtccattgctctctactggattaactcaatttttgttatgctatatactatggaatgtatactgaagctcatcgctttccgttgtttttatttcaccattgcgtggaacatttttgattttatggtggttattttctccatcacaggactatgtctgcctatgacagtaggatcctaccttgtgcctccttcacttgtgcaactgatacttctctcacggatcattcacatgctgcgtcttggaaaaggaccaaaggtgtttcataatctgatgcttcctttgatgctgtccctcccagcattattgaacatcattcttctcatcttcctggtcatgttcatctatgccgtatttggaatgtataattttgcctatgttaaaaaagaagctggaattaatgatgtgtctaattttgaaacctttggcaacagtatgctctgtctttttcaagttgcaatatttgctggttgggatgggatgcttgatgcaattttcaacagtaaatggtctgactgtgatcctgataaaattaaccctgggactcaagttagaggagattgtgggaacccctctgttgggattttttattttgtcagttatatcctcatatcatggctgatcattgtaaatatgtacattgttgttgtcatggagtttttaaatattgcttctaagaagaaaaacaagaccttgagtgaagatgattttaggaaattctttcaggtatggaaaaggtttgatcctgataggacccagtacatagactctagcaagctttcagattttgcagctgctcttgatcctcctcttttcatggcaaaaccaaacaagggccagctcattgctttggacctccccatggctgttggggacagaattcattgcctcgatatcttacttgcttttacaaagagagttatgggtcaagatgtgaggatggagaaagttgtttcagaaatagaatcagggtttttgttagccaacccttttaagatcacatgtgagccaattacgactactttgaaacgaaaacaagaggcagtttcagcaaccatcattcaacgtgcttataaaaattaccgcttgaggcgaaatgacaaaaatacatcagatattcatatgatagatggtgacagagatgttcatgctactaaagaaggtgcctattttgacaaagctaaggaaaagtcacctattcaaagccagatctaataccacttaccacctcttttcatatttcttcacatatctgaaaaatgttgaaagcctaagccaggaataaaagaaaagtagagataataatcagttctttacaaccgatggtaattaagcttgtattcacaagacttcatgccaaattcactttttagcattatatctaacaaatcaagagaatccttaatattgctgcagtgagtttaaagtgggttaaagtggccatttgacaatctcatatttgttttctctacatggcttatatgatgtgtgccttctagggaatgaagggaagtggtgatagagatcagcagcagcaggggctttcttttatattttatgtataatttaatgggctttaagtcaccactattaagacttacaaataagcaaatactttcctgatgtgggatggtgaaatgctaatggccattaaatcataaacttgcctagacaaaagccaattggaagaagggagagagcagttctttagaaagtgcctttgagatcaacctcagagattcttgggctgattaaaactgcatttgaaaaagattggttgaagctctgtgtttatttttgtatgttcttgttttcatttggaactgggaatgaataggatttcattgtgctcaagctcctggtttctcatctctggatagtttcacctaagctctggctcttaagcaggacagattcgtaaaacaagaagcataaaggagaggtatagccttttttttttttttttttttcattttcttctcatttacacctatttttttaaaaagtatacatttactaaaatgatgtaataaataacatgttaatagactcaagctttaccttatgaaattgatgtatttttaccagttatttctaatgtaacattgaatatataagatctgacaaatgtatgtttaaacatgaattagaagagttgagaactaccattatgtatagggattctcatagtgtcttggcccttaattggaaagttgtggcaactttaaagtactttttactgtatgttataattctttataacttagagagagacaatggtcactcaaactatgagaactatgaattaggagataaaagtttaaatttgttgttgttttataacagtatgtacaagttagttttcccttatatatttacgttttcaagttttttaatctcatcatatacatccatactctataaaatgttttatattcaaagaactgtaaaatcctaaacattagttttcactattgaaattgttttttaaagataggcataaatagttgtccttagacttattcatacaaatatagtcatttacttctatgtagtttgagattctgagagttattccaactttatgaagattgatttcaatgtgcctgctaagtcctaaaagattcagaaagaaaatttatatattattgatttaaatatcatcctttaaatatgttgtataacattcaatatagtttatgtatcagtgattgtattttattctgaatgcatgatctcaagccttaactactataatctttttctgcccctcagaaattgaataacctaaccaagatgcctttaggggatgccctaagtaaatgtaatttcagatttcagggttttttttttttcctctctaagtgttccttccctttcttctcctgctctccatcatgttatggagaccagtgaggaaccagtgttaacttggtgacaatgtgacagctggtgctttatctaagctccgttttctatttcttgggaatgctttattgtggaaactgcttcagatacttaaattgaatcataacttgcttctgtaaattgcgtaaagacaacaaactgattttagtttgaaaagtttatcttttacttgtaaaccttgtttgccagttaccttccgaaagctgtgtaaagagttatttttaacaaagtcttaacaatatatgttactttttagatactatagaaaataataaatataacctgtaaaccaca

SEQ ID NO: 182706 - DNA, 11556 bp, Homo sapiens
  Payload ID: 16000
  Gene Symbol: SCN8A
  Gene Name: sodium channel, voltage gated, type VIII alpha subunit
  Uniprot ID: Q9UQD0
  ENST ID: ENST00000354534
  CDS Start-End: 179-6121
gagcgctccaagatggcgcccaccgcagtcccgcccgccgcatcctcggcgcctttgcagtccggccgcgcctcccgggccccgcgttagggccgccgctgcctccctcgccgccgccgctgccagctgacctgtcctggacgcagcataactaacgaagctgctgcaggatgagaagatggcagcgcggctgcttgcaccaccaggccctgatagtttcaagcctttcacccctgagtcactggcaaacattgagaggcgcattgctgagagcaagctcaagaaaccaccaaaggccgatggcagtcatcgggaggacgatgaggacagcaagcccaagccaaacagcgacctggaagcagggaagagtttgcctttcatctacggggacatcccccaaggcctggttgcagttcccctggaggactttgacccatactatttgacgcagaaaacctttgtagtattaaacagagggaaaactctcttcagatttagtgccacgcctgccttgtacattttaagtccttttaacctgataagaagaatagctattaaaattttgatacattcagtatttagcatgatcattatgtgcactattttgaccaactgtgtattcatgacttttagtaaccctcctgactggtcgaagaatgtggagtacacgttcacagggatttatacatttgaatcactagtgaaaatcattgcaagaggtttctgcatagatggctttacctttttacgggacccatggaactggttagatttcagtgtcatcatgatggcgtatataacagagtttgtaaacctaggcaatgtttcagctctacgcactttcagggtactgagggctttgaaaactatttcggtaatcccaggcctgaagacaattgtgggtgccctgattcagtctgtgaagaaactgtcagatgtgatgatcctgacagtgttctgcctgagtgtttttgccttgatcggactgcagctgttcatggggaaccttcgaaacaagtgtgttgtgtggcccataaacttcaacgagagctatcttgaaaatggcaccaaaggctttgattgggaagagtatatcaacaataaaacaaatttctacacagttcctggcatgctggaacctttactctgtgggaacagttctgatgctgggcaatgcccagagggataccagtgtatgaaagcaggaaggaaccccaactatggttacacaagttttgacacttttagctgggccttcttggcattatttcgccttatgacccaggactattgggaaaacttgtatcaattgactttacgagcagccgggaaaacatacatgatcttcttcgtcttggtcatctttgtgggttctttctatctggtgaacttgatcttggctgtggtggccatggcttatgaagaacagaatcaggcaacactggaggaggcagaacaaaaagaggctgaatttaaagcaatgttggagcaacttaagaagcaacaggaagaggcacaggctgctgcgatggccacttcagcaggaactgtctcagaagatgccatagaggaagaaggtgaagaaggagggggctcccctcggagctcttctgaaatctctaaactcagctcaaagagtgcaaaggaaagacgtaacaggagaaagaagaggaagcaaaaggaactctctgaaggagaggagaaaggggatcccgagaaggtgtttaagtcagagtcagaagatggcatgagaaggaaggcctttcggctgccagacaacagaatagggaggaaattttccatcatgaatcagtcactgctcagcatcccaggctcgcccttcctctcccgccacaacagcaagagcagcatcttcagtttcaggggacctgggcggttccgagacccgggctccgagaatgagttcgcggatgacgagcacagcacggtggaggagagcgagggccgccgggactccctcttcatccccatccgggcccgcgagcgccggagcagctacagcggctacagcggctacagccagggcagccgctcctcgcgcatcttccccagcctgcggcgcagcgtgaagcgcaacagcacggtggactgcaacggcgtggtgtccctcatcggcggccccggctcccacatcggcgggcgtctcctgccagaggctacaactgaggtggaaattaagaagaaaggccctggatctcttttagtttccatggaccaattagcctcctacgggcggaaggacagaatcaacagtataatgagtgttgttacaaatacactagtagaagaactggaagagtctcagagaaagtgcccgccatgctggtataaatttgccaacactttcctcatctgggagtgccacccctactggataaaactgaaagagattgtgaacttgatagttatggacccttttgtggatttagccatcaccatctgcatcgtcctgaatacactgtttatggcaatggagcaccatcctatgacaccacaatttgaacatgtcttggctgtaggaaatctggttttcactggaattttcacagcggaaatgttcctgaagctcatagccatggatccctactattatttccaagaaggttggaacatttttgacggatttattgtctccctcagtttaatggaactgagtctagcagacgtggaggggctttcagtgctgcgatctttccgattgctccgagtcttcaaattggccaaatcctggcccaccctgaacatgctaatcaagattattggaaattcagtgggtgccctgggcaacctgacactggtgctggccattattgtcttcatctttgccgtggtggggatgcaactctttggaaaaagctacaaagagtgtgtctgcaagatcaaccaggactgtgaactccctcgctggcatatgcatgactttttccattccttcctcattgtctttcgagtgttgtgcggggagtggattgagaccatgtgggactgcatggaagtggcaggccaggccatgtgcctcattgtctttatgatggtcatggtgattggcaacttggtggtgctgaacctgtttctggccttgctcctgagctccttcagtgcagacaacctggctgccacagatgacgatggggaaatgaacaacctccagatctcagtgatccgtatcaagaagggtgtggcctggaccaaactaaaggtgcacgccttcatgcaggcccactttaagcagcgtgaggctgatgaggtgaagcctctggatgagttgtatgaaaagaaggccaactgtatcgccaatcacaccggtgcagacatccaccggaatggtgacttccagaagaatggcaatggcacaaccagcggcattggcagcagcgtggagaagtacatcattgatgaggaccacatgtccttcatcaacaaccccaacttgactgtacgggtacccattgctgtgggcgagtctgactttgagaacctcaacacagaggatgttagcagcgagtcggatcctgaaggcagcaaagataaactagatgacaccagctcctctgaaggaagcaccattgatatcaaaccagaagtagaagaggtccctgtggaacagcctgaggaatacttggatccagatgcctgcttcacagaaggttgtgtccagcggttcaagtgctgccaggtcaacatcgaggaagggctaggcaagtcttggtggatcctgcggaaaacctgcttcctcatcgtggagcacaactggtttgagaccttcatcatcttcatgattctgctgagcagtggcgccctggccttcgaggacatctacattgagcagagaaagaccatccgcaccatcctggaatatgctgacaaagtcttcacctatatcttcatcctggagatgttgctcaagtggacagcctatggcttcgtcaagttcttcaccaatgcctggtgttggctggacttcctcattgtggctgtctctttagtcagccttatagctaatgccctgggctactcggaactaggtgccataaagtcccttaggaccctaagagctttgagacccttaagagccttatcacgatttgaagggatgagggtggtggtgaatgccttggtgggcgccatcccctccatcatgaatgtgctgctggtgtgtctcatcttctggctgattttcagcatcatgggagttaacttgtttgcgggaaagtaccactactgctttaatgagacttctgaaatccgatttgaaattgaagatgtcaacaataaaactgaatgtgaaaagcttatggaggggaacaatacagagatcagatggaagaacgtgaagatcaactttgacaatgttggggcaggatacctggcccttcttcaagtagcaaccttcaaaggctggatggacatcatgtatgcagctgtagattcccggaagcctgatgagcagcctaagtatgaggacaatatctacatgtacatctattttgtcatcttcatcatcttcggctccttcttcaccctgaacctgttcattggtgtcatcattgataacttcaatcaacaaaagaaaaagttcggaggtcaggacatcttcatgaccgaagaacagaagaagtactacaatgccatgaaaaagctgggctcaaagaagccacagaaacctattccccgccccttgaacaaaatccaaggaatcgtctttgattttgtcactcagcaagcctttgacattgttatcatgatgctcatctgccttaacatggtgacaatgatggtggagacagacactcaaagcaagcagatggagaacatcctctactggattaacctggtgtttgttatcttcttcacctgtgagtgtgtgctcaaaatgtttgcgttgaggcactactacttcaccattggctggaacatcttcgacttcgtggtagtcatcctctccattgtgggaatgttcctggcagatataattgagaaatactttgtttccccaaccctattccgagtcatccgattggcccgtattgggcgcatcttgcgtctgatcaaaggcgccaaagggattcgtaccctgctctttgccttaatgatgtccttgcctgccctgttcaacatcggccttctgctcttcctggtcatgttcatcttctccatttttgggatgtccaattttgcatatgtgaagcacgaggctggtatcgatgacatgttcaactttgagacatttggcaacagcatgatctgcctgtttcaaatcacaacctcagctggttgggatggcctgctgctgcccatcctaaaccgcccccctgactgcagcctagataaggaacacccagggagtggctttaagggagattgtgggaacccctcagtgggcatcttcttctttgtaagctacatcatcatctctttcctaattgtcgtgaacatgtacattgccatcatcctggagaacttcagtgtagccacagaggaaagtgcagaccctctgagtgaggatgactttgagaccttctatgagatctgggagaagttcgaccccgatgccacccagttcattgagtactgtaagctggcagactttgcagatgccttggagcatcctctccgagtgcccaagcccaataccattgagctcatcgctatggatctgccaatggtgagcggggatcgcatccactgcttggacatcctttttgccttcaccaagcgggtcctgggagatagcggggagttggacatcctgcggcagcagatggaagagcggttcgtggcatccaatccttccaaagtgtcttacgagccaatcacaaccacactgcgtcgcaagcaggaggaggtatctgcagtggtcctgcagcgtgcctaccggggacatttggcaaggcggggcttcatctgcaaaaagacaacttctaataagctggagaatggaggcacacaccgggagaaaaaagagagcaccccatctacagcctccctcccgtcctatgacagtgtaactaaacctgaaaaggagaaacagcagcgggcagaggaaggaagaagggaaagagccaaaagacaaaaagaggtcagagaatccaagtgttagaggagaacaaaaattcagtattatacagatctaaaactcgcaagtgaaagattgtttacaaacttcctgaatattatcaatgcagaacagctgtggagactctaacctgaagatctataccaaacgtcgtctgcttaccacgtaacacagctgcatcttgagcagtgacctgccaagggcaaaggaccccgctccctagacttacagattttctaatgcttgggcaggtggttactgcatgttccacatcagtcaatgcaacttaggacaaaactaaccagatacagaaacagaagagaggctgccgggaccagcatatttccgttgcagccaaatggattttattttttcattttattgattctcagaagcagaaagcatcactttaaaagttcgtttgttcatgcaaactatatttgcattcttacattagttaagctaagcagcaaaaagaaaacacacacacacactcacatttagcccatgtcatttaattgtcagtttctttgacataaagcgcatcttctccacatgggcttcacgtggtttggagatgggtgggggaaaacaatcaggtttcttcaggctgaggaggacttgctcaggccgattccaaacattgtgctcgttcaatgcgtagaaatgatttgcatgatggcatgccgtgatcagaagtcatgcatgagatccatacaccacaggacactactaatctagtcccttgcactgggtcagcctttggacaggacccagccctgcaccgttcactgtatttggagaaaatggtaagagttccataccggctacaattctttgagttcttaaaagtccttcatacaccttctgggtagggaaacaaccaactaattgactaacaccaccaacaacaaaaaacaaacccaatccaacaagcagatggatccgttgcgtgtatatgtttaacagacatctctaacatacagccattgttgcacattttgcaagatgaactatttaatgctgctctgtgtccagtacatgggggagactttgatcccaaatggcttgtactatttatgtcactgtaaaaccaaatcctagggctaaaaaaaaaattcatttgtatcttgcaatatttatgacgatcgtttagccttcatactggagaattgacacttatttggggtagagataaaagtgcttttcaaagtagcaccagttatctctaggggtaatttggggaacttaaaatgacctttcattgggagttatggggtgctcatttcatttcgtatcatgtcctctgcattgtggctttctccaggcatgggtcgataccgcgaggggttcagatattctgaactgacctctctcttctgcagaggggtcatcgcatactcacacactgcatggctccccctgcctccatcacatttctccactgagcagggcttcccttgcccacagaggtgggtgagggtagcagcattggggttacggctgtggtttctttcacttattattagaataatagtcactggtgagacctgaggtagagatggagccgcctctgaaccaagcccacttggtttctttactgcactggttttcatgagaaagcaatttaatattaattctttaggatgttccagcttccctcagtgcattcccttgcagccagttttgctatctgcttagcgacctgcccattgtcattgaagtgtggcttctgggggagcgtcatatcttccattccatctcctgctttaggaaagacagtttttagtccaggggtttctcacctaatgactggatttcaaagccaagatgctgcagttgaatgtgtcaggaagtctctatacaaagagtgaaaagagactttagcatgtgaaccaaatccaaataaattcttcctgaaccatacactagagggggaagaagaaccaacccataatcagacacaccgatctgccttgcagtagaagcactttgaaggtaatttcacagtccaccagactagttttgcatagaacaaaccacagtaagtcggcaagcagagctttctatcttgttggaccactagaaactgtccagctctcttaagcctgcttctgcagcagcatccgtagaatttttgtactacacccaataccagactgggaaggcctatctttcagtgaccctgctaactgctaggatgaatgtatagtaacatgtacaggctacattgtaaacagcacaaaacagaagctgacatgtgtggttattctttttaagagaattataaatactgtaatatataattttattttattggcatgcctttttgtaaatacaaattattaacttattaaataggaaatggcttctggcttatgccattgtcatgtttatttttattttttatacttttctttcttcttagaacttagatgctgtcagccaatgtacatccccaaaccagacagacagacaaaaaattttttattgctaatggtcttttccaaaacaacaaaaaatatatatttttgttccaatgtgcaataaattctaaccacgtctatgcaagatttggctaaacttaataattgttcttaggtcttgagatgggcaacagagctgtaagatcccgccaagtacaccatgtgctcatgctagtgatgtcattaagctactagggcatagtgatgagatttttctgagatctaaccgtttccctccgctagctcctgaccccagcccagcaggctgtctcctcagtaacacatgggccttggtatctggcacccatcagccagcctcataggaaagaagccacctccgctgtatttgaagtttcactttttaaaaaaaaaatgtttcccacctttttatccttcacccactgtccttccacctgctcactcactcactctctcacccatcctgctccacacttctttggtagtaaatgacaccatcaccagcagtttacacccgcagttaacaggcatcgaactgaaagaatcagtgatgacgtttttgtgcatcttcgctgagtgggtaagtggcaatgctttgccaaatattaacgaagccaatcaaagagcagcgcagccacagtatcactgcacatatatatatagatatataaatataatataaatatttattttttgtagccaggtccttggtgcagtatttatactccacaatccaccttttaaaaaaaggacaaaaagcaaaaagatgtgtgatgctgttaataatttaaaatgcagagccaaagccactgagcagcagctgacatggttgctggtttgtgtgtgaaaaacattttccccctcttctttccttaacctccttgttgcttaggatgaggagactctgtaatttaaagcagaggacgagaggaggaagaaacttccatgttaacatggcctactctcactcctttctaaacgagccacttttggcgtcagaagttgactggagagagataaacaaactcccagtcaaagcccctaaagcgacagtgcccagagttcttttattttttgctgcaaccaacgtaaacctgtaaaagaccaacagtgaagattagtgtattagtgaatgcatggaggccaatgctgccctaatgagacgtgataaaaagtccatcactcctctaagccaaaaggaaacaaaataaaaatgaccctttttactgtacaagggaagcctgtcttggtgtgtttgttgcttgactatcccaattcttgagtcctgggaggggtctgggaattgggaccttagcacatttggggaaaggaggggaatagagggaagagaaatcaaaggggctctcgcaaagttctggctaagaaggagagattggaagaaaagcaaggtcctgaccccccccagatccccactcacccattgcatgtggcattccccactactggccggtgcttagaggcccataaaacctctcttcacctaatccacctggcagagccctcagagatgacgtcagccaacccagctggactggccttacttctgcctttttcacctgtatgttaaaaaacaaaaacaaaaaaaccctatccctgtgccccaaagctagggcatgtgcgatgcccaacagcctccactctgcaagctcatactgggccctgccctccatcgccccagacaggcccacagacgagggctggtctccttcacatttgtgtgggggtgggggcacgcttcctcttccttctctccctgtccccctttggggacatccctctctaggcctaggccatgtctcctggttcaggaacactctctcaggaggatctcgaagtgcccactctagtccgctccagtagctccactctggagcgagatggctggtaggtcagtccccatcctcctcccctcggcccccagcctccaggcctgctgtggaggtgagatcgccatgggtcatgactttgtgacttgagtcctgggcatcttctgtaatgatgcctctttcttttctcagatgttgcccacagtttagcaaaaagcttcgttcattttcaggtactccccaccccctaaagaattggctgcaacttgccagccagggggacatcaggagagaagaggaagtctgggttgggaggggcccaagttttgcaacagagtttccattgttcagctctgtgctttcttggattccctttccaagattaccaagatttcctccattaaaactcctgaggcaccccctgcccctgccccccactgctgtttgctgtacatagaggctaagtggggtggggtgggtgggtgtgcacatgtggtgtgtgtgtgtgtgtgtgaagaatgtatataggtaaaggggagtgtggtccagtggttccagaaaagggacagaactgtgttctgtccctagcttgaccgctggctcgctgtgtggccttgggcaagtcacttaacctctctgtgcctcagtttccccatctgtaaaatggggataataatactgacctacctcacaggggtgttgtgaggctttaactaaatgttttgtaaagcgttttgagatacagaggcaaaggcgctagggaagggcaaagtattattggacttaaggaagctgaaatggtaccataaatgctgctattctgagagccattttaaactgcactgctccaaccacccccgcttctcatcaccaggacagcaggtcgagaaaatgtctttcctttcacttgcttctggggtttgtgattattcaagacaattttttccccttgctgtatctccttccctcacctcctcgacttgttccctgttctgtttatgcggaaatggcagaaatgcttgagaaatgagaatgtgtaagtggattggaagtttatagtatgaaatttcaattttactttgtactgtacatctttttactttagaatttgcaataaagggttacgtcaatcttgttttcaactctc

SEQ ID NO: 182707 - DNA, 5820 bp, Homo sapiens
  Payload ID: 16000
  Gene Symbol: SCN8A
  Gene Name: sodium channel, voltage gated, type VIII alpha subunit
  Uniprot ID: Q9UQD0
  ENST ID: ENST00000355133
  CDS Start-End: 1-5820
atggcagcgcggctgcttgcaccaccaggccctgatagtttcaagcctttcacccctgagtcactggcaaacattgagaggcgcattgctgagagcaagctcaagaaaccaccaaaggccgatggcagtcatcgggaggacgatgaggacagcaagcccaagccaaacagcgacctggaagcagggaagagtttgcctttcatctacggggacatcccccaaggcctggttgcagttcccctggaggactttgacccatactatttgacgcagaaaacctttgtagtattaaacagagggaaaactctcttcagatttagtgccacgcctgccttgtacattttaagtccttttaacctgataagaagaatagctattaaaattttgatacattcagtatttagcatgatcattatgtgcactattttgaccaactgtgtattcatgacttttagtaaccctcctgactggtcgaagaatgtggagtacacgttcacagggatttatacatttgaatcactagtgaaaatcattgcaagaggtttctgcatagatggctttacctttttacgggacccatggaactggttagatttcagtgtcatcatgatggcgtatataacagagtttgtaaacctaggcaatgtttcagctctacgcactttcagggtactgagggctttgaaaactatttcggtaatcccaggcctgaagacaattgtgggtgccctgattcagtctgtgaagaaactgtcagatgtgatgatcctgacagtgttctgcctgagtgtttttgccttgatcggactgcagctgttcatggggaaccttcgaaacaagtgtgttgtgtggcccataaacttcaacgagagctatcttgaaaatggcaccaaaggctttgattgggaagagtatatcaacaataaaacaaatttctacacagttcctggcatgctggaacctttactctgtgggaacagttctgatgctgggcaatgcccagagggataccagtgtatgaaagcaggaaggaaccccaactatggttacacaagttttgacacttttagctgggccttcttggcattatttcgccttatgacccaggactattgggaaaacttgtatcaattgactttacgagcagccgggaaaacatacatgatcttcttcgtcttggtcatctttgtgggttctttctatctggtgaacttgatcttggctgtggtggccatggcttatgaagaacagaatcaggcaacactggaggaggcagaacaaaaagaggctgaatttaaagcaatgttggagcaacttaagaagcaacaggaagaggcacaggctgctgcgatggccacttcagcaggaactgtctcagaagatgccatagaggaagaaggtgaagaaggagggggctcccctcggagctcttctgaaatctctaaactcagctcaaagagtgcaaaggaaagacgtaacaggagaaagaagaggaagcaaaaggaactctctgaaggagaggagaaaggggatcccgagaaggtgtttaagtcagagtcagaagatggcatgagaaggaaggcctttcggctgccagacaacagaatagggaggaaattttccatcatgaatcagtcactgctcagcatcccaggctcgcccttcctctcccgccacaacagcaagagcagcatcttcagtttcaggggacctgggcggttccgagacccgggctccgagaatgagttcgcggatgacgagcacagcacggtggaggagagcgagggccgccgggactccctcttcatccccatccgggcccgcgagcgccggagcagctacagcggctacagcggctacagccagggcagccgctcctcgcgcatcttccccagcctgcggcgcagcgtgaagcgcaacagcacggtggactgcaacggcgtggtgtccctcatcggcggccccggctcccacatcggcgggcgtctcctgccagaggctacaactgaggtggaaattaagaagaaaggccctggatctcttttagtttccatggaccaattagcctcctacgggcggaaggacagaatcaacagtataatgagtgttgttacaaatacactagtagaagaactggaagagtctcagagaaagtgcccgccatgctggtataaatttgccaacactttcctcatctgggagtgccacccctactggataaaactgaaagagattgtgaacttgatagttatggacccttttgtggatttagccatcaccatctgcatcgtcctgaatacactgtttatggcaatggagcaccatcctatgacaccacaatttgaacatgtcttggctgtaggaaatctggttttcactggaattttcacagcggaaatgttcctgaagctcatagccatggatccctactattatttccaagaaggttggaacatttttgacggatttattgtctccctcagtttaatggaactgagtctagcagacgtggaggggctttcagtgctgcgatctttccgattgctccgagtcttcaaattggccaaatcctggcccaccctgaacatgctaatcaagattattggaaattcagtgggtgccctgggcaacctgacactggtgctggccattattgtcttcatctttgccgtggtggggatgcaactctttggaaaaagctacaaagagtgtgtctgcaagatcaaccaggactgtgaactccctcgctggcatatgcatgactttttccattccttcctcattgtctttcgagtgttgtgcggggagtggattgagaccatgtgggactgcatggaagtggcaggccaggccatgtgcctcattgtctttatgatggtcatggtgattggcaacttggtggtgctgaacctgtttctggccttgctcctgagctccttcagtgcagacaacctggctgccacagatgacgatggggaaatgaacaacctccagatctcagtgatccgtatcaagaagggtgtggcctggaccaaactaaaggtgcacgccttcatgcaggcccactttaagcagcgtgaggctgatgaggtgaagcctctggatgagttgtatgaaaagaaggccaactgtatcgccaatcacaccggtgcagacatccaccggaatggtgacttccagaagaatggcaatggcacaaccagcggcattggcagcagcgtggagaagtacatcattgatgaggaccacatgtccttcatcaacaaccccaacttgactgtacgggtacccattgctgtgggcgagtctgactttgagaacctcaacacagaggatgttagcagcgagtcggatcctgaaggcagcaaagataaactagatgacaccagctcctctgaaggaagcaccattgatatcaaaccagaagtagaagaggtccctgtggaacagcctgaggaatacttggatccagatgcctgcttcacagaaggttgtgtccagcggttcaagtgctgccaggtcaacatcgaggaagggctaggcaagtcttggtggatcctgcggaaaacctgcttcctcatcgtggagcacaactggtttgagaccttcatcatcttcatgattctgctgagcagtggcgccctggccttcgaggacatctacattgagcagagaaagaccatccgcaccatcctggaatatgctgacaaagtcttcacctatatcttcatcctggagatgttgctcaagtggacagcctatggcttcgtcaagttcttcaccaatgcctggtgttggctggacttcctcattgtggctgtggtggtgaatgccttggtgggcgccatcccctccatcatgaatgtgctgctggtgtgtctcatcttctggctgattttcagcatcatgggagttaacttgtttgcgggaaagtaccactactgctttaatgagacttctgaaatccgatttgaaattgaagatgtcaacaataaaactgaatgtgaaaagcttatggaggggaacaatacagagatcagatggaagaacgtgaagatcaactttgacaatgttggggcaggatacctggcccttcttcaagtagcaaccttcaaaggctggatggacatcatgtatgcagctgtagattcccggaagcctgatgagcagcctaagtatgaggacaatatctacatgtacatctattttgtcatcttcatcatcttcggctccttcttcaccctgaacctgttcattggtgtcatcattgataacttcaatcaacaaaagaaaaagttcggaggtcaggacatcttcatgaccgaagaacagaagaagtactacaatgccatgaaaaagctgggctcaaagaagccacagaaacctattccccgccccttgaacaaaatccaaggaatcgtctttgattttgtcactcagcaagcctttgacattgttatcatgatgctcatctgccttaacatggtgacaatgatggtggagacagacactcaaagcaagcagatggagaacatcctctactggattaacctggtgtttgttatcttcttcacctgtgagtgtgtgctcaaaatgtttgcgttgaggcactactacttcaccattggctggaacatcttcgacttcgtggtagtcatcctctccattgtgggaatgttcctggcagatataattgagaaatactttgtttccccaaccctattccgagtcatccgattggcccgtattgggcgcatcttgcgtctgatcaaaggcgccaaagggattcgtaccctgctctttgccttaatgatgtccttgcctgccctgttcaacatcggccttctgctcttcctggtcatgttcatcttctccatttttgggatgtccaattttgcatatgtgaagcacgaggctggtatcgatgacatgttcaactttgagacatttggcaacagcatgatctgcctgtttcaaatcacaacctcagctggttgggatggcctgctgctgcccatcctaaaccgcccccctgactgcagcctagataaggaacacccagggagtggctttaagggagattgtgggaacccctcagtgggcatcttcttctttgtaagctacatcatcatctctttcctaattgtcgtgaacatgtacattgccatcatcctggagaacttcagtgtagccacagaggaaagtgcagaccctctgagtgaggatgactttgagaccttctatgagatctgggagaagttcgaccccgatgccacccagttcattgagtactgtaagctggcagactttgcagatgccttggagcatcctctccgagtgcccaagcccaataccattgagctcatcgctatggatctgccaatggtgagcggggatcgcatccactgcttggacatcctttttgccttcaccaagcgggtcctgggagatagcggggagttggacatcctgcggcagcagatggaagagcggttcgtggcatccaatccttccaaagtgtcttacgagccaatcacaaccacactgcgtcgcaagcaggaggaggtatctgcagtggtcctgcagcgtgcctaccggggacatttggcaaggcggggcttcatctgcaaaaagacaacttctaataagctggagaatggaggcacacaccgggagaaaaaagagagcaccccatctacagcctccctcccgtcctatgacagtgtaactaaacctgaaaaggagaaacagcagcgggcagaggaaggaagaagggaaagagccaaaagacaaaaagaggtcagagaatccaagtgttag

SEQ ID NO: 182708 - DNA, 11433 bp, Homo sapiens
  Payload ID: 16000
  Gene Symbol: SCN8A
  Gene Name: sodium channel, voltage gated, type VIII alpha subunit
  Uniprot ID: Q9UQD0
  ENST ID: ENST00000545061
  CDS Start-End: 179-5998
gagcgctccaagatggcgcccaccgcagtcccgcccgccgcatcctcggcgcctttgcagtccggccgcgcctcccgggccccgcgttagggccgccgctgcctccctcgccgccgccgctgccagctgacctgtcctggacgcagcataactaacgaagctgctgcaggatgagaagatggcagcgcggctgcttgcaccaccaggccctgatagtttcaagcctttcacccctgagtcactggcaaacattgagaggcgcattgctgagagcaagctcaagaaaccaccaaaggccgatggcagtcatcgggaggacgatgaggacagcaagcccaagccaaacagcgacctggaagcagggaagagtttgcctttcatctacggggacatcccccaaggcctggttgcagttcccctggaggactttgacccatactatttgacgcagaaaacctttgtagtattaaacagagggaaaactctcttcagatttagtgccacgcctgccttgtacattttaagtccttttaacctgataagaagaatagctattaaaattttgatacattcagtatttagcatgatcattatgtgcactattttgaccaactgtgtattcatgacttttagtaaccctcctgactggtcgaagaatgtggagtacacgttcacagggatttatacatttgaatcactagtgaaaatcattgcaagaggtttctgcatagatggctttacctttttacgggacccatggaactggttagatttcagtgtcatcatgatggcgtatataacagagtttgtaaacctaggcaatgtttcagctctacgcactttcagggtactgagggctttgaaaactatttcggtaatcccaggcctgaagacaattgtgggtgccctgattcagtctgtgaagaaactgtcagatgtgatgatcctgacagtgttctgcctgagtgtttttgccttgatcggactgcagctgttcatggggaaccttcgaaacaagtgtgttgtgtggcccataaacttcaacgagagctatcttgaaaatggcaccaaaggctttgattgggaagagtatatcaacaataaaacaaatttctacacagttcctggcatgctggaacctttactctgtgggaacagttctgatgctgggcaatgcccagagggataccagtgtatgaaagcaggaaggaaccccaactatggttacacaagttttgacacttttagctgggccttcttggcattatttcgccttatgacccaggactattgggaaaacttgtatcaattgactttacgagcagccgggaaaacatacatgatcttcttcgtcttggtcatctttgtgggttctttctatctggtgaacttgatcttggctgtggtggccatggcttatgaagaacagaatcaggcaacactggaggaggcagaacaaaaagaggctgaatttaaagcaatgttggagcaacttaagaagcaacaggaagaggcacaggctgctgcgatggccacttcagcaggaactgtctcagaagatgccatagaggaagaaggtgaagaaggagggggctcccctcggagctcttctgaaatctctaaactcagctcaaagagtgcaaaggaaagacgtaacaggagaaagaagaggaagcaaaaggaactctctgaaggagaggagaaaggggatcccgagaaggtgtttaagtcagagtcagaagatggcatgagaaggaaggcctttcggctgccagacaacagaatagggaggaaattttccatcatgaatcagtcactgctcagcatcccaggctcgcccttcctctcccgccacaacagcaagagcagcatcttcagtttcaggggacctgggcggttccgagacccgggctccgagaatgagttcgcggatgacgagcacagcacggtggaggagagcgagggccgccgggactccctcttcatccccatccgggcccgcgagcgccggagcagctacagcggctacagcggctacagccagggcagccgctcctcgcgcatcttccccagcctgcggcgcagcgtgaagcgcaacagcacggtggactgcaacggcgtggtgtccctcatcggcggccccggctcccacatcggcgggcgtctcctgccagaggctacaactgaggtggaaattaagaagaaaggccctggatctcttttagtttccatggaccaattagcctcctacgggcggaaggacagaatcaacagtataatgagtgttgttacaaatacactagtagaagaactggaagagtctcagagaaagtgcccgccatgctggtataaatttgccaacactttcctcatctgggagtgccacccctactggataaaactgaaagagattgtgaacttgatagttatggacccttttgtggatttagccatcaccatctgcatcgtcctgaatacactgtttatggcaatggagcaccatcctatgacaccacaatttgaacatgtcttggctgtaggaaatctggttttcactggaattttcacagcggaaatgttcctgaagctcatagccatggatccctactattatttccaagaaggttggaacatttttgacggatttattgtctccctcagtttaatggaactgagtctagcagacgtggaggggctttcagtgctgcgatctttccgattgctccgagtcttcaaattggccaaatcctggcccaccctgaacatgctaatcaagattattggaaattcagtgggtgccctgggcaacctgacactggtgctggccattattgtcttcatctttgccgtggtggggatgcaactctttggaaaaagctacaaagagtgtgtctgcaagatcaaccaggactgtgaactccctcgctggcatatgcatgactttttccattccttcctcattgtctttcgagtgttgtgcggggagtggattgagaccatgtgggactgcatggaagtggcaggccaggccatgtgcctcattgtctttatgatggtcatggtgattggcaacttggtggtgctgaacctgtttctggccttgctcctgagctccttcagtgcagacaacctggctgccacagatgacgatggggaaatgaacaacctccagatctcagtgatccgtatcaagaagggtgtggcctggaccaaactaaaggtgcacgccttcatgcaggcccactttaagcagcgtgaggctgatgaggtgaagcctctggatgagttgtatgaaaagaaggccaactgtatcgccaatcacaccggtgcagacatccaccggaatggtgacttccagaagaatggcaatggcacaaccagcggcattggcagcagcgtggagaagtacatcattgatgaggaccacatgtccttcatcaacaaccccaacttgactgtacgggtacccattgctgtgggcgagtctgactttgagaacctcaacacagaggatgttagcagcgagtcggatcctgaaggcagcaaagataaactagatgacaccagctcctctgaaggaagcaccattgatatcaaaccagaagtagaagaggtccctgtggaacagcctgaggaatacttggatccagatgcctgcttcacagaaggttgtgtccagcggttcaagtgctgccaggtcaacatcgaggaagggctaggcaagtcttggtggatcctgcggaaaacctgcttcctcatcgtggagcacaactggtttgagaccttcatcatcttcatgattctgctgagcagtggcgccctggccttcgaggacatctacattgagcagagaaagaccatccgcaccatcctggaatatgctgacaaagtcttcacctatatcttcatcctggagatgttgctcaagtggacagcctatggcttcgtcaagttcttcaccaatgcctggtgttggctggacttcctcattgtggctgtggtggtgaatgccttggtgggcgccatcccctccatcatgaatgtgctgctggtgtgtctcatcttctggctgattttcagcatcatgggagttaacttgtttgcgggaaagtaccactactgctttaatgagacttctgaaatccgatttgaaattgaagatgtcaacaataaaactgaatgtgaaaagcttatggaggggaacaatacagagatcagatggaagaacgtgaagatcaactttgacaatgttggggcaggatacctggcccttcttcaagtagcaaccttcaaaggctggatggacatcatgtatgcagctgtagattcccggaagcctgatgagcagcctaagtatgaggacaatatctacatgtacatctattttgtcatcttcatcatcttcggctccttcttcaccctgaacctgttcattggtgtcatcattgataacttcaatcaacaaaagaaaaagttcggaggtcaggacatcttcatgaccgaagaacagaagaagtactacaatgccatgaaaaagctgggctcaaagaagccacagaaacctattccccgccccttgaacaaaatccaaggaatcgtctttgattttgtcactcagcaagcctttgacattgttatcatgatgctcatctgccttaacatggtgacaatgatggtggagacagacactcaaagcaagcagatggagaacatcctctactggattaacctggtgtttgttatcttcttcacctgtgagtgtgtgctcaaaatgtttgcgttgaggcactactacttcaccattggctggaacatcttcgacttcgtggtagtcatcctctccattgtgggaatgttcctggcagatataattgagaaatactttgtttccccaaccctattccgagtcatccgattggcccgtattgggcgcatcttgcgtctgatcaaaggcgccaaagggattcgtaccctgctctttgccttaatgatgtccttgcctgccctgttcaacatcggccttctgctcttcctggtcatgttcatcttctccatttttgggatgtccaattttgcatatgtgaagcacgaggctggtatcgatgacatgttcaactttgagacatttggcaacagcatgatctgcctgtttcaaatcacaacctcagctggttgggatggcctgctgctgcccatcctaaaccgcccccctgactgcagcctagataaggaacacccagggagtggctttaagggagattgtgggaacccctcagtgggcatcttcttctttgtaagctacatcatcatctctttcctaattgtcgtgaacatgtacattgccatcatcctggagaacttcagtgtagccacagaggaaagtgcagaccctctgagtgaggatgactttgagaccttctatgagatctgggagaagttcgaccccgatgccacccagttcattgagtactgtaagctggcagactttgcagatgccttggagcatcctctccgagtgcccaagcccaataccattgagctcatcgctatggatctgccaatggtgagcggggatcgcatccactgcttggacatcctttttgccttcaccaagcgggtcctgggagatagcggggagttggacatcctgcggcagcagatggaagagcggttcgtggcatccaatccttccaaagtgtcttacgagccaatcacaaccacactgcgtcgcaagcaggaggaggtatctgcagtggtcctgcagcgtgcctaccggggacatttggcaaggcggggcttcatctgcaaaaagacaacttctaataagctggagaatggaggcacacaccgggagaaaaaagagagcaccccatctacagcctccctcccgtcctatgacagtgtaactaaacctgaaaaggagaaacagcagcgggcagaggaaggaagaagggaaagagccaaaagacaaaaagaggtcagagaatccaagtgttagaggagaacaaaaattcagtattatacagatctaaaactcgcaagtgaaagattgtttacaaacttcctgaatattatcaatgcagaacagctgtggagactctaacctgaagatctataccaaacgtcgtctgcttaccacgtaacacagctgcatcttgagcagtgacctgccaagggcaaaggaccccgctccctagacttacagattttctaatgcttgggcaggtggttactgcatgttccacatcagtcaatgcaacttaggacaaaactaaccagatacagaaacagaagagaggctgccgggaccagcatatttccgttgcagccaaatggattttattttttcattttattgattctcagaagcagaaagcatcactttaaaagttcgtttgttcatgcaaactatatttgcattcttacattagttaagctaagcagcaaaaagaaaacacacacacacactcacatttagcccatgtcatttaattgtcagtttctttgacataaagcgcatcttctccacatgggcttcacgtggtttggagatgggtgggggaaaacaatcaggtttcttcaggctgaggaggacttgctcaggccgattccaaacattgtgctcgttcaatgcgtagaaatgatttgcatgatggcatgccgtgatcagaagtcatgcatgagatccatacaccacaggacactactaatctagtcccttgcactgggtcagcctttggacaggacccagccctgcaccgttcactgtatttggagaaaatggtaagagttccataccggctacaattctttgagttcttaaaagtccttcatacaccttctgggtagggaaacaaccaactaattgactaacaccaccaacaacaaaaaacaaacccaatccaacaagcagatggatccgttgcgtgtatatgtttaacagacatctctaacatacagccattgttgcacattttgcaagatgaactatttaatgctgctctgtgtccagtacatgggggagactttgatcccaaatggcttgtactatttatgtcactgtaaaaccaaatcctagggctaaaaaaaaaattcatttgtatcttgcaatatttatgacgatcgtttagccttcatactggagaattgacacttatttggggtagagataaaagtgcttttcaaagtagcaccagttatctctaggggtaatttggggaacttaaaatgacctttcattgggagttatggggtgctcatttcatttcgtatcatgtcctctgcattgtggctttctccaggcatgggtcgataccgcgaggggttcagatattctgaactgacctctctcttctgcagaggggtcatcgcatactcacacactgcatggctccccctgcctccatcacatttctccactgagcagggcttcccttgcccacagaggtgggtgagggtagcagcattggggttacggctgtggtttctttcacttattattagaataatagtcactggtgagacctgaggtagagatggagccgcctctgaaccaagcccacttggtttctttactgcactggttttcatgagaaagcaatttaatattaattctttaggatgttccagcttccctcagtgcattcccttgcagccagttttgctatctgcttagcgacctgcccattgtcattgaagtgtggcttctgggggagcgtcatatcttccattccatctcctgctttaggaaagacagtttttagtccaggggtttctcacctaatgactggatttcaaagccaagatgctgcagttgaatgtgtcaggaagtctctatacaaagagtgaaaagagactttagcatgtgaaccaaatccaaataaattcttcctgaaccatacactagagggggaagaagaaccaacccataatcagacacaccgatctgccttgcagtagaagcactttgaaggtaatttcacagtccaccagactagttttgcatagaacaaaccacagtaagtcggcaagcagagctttctatcttgttggaccactagaaactgtccagctctcttaagcctgcttctgcagcagcatccgtagaatttttgtactacacccaataccagactgggaaggcctatctttcagtgaccctgctaactgctaggatgaatgtatagtaacatgtacaggctacattgtaaacagcacaaaacagaagctgacatgtgtggttattctttttaagagaattataaatactgtaatatataattttattttattggcatgcctttttgtaaatacaaattattaacttattaaataggaaatggcttctggcttatgccattgtcatgtttatttttattttttatacttttctttcttcttagaacttagatgctgtcagccaatgtacatccccaaaccagacagacagacaaaaaattttttattgctaatggtcttttccaaaacaacaaaaaatatatatttttgttccaatgtgcaataaattctaaccacgtctatgcaagatttggctaaacttaataattgttcttaggtcttgagatgggcaacagagctgtaagatcccgccaagtacaccatgtgctcatgctagtgatgtcattaagctactagggcatagtgatgagatttttctgagatctaaccgtttccctccgctagctcctgaccccagcccagcaggctgtctcctcagtaacacatgggccttggtatctggcacccatcagccagcctcataggaaagaagccacctccgctgtatttgaagtttcactttttaaaaaaaaaatgtttcccacctttttatccttcacccactgtccttccacctgctcactcactcactctctcacccatcctgctccacacttctttggtagtaaatgacaccatcaccagcagtttacacccgcagttaacaggcatcgaactgaaagaatcagtgatgacgtttttgtgcatcttcgctgagtgggtaagtggcaatgctttgccaaatattaacgaagccaatcaaagagcagcgcagccacagtatcactgcacatatatatatagatatataaatataatataaatatttattttttgtagccaggtccttggtgcagtatttatactccacaatccaccttttaaaaaaaggacaaaaagcaaaaagatgtgtgatgctgttaataatttaaaatgcagagccaaagccactgagcagcagctgacatggttgctggtttgtgtgtgaaaaacattttccccctcttctttccttaacctccttgttgcttaggatgaggagactctgtaatttaaagcagaggacgagaggaggaagaaacttccatgttaacatggcctactctcactcctttctaaacgagccacttttggcgtcagaagttgactggagagagataaacaaactcccagtcaaagcccctaaagcgacagtgcccagagttcttttattttttgctgcaaccaacgtaaacctgtaaaagaccaacagtgaagattagtgtattagtgaatgcatggaggccaatgctgccctaatgagacgtgataaaaagtccatcactcctctaagccaaaaggaaacaaaataaaaatgaccctttttactgtacaagggaagcctgtcttggtgtgtttgttgcttgactatcccaattcttgagtcctgggaggggtctgggaattgggaccttagcacatttggggaaaggaggggaatagagggaagagaaatcaaaggggctctcgcaaagttctggctaagaaggagagattggaagaaaagcaaggtcctgaccccccccagatccccactcacccattgcatgtggcattccccactactggccggtgcttagaggcccataaaacctctcttcacctaatccacctggcagagccctcagagatgacgtcagccaacccagctggactggccttacttctgcctttttcacctgtatgttaaaaaacaaaaacaaaaaaaccctatccctgtgccccaaagctagggcatgtgcgatgcccaacagcctccactctgcaagctcatactgggccctgccctccatcgccccagacaggcccacagacgagggctggtctccttcacatttgtgtgggggtgggggcacgcttcctcttccttctctccctgtccccctttggggacatccctctctaggcctaggccatgtctcctggttcaggaacactctctcaggaggatctcgaagtgcccactctagtccgctccagtagctccactctggagcgagatggctggtaggtcagtccccatcctcctcccctcggcccccagcctccaggcctgctgtggaggtgagatcgccatgggtcatgactttgtgacttgagtcctgggcatcttctgtaatgatgcctctttcttttctcagatgttgcccacagtttagcaaaaagcttcgttcattttcaggtactccccaccccctaaagaattggctgcaacttgccagccagggggacatcaggagagaagaggaagtctgggttgggaggggcccaagttttgcaacagagtttccattgttcagctctgtgctttcttggattccctttccaagattaccaagatttcctccattaaaactcctgaggcaccccctgcccctgccccccactgctgtttgctgtacatagaggctaagtggggtggggtgggtgggtgtgcacatgtggtgtgtgtgtgtgtgtgtgaagaatgtatataggtaaaggggagtgtggtccagtggttccagaaaagggacagaactgtgttctgtccctagcttgaccgctggctcgctgtgtggccttgggcaagtcacttaacctctctgtgcctcagtttccccatctgtaaaatggggataataatactgacctacctcacaggggtgttgtgaggctttaactaaatgttttgtaaagcgttttgagatacagaggcaaaggcgctagggaagggcaaagtattattggacttaaggaagctgaaatggtaccataaatgctgctattctgagagccattttaaactgcactgctccaaccacccccgcttctcatcaccaggacagcaggtcgagaaaatgtctttcctttcacttgcttctggggtttgtgattattcaagacaattttttccccttgctgtatctccttccctcacctcctcgacttgttccctgttctgtttatgcggaaatggcagaaatgcttgagaaatgagaatgtgtaagtggattggaagtttatagtatgaaatttcaattttactttgtactgtacatctttttactttagaatttgcaataaagggttacgtcaatcttgttttcaactctc

SEQ ID NO: 182709 - DNA, 1627 bp, Homo sapiens
  Payload ID: 16000
  Gene Symbol: SCN8A
  Gene Name: sodium channel, voltage gated, type VIII alpha subunit
  ENST ID: ENST00000551216
  CDS Start-End: 1-1627
tttagtaaccctcctgactggtcgaagaatgtggagtacacgttcacagggatttatacatttgaatcactagtgaaaatcattgcaagaggtttctgcatagatggctttacctttttacgggacccatggaactggttagatttcagtgtcatcatgatggcatatgtgacagagtttgtggacctgggcaatgtctcagcgctgagaacattcagggttctccgagctttgaaaactatctctgtaattccaggcctgaagacaattgtgggtgccctgattcagtctgtgaagaaactgtcagatgtgatgatcctgacagtgttctgcctgagtgtttttgccttgatcggactgcagctgttcatggggaaccttcgaaacaagtgtgttgtgtggcccataaacttcaacgagagctatcttgaaaatggcaccaaaggctttgattgggaagagtatatcaacaataaaacaaatttctacacagttcctggcatgctggaacctttactctgtgggaacagttctgatgctgggcaatgcccagagggataccagtgtatgaaagcaggaaggaaccccaactatggttacacaagttttgacacttttagctgggccttcttggcattatttcgccttatgacccaggactattgggaaaacttgtatcaattgactttacgagcagccgggaaaacatacatgatcttcttcgtcttggtcatctttgtgggttctttctatctggtgaacttgatcttggctgtggtggccatggcttatgaagaacagaatcaggcaacactggaggaggcagaacaaaaagaggctgaatttaaagcaatgttggagcaacttaagaagcaacaggaagaggcacaggctgctgcgatggccacttcagcaggaactgtctcagaagatgccatagaggaagaaggtgaagaaggagggggctcccctcggagctcttctgaaatctctaaactcagctcaaagagtgcaaaggaaagacgtaacaggagaaagaagaggaagcaaaaggaactctctgaaggagaggagaaaggggatcccgagaaggtgtttaagtcagagtcagaagatggcatgagaaggaaggcctttcggctgccagacaacagaatagggaggaaattttccatcatgaatcagtcactgctcagcatcccaggctcgcccttcctctcccgccacaacagcaagagcagcatcttcagtttcaggggacctgggcggttccgagacccgggctccgagaatgagttcgcggatgacgagcacagcacggtggaggagagcgagggccgccgggactccctcttcatccccatccgggcccgcgagcgccggagcagctacagcggctacagcggctacagccagggcagccgctcctcgcgcatcttccccagcctgcggcgcagcgtgaagcgcaacagcacggtggactgcaacggcgtggtgtccctcatcggcggccccggctcccacatcggcgggcgtctcctgccagaggtgaaaattgataaggcagctaccgatgacagtgctacaactgaggtggaaattaagaagaaaggccctggatctcttt

SEQ ID NO: 182710 - DNA, 5976 bp, Homo sapiens
  Payload ID: 16000
  Gene Symbol: SCN8A
  Gene Name: sodium channel, voltage gated, type VIII alpha subunit
  Uniprot ID: Q9UQD0
  ENST ID: ENST00000599343
  CDS Start-End: 1-5976
atggcagcgcggctgcttgcaccaccaggccctgatagtttcaagcctttcacccctgagtcactggcaaacattgagaggcgcattgctgagagcaagctcaagaaaccaccaaaggccgatggcagtcatcgggaggacgatgaggacagcaagcccaagccaaacagcgacctggaagcagggaagagtttgcctttcatctacggggacatcccccaaggcctggttgcagttcccctggaggactttgacccatactatttgacgcagaaaacctttgtagtattaaacagagggaaaactctcttcagatttagtgccacgcctgccttgtacattttaagtccttttaacctgataagaagaatagctattaaaattttgatacattcagtatttagcatgatcattatgtgcactattttgaccaactgtgtattcatgacttttagtaaccctcctgactggtcgaagaatgtggagtacacgttcacagggatttatacatttgaatcactagtgaaaatcattgcaagaggtttctgcatagatggctttacctttttacgggacccatggaactggttagatttcagtgtcatcatgatggcgtatataacagagtttgtaaacctaggcaatgtttcagctctacgcactttcagggtactgagggctttgaaaactatttcggtaatcccaggcctgaagacaattgtgggtgccctgattcagtctgtgaagaaactgtcagatgtgatgatcctgacagtgttctgcctgagtgtttttgccttgatcggactgcagctgttcatggggaaccttcgaaacaagtgtgttgtgtggcccataaacttcaacgagagctatcttgaaaatggcaccaaaggctttgattgggaagagtatatcaacaataaaacaaatttctacacagttcctggcatgctggaacctttactctgtgggaacagttctgatgctgggcaatgcccagagggataccagtgtatgaaagcaggaaggaaccccaactatggttacacaagttttgacacttttagctgggccttcttggcattatttcgccttatgacccaggactattgggaaaacttgtatcaattgactttacgagcagccgggaaaacatacatgatcttcttcgtcttggtcatctttgtgggttctttctatctggtgaacttgatcttggctgtggtggccatggcttatgaagaacagaatcaggcaacactggaggaggcagaacaaaaagaggctgaatttaaagcaatgttggagcaacttaagaagcaacaggaagaggcacaggctgctgcgatggccacttcagcaggaactgtctcagaagatgccatagaggaagaaggtgaagaaggagggggctcccctcggagctcttctgaaatctctaaactcagctcaaagagtgcaaaggaaagacgtaacaggagaaagaagaggaagcaaaaggaactctctgaaggagaggagaaaggggatcccgagaaggtgtttaagtcagagtcagaagatggcatgagaaggaaggcctttcggctgccagacaacagaatagggaggaaattttccatcatgaatcagtcactgctcagcatcccaggctcgcccttcctctcccgccacaacagcaagagcagcatcttcagtttcaggggacctgggcggttccgagacccgggctccgagaatgagttcgcggatgacgagcacagcacggtggaggagagcgagggccgccgggactccctcttcatccccatccgggcccgcgagcgccggagcagctacagcggctacagcggctacagccagggcagccgctcctcgcgcatcttccccagcctgcggcgcagcgtgaagcgcaacagcacggtggactgcaacggcgtggtgtccctcatcggcggccccggctcccacatcggcgggcgtctcctgccagaggtgaaaattgataaggcagctaccgatgacagtgctacaactgaggtggaaattaagaagaaaggccctggatctcttttagtttccatggaccaattagcctcctacgggcggaaggacagaatcaacagtataatgagtgttgttacaaatacactagtagaagaactggaagagtctcagagaaagtgcccgccatgctggtataaatttgccaacactttcctcatctgggagtgccacccctactggataaaactgaaagagattgtgaacttgatagttatggacccttttgtggatttagccatcaccatctgcatcgtcctgaatacactgtttatggcaatggagcaccatcctatgacaccacaatttgaacatgtcttggctgtaggaaatctggttttcactggaattttcacagcggaaatgttcctgaagctcatagccatggatccctactattatttccaagaaggttggaacatttttgacggatttattgtctccctcagtttaatggaactgagtctagcagacgtggaggggctttcagtgctgcgatctttccgattgctccgagtcttcaaattggccaaatcctggcccaccctgaacatgctaatcaagattattggaaattcagtgggtgccctgggcaacctgacactggtgctggccattattgtcttcatctttgccgtggtggggatgcaactctttggaaaaagctacaaagagtgtgtctgcaagatcaaccaggactgtgaactccctcgctggcatatgcatgactttttccattccttcctcattgtctttcgagtgttgtgcggggagtggattgagaccatgtgggactgcatggaagtggcaggccaggccatgtgcctcattgtctttatgatggtcatggtgattggcaacttggtggtgctgaacctgtttctggccttgctcctgagctccttcagtgcagacaacctggctgccacagatgacgatggggaaatgaacaacctccagatctcagtgatccgtatcaagaagggtgtggcctggaccaaactaaaggtgcacgccttcatgcaggcccactttaagcagcgtgaggctgatgaggtgaagcctctggatgagttgtatgaaaagaaggccaactgtatcgccaatcacaccggtgcagacatccaccggaatggtgacttccagaagaatggcaatggcacaaccagcggcattggcagcagcgtggagaagtacatcattgatgaggaccacatgtccttcatcaacaaccccaacttgactgtacgggtacccattgctgtgggcgagtctgactttgagaacctcaacacagaggatgttagcagcgagtcggatcctgaaggcagcaaagataaactagatgacaccagctcctctgaaggaagcaccattgatatcaaaccagaagtagaagaggtccctgtggaacagcctgaggaatacttggatccagatgcctgcttcacagaaggttgtgtccagcggttcaagtgctgccaggtcaacatcgaggaagggctaggcaagtcttggtggatcctgcggaaaacctgcttcctcatcgtggagcacaactggtttgagaccttcatcatcttcatgattctgctgagcagtggcgccctggccttcgaggacatctacattgagcagagaaagaccatccgcaccatcctggaatatgctgacaaagtcttcacctatatcttcatcctggagatgttgctcaagtggacagcctatggcttcgtcaagttcttcaccaatgcctggtgttggctggacttcctcattgtggctgtctctttagtcagccttatagctaatgccctgggctactcggaactaggtgccataaagtcccttaggaccctaagagctttgagacccttaagagccttatcacgatttgaagggatgagggtggtggtgaatgccttggtgggcgccatcccctccatcatgaatgtgctgctggtgtgtctcatcttctggctgattttcagcatcatgggagttaacttgtttgcgggaaagtaccactactgctttaatgagacttctgaaatccgatttgaaattgaagatgtcaacaataaaactgaatgtgaaaagcttatggaggggaacaatacagagatcagatggaagaacgtgaagatcaactttgacaatgttggggcaggatacctggcccttcttcaagtagcaaccttcaaaggctggatggacatcatgtatgcagctgtagattcccggaagcctgatgagcagcctaagtatgaggacaatatctacatgtacatctattttgtcatcttcatcatcttcggctccttcttcaccctgaacctgttcattggtgtcatcattgataacttcaatcaacaaaagaaaaagttcggaggtcaggacatcttcatgaccgaagaacagaagaagtactacaatgccatgaaaaagctgggctcaaagaagccacagaaacctattccccgccccttgaacaaaatccaaggaatcgtctttgattttgtcactcagcaagcctttgacattgttatcatgatgctcatctgccttaacatggtgacaatgatggtggagacagacactcaaagcaagcagatggagaacatcctctactggattaacctggtgtttgttatcttcttcacctgtgagtgtgtgctcaaaatgtttgcgttgaggcactactacttcaccattggctggaacatcttcgacttcgtggtagtcatcctctccattgtgggaatgttcctggcagatataattgagaaatactttgtttccccaaccctattccgagtcatccgattggcccgtattgggcgcatcttgcgtctgatcaaaggcgccaaagggattcgtaccctgctctttgccttaatgatgtccttgcctgccctgttcaacatcggccttctgctcttcctggtcatgttcatcttctccatttttgggatgtccaattttgcatatgtgaagcacgaggctggtatcgatgacatgttcaactttgagacatttggcaacagcatgatctgcctgtttcaaatcacaacctcagctggttgggatggcctgctgctgcccatcctaaaccgcccccctgactgcagcctagataaggaacacccagggagtggctttaagggagattgtgggaacccctcagtgggcatcttcttctttgtaagctacatcatcatctctttcctaattgtcgtgaacatgtacattgccatcatcctggagaacttcagtgtagccacagaggaaagtgcagaccctctgagtgaggatgactttgagaccttctatgagatctgggagaagttcgaccccgatgccacccagttcattgagtactgtaagctggcagactttgcagatgccttggagcatcctctccgagtgcccaagcccaataccattgagctcatcgctatggatctgccaatggtgagcggggatcgcatccactgcttggacatcctttttgccttcaccaagcgggtcctgggagatagcggggagttggacatcctgcggcagcagatggaagagcggttcgtggcatccaatccttccaaagtgtcttacgagccaatcacaaccacactgcgtcgcaagcaggaggaggtatctgcagtggtcctgcagcgtgcctaccggggacatttggcaaggcggggcttcatctgcaaaaagacaacttctaataagctggagaatggaggcacacaccgggagaaaaaagagagcaccccatctacagcctccctcccgtcctatgacagtgtaactaaacctgaaaaggagaaacagcagcgggcagaggaaggaagaagggaaagagccaaaagacaaaaagaggtcagagaatccaagtgttag

SEQ ID NO: 182711 - DNA, 465 bp, Homo sapiens
  Payload ID: 16000
  Gene Symbol: SCN8A
  Gene Name: sodium channel, voltage gated, type VIII alpha subunit
  ENST ID: ENST00000546961
  CDS Start-End: 159-161
acagacgagaacactgaggtttggagaggttgttacaccctttttccctcttgtgattggtggtaggaaaatattaagtagaggagagacacagtaaagtgccaagagctctggcactcattacctagatcctcgcgagggtggagtgagcggtcgaaatgctcatgcctactttacagatggacagactgaggatcggaaagactgaggtggcctgggggctgtcagggaggcagcgcctccccgctcctggcagcaggtccctgtgggctgaaacacgagcctccacctgccgctgattgacttctcgttttttcagtgggcccaagatcctgtaaattgagttccctgcgcttttggatgtcagaaacttcactgagcgcggcactgttggggggcaggagaaagagctgacctgtcctggacgcagcataactaacgaagctgctgcaggatgagaagatg

SEQ ID NO: 182712 - DNA, 5943 bp, Homo sapiens
  Payload ID: 16000
  Gene Symbol: SCN8A
  Gene Name: sodium channel, voltage gated, type VIII alpha subunit
  Uniprot ID: Q9UQD0
  ENST ID: ENST00000627620
  CDS Start-End: 1-5943
atggcagcgcggctgcttgcaccaccaggccctgatagtttcaagcctttcacccctgagtcactggcaaacattgagaggcgcattgctgagagcaagctcaagaaaccaccaaaggccgatggcagtcatcgggaggacgatgaggacagcaagcccaagccaaacagcgacctggaagcagggaagagtttgcctttcatctacggggacatcccccaaggcctggttgcagttcccctggaggactttgacccatactatttgacgcagaaaacctttgtagtattaaacagagggaaaactctcttcagatttagtgccacgcctgccttgtacattttaagtccttttaacctgataagaagaatagctattaaaattttgatacattcagtatttagcatgatcattatgtgcactattttgaccaactgtgtattcatgacttttagtaaccctcctgactggtcgaagaatgtggagtacacgttcacagggatttatacatttgaatcactagtgaaaatcattgcaagaggtttctgcatagatggctttacctttttacgggacccatggaactggttagatttcagtgtcatcatgatggcatatgtgacagagtttgtggacctgggcaatgtctcagcgctgagaacattcagggttctccgagctttgaaaactatctctgtaattccaggcctgaagacaattgtgggtgccctgattcagtctgtgaagaaactgtcagatgtgatgatcctgacagtgttctgcctgagtgtttttgccttgatcggactgcagctgttcatggggaaccttcgaaacaagtgtgttgtgtggcccataaacttcaacgagagctatcttgaaaatggcaccaaaggctttgattgggaagagtatatcaacaataaaacaaatttctacacagttcctggcatgctggaacctttactctgtgggaacagttctgatgctgggcaatgcccagagggataccagtgtatgaaagcaggaaggaaccccaactatggttacacaagttttgacacttttagctgggccttcttggcattatttcgccttatgacccaggactattgggaaaacttgtatcaattgactttacgagcagccgggaaaacatacatgatcttcttcgtcttggtcatctttgtgggttctttctatctggtgaacttgatcttggctgtggtggccatggcttatgaagaacagaatcaggcaacactggaggaggcagaacaaaaagaggctgaatttaaagcaatgttggagcaacttaagaagcaacaggaagaggcacaggctgctgcgatggccacttcagcaggaactgtctcagaagatgccatagaggaagaaggtgaagaaggagggggctcccctcggagctcttctgaaatctctaaactcagctcaaagagtgcaaaggaaagacgtaacaggagaaagaagaggaagcaaaaggaactctctgaaggagaggagaaaggggatcccgagaaggtgtttaagtcagagtcagaagatggcatgagaaggaaggcctttcggctgccagacaacagaatagggaggaaattttccatcatgaatcagtcactgctcagcatcccaggctcgcccttcctctcccgccacaacagcaagagcagcatcttcagtttcaggggacctgggcggttccgagacccgggctccgagaatgagttcgcggatgacgagcacagcacggtggaggagagcgagggccgccgggactccctcttcatccccatccgggcccgcgagcgccggagcagctacagcggctacagcggctacagccagggcagccgctcctcgcgcatcttccccagcctgcggcgcagcgtgaagcgcaacagcacggtggactgcaacggcgtggtgtccctcatcggcggccccggctcccacatcggcgggcgtctcctgccagaggctacaactgaggtggaaattaagaagaaaggccctggatctcttttagtttccatggaccaattagcctcctacgggcggaaggacagaatcaacagtataatgagtgttgttacaaatacactagtagaagaactggaagagtctcagagaaagtgcccgccatgctggtataaatttgccaacactttcctcatctgggagtgccacccctactggataaaactgaaagagattgtgaacttgatagttatggacccttttgtggatttagccatcaccatctgcatcgtcctgaatacactgtttatggcaatggagcaccatcctatgacaccacaatttgaacatgtcttggctgtaggaaatctggttttcactggaattttcacagcggaaatgttcctgaagctcatagccatggatccctactattatttccaagaaggttggaacatttttgacggatttattgtctccctcagtttaatggaactgagtctagcagacgtggaggggctttcagtgctgcgatctttccgattgctccgagtcttcaaattggccaaatcctggcccaccctgaacatgctaatcaagattattggaaattcagtgggtgccctgggcaacctgacactggtgctggccattattgtcttcatctttgccgtggtggggatgcaactctttggaaaaagctacaaagagtgtgtctgcaagatcaaccaggactgtgaactccctcgctggcatatgcatgactttttccattccttcctcattgtctttcgagtgttgtgcggggagtggattgagaccatgtgggactgcatggaagtggcaggccaggccatgtgcctcattgtctttatgatggtcatggtgattggcaacttggtggtgctgaacctgtttctggccttgctcctgagctccttcagtgcagacaacctggctgccacagatgacgatggggaaatgaacaacctccagatctcagtgatccgtatcaagaagggtgtggcctggaccaaactaaaggtgcacgccttcatgcaggcccactttaagcagcgtgaggctgatgaggtgaagcctctggatgagttgtatgaaaagaaggccaactgtatcgccaatcacaccggtgcagacatccaccggaatggtgacttccagaagaatggcaatggcacaaccagcggcattggcagcagcgtggagaagtacatcattgatgaggaccacatgtccttcatcaacaaccccaacttgactgtacgggtacccattgctgtgggcgagtctgactttgagaacctcaacacagaggatgttagcagcgagtcggatcctgaaggcagcaaagataaactagatgacaccagctcctctgaaggaagcaccattgatatcaaaccagaagtagaagaggtccctgtggaacagcctgaggaatacttggatccagatgcctgcttcacagaaggttgtgtccagcggttcaagtgctgccaggtcaacatcgaggaagggctaggcaagtcttggtggatcctgcggaaaacctgcttcctcatcgtggagcacaactggtttgagaccttcatcatcttcatgattctgctgagcagtggcgccctggccttcgaggacatctacattgagcagagaaagaccatccgcaccatcctggaatatgctgacaaagtcttcacctatatcttcatcctggagatgttgctcaagtggacagcctatggcttcgtcaagttcttcaccaatgcctggtgttggctggacttcctcattgtggctgtctctttagtcagccttatagctaatgccctgggctactcggaactaggtgccataaagtcccttaggaccctaagagctttgagacccttaagagccttatcacgatttgaagggatgagggtggtggtgaatgccttggtgggcgccatcccctccatcatgaatgtgctgctggtgtgtctcatcttctggctgattttcagcatcatgggagttaacttgtttgcgggaaagtaccactactgctttaatgagacttctgaaatccgatttgaaattgaagatgtcaacaataaaactgaatgtgaaaagcttatggaggggaacaatacagagatcagatggaagaacgtgaagatcaactttgacaatgttggggcaggatacctggcccttcttcaagtagcaaccttcaaaggctggatggacatcatgtatgcagctgtagattcccggaagcctgatgagcagcctaagtatgaggacaatatctacatgtacatctattttgtcatcttcatcatcttcggctccttcttcaccctgaacctgttcattggtgtcatcattgataacttcaatcaacaaaagaaaaagttcggaggtcaggacatcttcatgaccgaagaacagaagaagtactacaatgccatgaaaaagctgggctcaaagaagccacagaaacctattccccgccccttgaacaaaatccaaggaatcgtctttgattttgtcactcagcaagcctttgacattgttatcatgatgctcatctgccttaacatggtgacaatgatggtggagacagacactcaaagcaagcagatggagaacatcctctactggattaacctggtgtttgttatcttcttcacctgtgagtgtgtgctcaaaatgtttgcgttgaggcactactacttcaccattggctggaacatcttcgacttcgtggtagtcatcctctccattgtgggaatgttcctggcagatataattgagaaatactttgtttccccaaccctattccgagtcatccgattggcccgtattgggcgcatcttgcgtctgatcaaaggcgccaaagggattcgtaccctgctctttgccttaatgatgtccttgcctgccctgttcaacatcggccttctgctcttcctggtcatgttcatcttctccatttttgggatgtccaattttgcatatgtgaagcacgaggctggtatcgatgacatgttcaactttgagacatttggcaacagcatgatctgcctgtttcaaatcacaacctcagctggttgggatggcctgctgctgcccatcctaaaccgcccccctgactgcagcctagataaggaacacccagggagtggctttaagggagattgtgggaacccctcagtgggcatcttcttctttgtaagctacatcatcatctctttcctaattgtcgtgaacatgtacattgccatcatcctggagaacttcagtgtagccacagaggaaagtgcagaccctctgagtgaggatgactttgagaccttctatgagatctgggagaagttcgaccccgatgccacccagttcattgagtactgtaagctggcagactttgcagatgccttggagcatcctctccgagtgcccaagcccaataccattgagctcatcgctatggatctgccaatggtgagcggggatcgcatccactgcttggacatcctttttgccttcaccaagcgggtcctgggagatagcggggagttggacatcctgcggcagcagatggaagagcggttcgtggcatccaatccttccaaagtgtcttacgagccaatcacaaccacactgcgtcgcaagcaggaggaggtatctgcagtggtcctgcagcgtgcctaccggggacatttggcaaggcggggcttcatctgcaaaaagacaacttctaataagctggagaatggaggcacacaccgggagaaaaaagagagcaccccatctacagcctccctcccgtcctatgacagtgtaactaaacctgaaaaggagaaacagcagcgggcagaggaaggaagaagggaaagagccaaaagacaaaaagaggtcagagaatccaagtgttag

SEQ ID NO: 182713 - DNA, 6418 bp, Homo sapiens
  Payload ID: 16001
  Gene Symbol: SCN10A
  Gene Name: sodium channel, voltage gated, type X alpha subunit
  Uniprot ID: Q9Y5Y9
  ENST ID: ENST00000449082
  CDS Start-End: 1-5871
atggaattccccattggatccctcgaaactaacaacttccgtcgctttactccggagtcactggtggagatagagaagcaaattgctgccaagcagggaacaaagaaagccagagagaagcatagggagcagaaggaccaagaagagaagcctcggccccagctggacttgaaagcctgcaaccagctgcccaagttctatggtgagctcccagcagaactgatcggggagcccctggaggatctagatccgttctacagcacacaccggacatttatggtgctgaacaaagggaggaccatttcccggtttagtgccactcgggccctgtggctattcagtcctttcaacctgatcagaagaacggccatcaaagtgtctgtccactcgtggttcagtttatttattacggtcactattttggttaattgtgtgtgcatgacccgaactgaccttccagagaaaattgaatatgtcttcactgtcatttacacctttgaagccttgataaagatactggcaagaggattttgtctaaatgagttcacgtacctgagagatccttggaactggctggattttagcgtcattaccctggcatatgttggcacagcaatagatctccgtgggatctcaggcctgcggacattcagagttcttagagcattaaaaacagtttctgtgatcccaggcctgaaggtcattgtgggggccctgattcactcagtgaagaaactggctgatgtgaccatcctcaccatcttctgcctaagtgtttttgccttggtggggctgcaactcttcaagggcaacctcaaaaataaatgtgtcaagaatgacatggctgtcaatgagacaaccaactactcatctcacagaaaaccagatatctacataaataagcgaggcacttctgaccccttactgtgtggcaatggatctgactcaggccactgccctgatggttatatctgccttaaaacttctgacaacccggattttaactacaccagctttgattcctttgcttgggctttcctctcactgttccgcctcatgacacaggattcctgggaacgcctctaccagcagaccctgaggacttctgggaaaatctatatgatcttttttgtgctcgtaatcttcctgggatctttctacctggtcaacttgatcttggctgtagtcaccatggcgtatgaggagcagaaccaggcaaccactgatgaaattgaagcaaaggagaagaagttccaggaggccctcgagatgctccggaaggagcaggaggtgctagcagcactagggattgacacaacctctctccactcccacaatggatcacctttaacctccaaaaatgccagtgagagaaggcatagaataaagccaagagtgtcagagggctccacagaagacaacaaatcaccccgctctgatccttacaaccagcgcaggatgtcttttctaggcctcgcctctggaaaacgccgggctagtcatggcagtgtgttccatttccggtcccctggccgagatatctcactccctgagggagtcacagatgatggagtctttcctggagaccacgaaagccatcggggctctctgctgctgggtgggggtgctggccagcaaggccccctccctagaagccctcttcctcaacccagcaaccctgactccaggcatggagaagatgaacaccaaccgccgcccactagtgagcttgcccctggagctgtcgatgtctcggcattcgatgcaggacaaaagaagactttcttgtcagcagaatacttagatgaacctttccgggcccaaagggcaatgagtgttgtcagtatcataacctccgtccttgaggaactcgaggagtctgaacagaagtgcccaccctgcttgaccagcttgtctcagaagtatctgatctgggattgctgccccatgtgggtgaagctcaagacaattctctttgggcttgtgacggatccctttgcagagctcaccatcaccttgtgcatcgtggtgaacaccatcttcatggccatggagcaccatggcatgagccctaccttcgaagccatgctccagataggcaacatcgtctttaccatattttttactgctgaaatggtcttcaaaatcattgccttcgacccatactattatttccagaagaagtggaatatctttgactgcatcatcgtcactgtgagtctgctagagctgggcgtggccaagaagggaagcctgtctgtgctgcggagcttccgcttgctgcgcgtattcaagctggccaaatcctggcccaccttaaacacactcatcaagatcatcggaaactcagtgggggcactggggaacctcaccatcatcctggccatcattgtctttgtctttgctctggttggcaagcagctcctaggggaaaactaccgtaacaaccgaaaaaatatctccgcgccccatgaagactggccccgctggcacatgcacgacttcttccactctttcctcattgtcttccgtatcctctgtggagagtggattgagaacatgtgggcctgcatggaagttggccaaaaatccatatgcctcatccttttcttgacggtgatggtgctagggaacctggtggtgcttaacctgttcatcgccctgctattgaactctttcagtgctgacaacctcacagccccggaggacgatggggaggtgaacaacctgcaggtggccctggcacggatccaggtctttggccatcgtaccaaacaggctctttgcagcttcttcagcaggtcctgcccattcccccagcccaaggcagagcctgagctggtggtgaaactcccactctccagctccaaggctgagaaccacattgctgccaacactgccagggggagctctggagggctccaagctcccagaggccccagggatgagcacagtgacttcatcgctaatccgactgtgtgggtctctgtgcccattgctgagggtgaatctgatcttgatgacttggaggatgatggtggggaagatgctcagagcttccagcaggaagtgatccccaaaggacagcaggagcagctgcagcaagtcgagaggtgtggggaccacctgacacccaggagcccaggcactggaacatcttctgaggacctggctccatccctgggtgagacgtggaaagatgagtctgttcctcaggtccctgctgagggagtggacgacacaagctcctctgagggcagcacggtggactgcctagatcctgaggaaatcctgaggaagatccctgagctggcagatgacctggaagaaccagatgactgcttcacagaaggatgcattcgccactgtccctgctgcaaactggataccaccaagagtccatgggatgtgggctggcaggtgcgcaagacttgctaccgtatcgtggagcacagctggtttgagagcttcatcatcttcatgatcctgctcagcagtggatctctggcctttgaagactattacctggaccagaagcccacggtgaaagctttgctggagtacactgacagggtcttcacctttatctttgtgttcgagatgctgcttaagtgggtggcctatggcttcaaaaagtacttcaccaatgcctggtgctggctggacttcctcattgtgaatatctcactgataagtctcacagcgaagattctggaatattctgaagtggctcccatcaaagcccttcgaacccttcgcgctctgcggccactgcgggctctttctcgatttgaaggcatgcgggtggtggtggatgccctggtgggcgccatcccatccatcatgaatgtcctcctcgtctgcctcatcttctggctcatcttcagcatcatgggtgtgaacctcttcgcagggaagttttggaggtgcatcaactataccgatggagagttttcccttgtacctttgtcgattgtgaataacaagtctgactgcaagattcaaaactccactggcagcttcttctgggtcaatgtgaaagtcaactttgataatgttgcaatgggttaccttgcacttctgcaggtggcaacctttaaaggctggatggacattatgtatgcagctgttgattcccgggaggtcaacatgcaacccaagtgggaggacaacgtgtacatgtatttgtactttgtcatcttcatcatttttggaggcttcttcacactgaatctctttgttggggtcataattgacaacttcaatcaacagaaaaaaaagttagggggccaggacatcttcatgacagaggagcagaagaaatactacaatgccatgaagaagttgggctccaagaagccccagaagcccatcccacggcccctgaacaagttccagggttttgtctttgacatcgtgaccagacaagcttttgacatcaccatcatggtcctcatctgcctcaacatgatcaccatgatggtggagactgatgaccaaagtgaagaaaagacgaaaattctgggcaaaatcaaccagttctttgtggccgtcttcacaggcgaatgtgtcatgaagatgttcgctttgaggcagtactacttcacaaatggctggaatgtgtttgacttcattgtggtggttctctccattgcgagcctgattttttctgcaattcttaagtcacttcaaagttacttctccccaacgctcttcagagtcatccgcctggcccgaattggccgcatcctcagactgatccgagcggccaaggggatccgcacactgctctttgccctcatgatgtccctgcctgccctcttcaacatcgggctgttgctattccttgtcatgttcatctactctatcttcggtatgtccagctttccccatgtgaggtgggaggctggcatcgacgacatgttcaacttccagaccttcgccaacagcatgctgtgcctcttccagattaccacgtcggccggctgggatggcctcctcagccccatcctcaacacagggcccccctactgtgaccccaatctgcccaacagcaatggcaccagaggggactgtgggagcccagccgtaggcatcatcttcttcaccacctacatcatcatctccttcctcatcatggtcaacatgtacattgcagtgattctggagaacttcaatgtggccacggaggagagcactgagcccctgagtgaggacgactttgacatgttctatgagacctgggagaagtttgacccagaggccactcagtttattaccttttctgctctctcggactttgcagacactctctctggtcccctgagaatcccaaaacccaatcgaaatatactgatccagatggacctgcctttggtccctggagataagatccactgcttggacatcctttttgctttcaccaagaatgtcctaggagaatccggggagttggattctctgaaggcaaatatggaggagaagtttatggcaactaatctttcaaaatcatcctatgaaccaatagcaaccactctccgatggaagcaagaagacatttcagccactgtcattcaaaaggcctatcggagctatgtgctgcaccgctccatggcactctctaacaccccatgtgtgcccagagctgaggaggaggctgcatcactcccagatgaaggttttgttgcattcacagcaaatgaaaattgtgtactcccagacaaatctgaaactgcttctgccacatcattcccaccgtcctatgagagtgtcactagaggccttagtgatagagtcaacatgaggacatctagctcaatacaaaatgaagatgaagccaccagtatggagctgattgcccctgggccctagtgagaacactccagcctggatatgttcagttatgatgcgtccttctgctctgtgttaactctttcccattgcagatcacacccagctacagcctcaccaatgcatgccactggtcacaatgtcagaactgggcagggaatgcaactggtaaccacctttgaaaaaaccatcatacacaaataggagtcagaagctaagagcacttccactgtgatttcccttctgaatttcaatatcagatcatgggttctcttactctccagaaaatatcccttgtccttttatttttgttgtaatcagattatatttactgagacaaacttctcaggaccagaacttccaaagatatagaacaagaacattactgaaggtccaaggtagtcctctgtggagcaccatacagagattggcaatattatttaggattttgcatgactgcatgtgagagctgtcggacaactgctctgacccagggtaacacctgtggcctatgtcatgaaaagcctttgagatatccattaaaattaatatttttaaatgtatgtcc

SEQ ID NO: 182714 - DNA, 6500 bp, Homo sapiens
  Payload ID: 16002
  Gene Symbol: SCN11A
  Gene Name: sodium channel, voltage gated, type XI alpha subunit
  Uniprot ID: Q9UI33
  ENST ID: ENST00000302328
  CDS Start-End: 200-5575
tcctgctatacccacagtggtggtcatctcttctgatcttcacagccaatcagctcccaaggcccctgacctcagctcagcttttgtagatccttatgacaccatcctttaagactggaatcctagggcaggctgttttattcccgcctcctgaggcctttctgaggatctgtggcttgtctctgtcctgagggtgaagatggatgacagatgctacccagtaatctttccagatgagcggaatttccgccccttcacttccgactctctggctgcaattgagaagcggattgccatccaaaaggagaaaaagaagtctaaagaccagacaggagaagtaccccagcctcggcctcagcttgacctaaaggcctccaggaagttgcccaagctctatggcgacattcctcgtgagctcataggaaagcctctggaagacttggacccattctaccgaaatcataagacatttatggtgttaaacagaaagaggacaatctaccgcttcagtgccaagcatgccttgttcatttttgggcctttcaattcaatcagaagtttagccattagagtctcagtccattcattgttcagcatgttcattatcggcaccgttatcatcaactgcgtgttcatggctacagggcctgctaaaaacagcaacagtaacaatactgacattgcagagtgtgtcttcactgggatttatatttttgaagctttgattaaaatattggcaagaggtttcattctggatgagttttctttccttcgagatccatggaactggctggactccattgtcattggaatagcgattgtgtcatatattccaggaatcaccatcaaactattgcccctgcgtaccttccgtgtgttcagagctttgaaagcaatttcagtagtttcacgtctgaaggtcatcgtgggggccttgctacgctctgtgaagaagctggtcaacgtgattatcctcaccttcttttgcctcagcatctttgccctggtaggtcagcagctcttcatgggaagtctgaacctgaaatgcatctcgagggactgtaaaaatatcagtaacccggaagcttatgaccattgctttgaaaagaaagaaaattcacctgaattcaaaatgtgtggcatctggatgggtaacagtgcctgttccatacaatatgaatgtaagcacaccaaaattaatcctgactataattatacgaattttgacaactttggctggtcttttcttgccatgttccggctgatgacccaagattcctgggagaagctttatcaacagaccctgcgtactactgggctctactcagtcttcttcttcattgtggtcattttcctgggctccttctacctgattaacttaaccctggctgttgttaccatggcatatgaggagcagaacaagaatgtagctgcagagatagaggccaaggaaaagatgtttcaggaagcccagcagctgttaaaggaggaaaaggaggctctggttgccatgggaattgacagaagttcacttacttcccttgaaacatcatattttaccccaaaaaagagaaagctctttggtaataagaaaaggaagtccttctttttgagagagtctgggaaagaccagcctcctgggtcagattctgatgaagattgccaaaaaaagccacagctcctagagcaaaccaaacgactgtcccagaatctatcactggaccactttgatgagcatggagatcctctccaaaggcagagagcactgagtgctgtcagcatcctcaccatcaccatgaaggaacaagaaaaatcacaagagccttgtctcccttgtggagaaaacctggcatccaagtacctcgtgtggaactgttgcccccagtggctgtgcgttaagaaggtcctgagaactgtgatgactgacccgtttactgagctggccatcaccatctgcatcatcatcaacactgtcttcttggccatggagcatcacaagatggaggccagttttgagaagatgttgaatatagggaatttggttttcactagcatttttatagcagaaatgtgcctaaaaatcattgcgctcgatccctaccactactttcgccgaggctggaacatttttgacagcattgttgctcttctgagttttgcagatgtaatgaactgtgtacttcaaaagagaagctggccattcttgcgttccttcagagtgctcagggtcttcaagttagccaaatcctggccaactttgaacacactaattaagataatcggcaactctgtcggagcccttggaagcctgactgtggtcctggtcattgtgatctttattttctcagtagttggcatgcagctttttggccgtagcttcaattcccaaaagagtccaaaactctgtaacccgacaggcccgacagtctcatgtttacggcactggcacatgggggatttctggcactccttcctagtggtattccgcatcctctgcggggaatggatcgaaaatatgtgggaatgtatgcaagaagcgaatgcatcatcatcattgtgtgttattgtcttcatattgatcacggtgataggaaaacttgtggtgctcaacctcttcattgccttactgctcaattcctttagcaatgaggaaagaaatggaaacttagaaggagaggccaggaaaactaaagtccagttagcactggatcgattccgccgggctttttgttttgtgagacacactcttgagcatttctgtcacaagtggtgcaggaagcaaaacttaccacagcaaaaagaggtggcaggaggctgtgctgcacaaagcaaagacatcattcccctggtcatggagatgaaaaggggctcagagacccaggaggagcttggtatactaacctctgtaccaaagaccctgggcgtcaggcatgattggacttggttggcaccacttgcggaggaggaagatgacgttgaattttctggtgaagataatgcacagcgcatcacacaacctgagcctgaacaacaggcctatgagctccatcaggagaacaagaagcccacgagccagagagttcaaagtgtggaaattgacatgttctctgaagatgagcctcatctgaccatacaggatccccgaaagaagtctgatgttaccagtatactatcagaatgtagcaccattgatcttcaggatggctttggatggttacctgagatggttcccaaaaagcaaccagagagatgtttgcccaaaggctttggttgctgctttccatgctgtagcgtggacaagagaaagcctccctgggtcatttggtggaacctgcggaaaacctgctaccaaatagtgaaacacagctggtttgagagctttattatctttgtgattctgctgagcagtggggcactgatatttgaagatgttcaccttgagaaccaacccaaaatccaagaattactaaattgtactgacattatttttacacatatttttatcctggagatggtactaaaatgggtagccttcggatttggaaagtatttcaccagtgcctggtgctgccttgatttcatcattgtgattgtctctgtgaccaccctcattaacttaatggaattgaagtccttccggactctacgagcactgaggcctcttcgtgcgctgtcccagtttgaaggaatgaaggtggtggtcaatgctctcataggtgccatacctgccattctgaatgttttgcttgtctgcctcattttctggctcgtattttgtattctgggagtatacttcttttctggaaaatttgggaaatgcattaatggaacagactcagttataaattataccatcattacaaataaaagtcaatgtgaaagtggcaatttctcttggatcaaccagaaagtcaactttgacaatgtgggaaatgcttacctcgctctgctgcaagtggcaacatttaagggctggatggatattatatatgcagctgttgattccacagagaaagaacaacagccagagtttgagagcaattcactcggttacatttacttcgtagtctttatcatctttggctcattcttcactctgaatctcttcattggcgttatcattgacaacttcaaccaacagcagaaaaagttaggtggccaagacatttttatgacagaagaacagaagaaatactataatgcaatgaaaaaattaggatccaaaaaacctcaaaaacccattccacggcctctgaacaaatgtcaaggtctcgtgttcgacatagtcacaagccagatctttgacatcatcatcataagtctcattatcctaaacatgattagcatgatggctgaatcatacaaccaacccaaagccatgaaatccatccttgaccatctcaactgggtctttgtggtcatctttacgttagaatgtctcatcaaaatctttgctttgaggcaatactacttcaccaatggctggaatttatttgactgtgtggtcgtgcttctttccattgttagtacaatgatttctaccttggaaaatcaggagcacattcctttccctccgacgctcttcagaattgtccgcttggctcggattggccgaatcctgaggcttgtccgggctgcacgaggaatcaggactctcctctttgctctgatgatgtcgcttccttctctgttcaacattggtcttctactctttctgattatgtttatctatgccattctgggtatgaactggttttccaaagtgaatccagagtctggaatcgatgacatattcaacttcaagacttttgccagcagcatgctctgtctcttccagataagcacatcagcaggttgggattccctgctcagccccatgctgcgatcaaaagaatcatgtaactcttcctcagaaaactgccacctccctggcatagccacatcctactttgtcagttacattatcatctcctttctcattgttgtcaacatgtacattgctgtgattttagagaacttcaatacagccactgaagaaagtgaggaccctttgggtgaagatgactttgacatattttatgaagtgtgggaaaagtttgacccagaagcaacacaatttatcaaatattctgccctttctgactttgctgatgccttgcctgagcctttgcgtgtcgcaaagccaaataaatatcaatttctagtaatggacttgcccatggtgagtgaagatcgcctccactgcatggatattcttttcgccttcaccgctagggtactcggtggctctgatggcctagatagtatgaaagcaatgatggaagagaagttcatggaagccaatcctctcaagaagttgtatgaacccatagtcaccaccaccaagagaaaggaagaggaaagaggtgctgctattattcaaaaggcctttcgaaagtacatgatgaaggtgaccaagggtgaccaaggtgaccaaaatgacttggaaaacgggcctcattcaccactccagactctttgcaatggagacttgtctagctttggggtggccaagggcaaggtccactgtgactgagccctcacctccacgcctacctcatagcttcacagccttgccttcagcctctgagctccaggggtcagcagcttagtgtatcaacagggagtggattcaccaaattagccattccattttcttttctggctaaaataaatgatatttcaatttcattttaaataatacttacagagatataagataaggctacttgacaaccagtggtactattataataaggaagaagacaccaggaaggactgtaaaaggacataccaattttaggattgaaatagttcaggccgggcgcagtggctcatgcctgtaatcccagcactttgagaggccaaggcaggtggatcacgaggtcaagagatcgagaccatcctggccaacatgatgaaactccgtctctactaaaaatacaaaaattagctgggcatggtggcgtgcgcctgtagtcccagctacttgggaggctgaggcaggagaatcgcttaaacctgggagacggaggttgcagtgagccaagatcgtgccactgcactccagcctggtgacagagtgagactctgtttcaaaaaagaaaagaaaagaaacatggttcaaattatatctaaacaaaaaagaataagaaacaaaaaacacattaaaattttaagttgtattttctatgtttctagatacatcatttttgtttgatattttcctgatgcaagtatgtggtttatcacatgtagctcttttgcatgctaaatgaaaattcaaaacttgccaataaatgaatagcttattgcagacattttttaccaacattaattattttgggtttgtttaaaacctagaggcacaatcttgacttgtcaattactaccctttcacaagctaccatctcagatatatatatatatataaattcaataaagctttctgtttgtgttcc

SEQ ID NO: 182715 - DNA, 5729 bp, Homo sapiens
  Payload ID: 16002
  Gene Symbol: SCN11A
  Gene Name: sodium channel, voltage gated, type XI alpha subunit
  Uniprot ID: Q9UI33
  ENST ID: ENST00000444237
  CDS Start-End: 200-4534
tcctgctatacccacagtggtggtcatctcttctgatcttcacagccaatcagctcccaaggcccctgacctcagctcagcttttgtagatccttatgacaccatcctttaagactggaatcctagggcaggctgttttattcccgcctcctgaggcctttctgaggatctgtggcttgtctctgtcctgagggtgaagatggatgacagatgctacccagtaatctttccagatgagcggaatttccgccccttcacttccgactctctggctgcaattgagaagcggattgccatccaaaaggagaaaaagaagtctaaagaccagacaggagaagtaccccagcctcggcctcagcttgacctaaaggcctccaggaagttgcccaagctctatggcgacattcctcgtgagctcataggaaagcctctggaagacttggacccattctaccgaaatcataagacatttatggtgttaaacagaaagaggacaatctaccgcttcagtgccaagcatgccttgttcatttttgggcctttcaattcaatcagaagtttagccattagagtctcagtccattcattgttcagcatgttcattatcggcaccgttatcatcaactgcgtgttcatggctacagggcctgctaaaaacagcaacagtaacaatactgacattgcagagtgtgtcttcactgggatttatatttttgaagctttgattaaaatattggcaagaggtttcattctggatgagttttctttccttcgagatccatggaactggctggactccattgtcattggaatagcgattgtgtcatatattccaggaatcaccatcaaactattgcccctgcgtaccttccgtgtgttcagagctttgaaagcaatttcagtagtttcacgtctgaaggtcatcgtgggggccttgctacgctctgtgaagaagctggtcaacgtgattatcctcaccttcttttgcctcagcatctttgccctggtaggtcagcagctcttcatgggaagtctgaacctgaaatgcatctcgagggactgtaaaaatatcagtaacccggaagcttatgaccattgctttgaaaagaaagaaaattcacctgaattcaaaatgtgtggcatctggatgggtaacagtgcctgttccatacaatatgaatgtaagcacaccaaaattaatcctgactataattatacgaattttgacaactttggctggtcttttcttgccatgttccggctgatgacccaagattcctgggagaagctttatcaacagaccctgcgtactactgggctctactcagtcttcttcttcattgtggtcattttcctgggctccttctacctgattaacttaaccctggctgttgttaccatggcatatgaggagcagaacaagaatgtagctgcagagatagaggccaaggaaaagatgtttcaggaagcccagcagctgttaaaggaggaaaaggaggctctggttgccatgggaattgacagaagttcacttacttcccttgaaacatcatattttaccccaaaaaagagaaagctctttggtaataagaaaaggaagtccttctttttgagagagtctgggaaagaccagcctcctgggtcagattctgatgaagattgccaaaaaaagccacagctcctagagcaaaccaaacgactgtcccagaatctatcactggaccactttgatgagcatggagatcctctccaaaggcagagagcactgagtgctgtcagcatcctcaccatcaccatgaaggaacaagaaaaatcacaagagccttgtctcccttgtggagaaaacctggcatccaagtacctcgtgtggaactgttgcccccagtggctgtgcgttaagaaggtcctgagaactgtgatgactgacccgtttactgagctggccatcaccatctgcatcatcatcaacactgtcttcttggccatggagcatcacaagatggaggccagttttgagaagatgttgaatatagggaatttggttttcactagcatttttatagcagaaatgtgcctaaaaatcattgcgctcgatccctaccactactttcgccgaggctggaacatttttgacagcattgttgctcttctgagttttgcagatgtaatgaactgtgtacttcaaaagagaagctggccattcttgcgttccttcagagtgctcagggtcttcaagttagccaaatcctggccaactttgaacacactaattaagataatcggcaactctgtcggagcccttggaagcctgactgtggtcctggtcattgtgatctttattttctcagtagttggcatgcagctttttggccgtagcttcaattcccaaaagagtccaaaactctgtaacccgacaggcccgacagtctcatgtttacggcactggcacatgggggatttctggcactccttcctagtggtattccgcatcctctgcggggaatggatcgaaaatatgtgggaatgtatgcaagaagcgaatgcatcatcatcattgtgtgttattgtcttcatattgatcacggtgataggaaaacttgtggtgctcaacctcttcattgccttactgctcaattcctttagcaatgaggaaagaaatggaaacttagaaggagaggccaggaaaactaaagtccagttagcactggatcgattccgccgggctttttgttttgtgagacacactcttgagcatttctgtcacaagtggtgcaggaagcaaaacttaccacagcaaaaagaggtggcaggaggctgtgctgcacaaagcaaagacatcattcccctggtcatggagatgaaaaggggctcagagacccaggaggagcttggtatactaacctctgtaccaaagaccctgggcgtcaggcatgattggacttggttggcaccacttgcggaggaggaagatgacgttgaattttctggtgaagataatgcacagcgcatcacacaacctgagcctgaacaacaggcctatgagctccatcaggagaacaagaagcccacgagccagagagttcaaagtgtggaaattgacatgttctctgaagatgagcctcatctgaccatacaggatccccgaaagaagtctgatgttaccagtatactatcagaatgtagcaccattgatcttcaggatggctttggatggttacctgagatggttcccaaaaagcaaccagagagatgtttgcccaaaggctttggttgctgctttccatgctgtagcgtggacaagagaaagcctccctgggtcatttggtggaacctgcggaaaacctgctaccaaatagtgaaacacagctggtttgagagctttattatctttgtgattctgctgagcagtggggcactgatatttgaagatgttcaccttgagaaccaacccaaaatccaagaattactaaattgtactgacattatttttacacatatttttatcctggagatggtactaaaatgggtagccttcggatttggaaagtatttcaccagtgcctggtgctgccttgatttcatcattgtgattgtctctgtgaccaccctcattaacttaatggaattgaagtccttccggactctacgagcactgaggcctcttcgtgcgctgtcccagtttgaaggaatgaaggtggtggtcaatgctctcataggtgccatacctgccattctgaatgttttgcttgtctgcctcattttctggctcgtattttgtattctgggagtatacttcttttctggaaaatttgggaaatgcattaatggaacagactcagttataaattataccatcattacaaataaaagtcaatgtgaaagtggcaatttctcttggatcaaccagaaagtcaactttgacaatgtgggaaatgcttacctcgctctgctgcaagtggcaacatttaagggctggatggatattatatatgcagctgttgattccacagagaaagaacaacagccagagtttgagagcaattcactcggttacatttacttcgtagtctttatcatctttggctcattcttcactctgaatctcttcattggcgttatcattgacaacttcaaccaacagcagaaaaagttaggtggccaagacatttttatgacagaagaacagaagaaatactataatgcaatgaaaaaattaggatccaaaaaacctcaaaaacccattccacggcctctgaacaaatgtcaaggtctcgtgttcgacatagtcacaagccagatctttgacatcatcatcataagtctcattatcctaaacatgattagcatgatggctgaatcatacaaccaacccaaagccatgaaatccatccttgaccatctcaactgggtctttgtggtcatctttacgttagaatgtctcatcaaaatctttgctttgaggcaatactacttcaccaatggctggaatttatttgactgtgtggtcgtgcttctttccattgttagtaagtaaaatcagcagtcagagggactttaagaaccagaagtaagtttgtaaatcttatcattttttgaagtttgttcaaactatccacaaagcagaaaactgggccaagtgtactttctgaaagaatagacaggggtactaatgccattctctactgggaagttgctaggagatagagagtaatttctgttcccttaactcactacacaactgaaatagagttcaataatcatgcagctaatgtattcaatggaaatagacaaaattaaaatgactcagaagtttttgtggtggtaacctgatttattcagataattgagtcaaagttctacctttcctgtgcaactataagccctatgagcattttttagttttaaggatttactgcccatgttttttcctttgttcaaaatccacatgggtgccagatcacaattattgtgcccctgtggcactgctgtgccccctttcaacccctatacaaggccccatggcccactctagattgggctttcaagagtatatcattcagacaatcaaagctttttttctattctatatcccatgttaacttaaaccacagtgtgaactgtgcttgtctcagattctttgaccccgcttaccaaccagcctcattctctaatcagtatatttttcctaatcacacgcagggttaactaaaaggcttataaaagaatacaaaagaaagaaggttattaccatactccttcttataaaacacacacatacacacatcaactttaaaattaaattcttcatggctaaaccataagtgcttactctgggtttttgaagtctggttttaattaaactgttaacttgacattttataattatgtaaaactgtccaggagcccttctcatagttcaaaacacaatgaagacaaagaaaactgattttccaaatggaagcttttttgcgatctcagaaagaatgcatcaaacagatatattggatcaagatattttggttcctaatgctactgcagcattgcagatgtttcagagaacaacaacaaatatgctacagttcatagtgtgttctggtttctaagccatgatgttaatgtagataaagcttatcaatagattcttccatgagtttacagttaagtagacctttaatttttattagtcaattccaatcacaagtcttggtgaaattgacagcagcaaaaaa

SEQ ID NO: 182716 - DNA, 5262 bp, Homo sapiens
  Payload ID: 16002
  Gene Symbol: SCN11A
  Gene Name: sodium channel, voltage gated, type XI alpha subunit
  Uniprot ID: Q9UI33
  ENST ID: ENST00000456224
  CDS Start-End: 1-5262
atggatgacagatgctacccagtaatctttccagatgagcggaatttccgccccttcacttccgactctctggctgcaattgagaagcggattgccatccaaaaggagaaaaagaagtctaaagaccagacaggagaagtaccccagcctcggcctcagcttgacctaaaggcctccaggaagttgcccaagctctatggcgacattcctcgtgagctcataggaaagcctctggaagacttggacccattctaccgaaatcataagacatttatggtgttaaacagaaagaggacaatctaccgcttcagtgccaagcatgccttgttcatttttgggcctttcaattcaatcagaagtttagccattagagtctcagtccattcattgttcagcatgttcattatcggcaccgttatcatcaactgcgtgttcatggctacagggcctgctaaaaacagcaacagtaacaatactgacattgcagagtgtgtcttcactgggatttatatttttgaagctttgattaaaatattggcaagaggtttcattctggatgagttttctttccttcgagatccatggaactggctggactccattgtcattggaatagcgattgtgtcatatattccaggaatcaccatcaaactattgcccctgcgtaccttccgtgtgttcagagctttgaaagcaatttcagtagtttcacgtctgaaggtcatcgtgggggccttgctacgctctgtgaagaagctggtcaacgtgattatcctcaccttcttttgcctcagcatctttgccctggtaggtcagcagctcttcatgggaagtctgaacctgaaatgcatctcgagggactgtaaaaatatcagtaacccggaagcttatgaccattgctttgaaaagaaagaaaattcacctgaattcaaaatgtgtggcatctggatgggtaacagtgcctgttccatacaatatgaatgtaagcacaccaaaattaatcctgactataattatacgaattttgacaactttggctggtcttttcttgccatgttccggctgatgacccaagattcctgggagaagctttatcaacagaccctgcgtactactgggctctactcagtcttcttcttcattgtggtcattttcctgggctccttctacctgattaacttaaccctggctgttgttaccatggcatatgaggagcagaacaagaatgtagctgcagagatagaggccaaggaaaagatgtttcaggaagcccagcagctgttaaaggaggaaaaggaggctctggttgccatgggaattgacagaagttcacttacttcccttgaaacatcatattttaccccaaaaaagagaaagctctttggtaataagaaaaggaagtccttctttttgagagagtctgggaaagaccagcctcctgggtcagattctgatgaagattgccaaaaaaagccacagctcctagagcaaaccaaacgactgtcccagaatctatcactggaccactttgatgagcatggagatcctctccaaaggcagagagcactgagtgctgtcagcatcctcaccatcaccatgaaggaacaagaaaaatcacaagagccttgtctcccttgtggagaaaacctggcatccaagtacctcgtgtggaactgttgcccccagtggctgtgcgttaagaaggtcctgagaactgtgatgactgacccgtttactgagctggccatcaccatctgcatcatcatcaacactgtcttcttggccatggagcatcacaagatggaggccagttttgagaagatgttgaatatagggaatttggttttcactagcatttttatagcagaaatgtgcctaaaaatcattgcgctcgatccctaccactactttcgccgaggctggaacatttttgacagcattgttgctcttctgagttttgcagatgtaatgaactgtgtacttcaaaagagaagctggccattcttgcgttccttcagagtgctcagggtcttcaagttagccaaatcctggccaactttgaacacactaattaagataatcggcaactctgtcggagcccttggaagcctgactgtggtcctggtcattgtgatctttattttctcagtagttggcatgcagctttttggccgtagcttcaattcccaaaagagtccaaaactctgtaacccgacaggcccgacagtctcatgtttacggcactggcacatgggggatttctggcactccttcctagtggtattccgcatcctctgcggggaatggatcgaaaatatgtgggaatgtatgcaagaagcgaatgcatcatcatcattgtgtgttattgtcttcatattgatcacggtgataggaaaacttgtggtgctcaacctcttcattgccttactgctcaattcctttagcaatgaggaaagaaatggaaacttagaaggagaggccaggaaaactaaagtccagttagcactggatcgattccgccgggctttttgttttgtgagacacactcttgagcatttctgtcacaagtggtgcaggaagcaaaacttaccacagcaaaaagaggtggcaggaggctgtgctgcacaaagcaaagacatcattcccctggtcatggagatgaaaaggggctcagagacccaggaggagcttggtatactaacctctgtaccaaagaccctgggcgtcaggcatgattggacttggttggcaccacttgcggaggaggaagatgacgttgaattttctggtgaagataatgcacagcgcatcacacaacctgagcctgaacaacagaagtctgatgttaccagtatactatcagaatgtagcaccattgatcttcaggatggctttggatggttacctgagatggttcccaaaaagcaaccagagagatgtttgcccaaaggctttggttgctgctttccatgctgtagcgtggacaagagaaagcctccctgggtcatttggtggaacctgcggaaaacctgctaccaaatagtgaaacacagctggtttgagagctttattatctttgtgattctgctgagcagtggggcactgatatttgaagatgttcaccttgagaaccaacccaaaatccaagaattactaaattgtactgacattatttttacacatatttttatcctggagatggtactaaaatgggtagccttcggatttggaaagtatttcaccagtgcctggtgctgccttgatttcatcattgtgattgtctctgtgaccaccctcattaacttaatggaattgaagtccttccggactctacgagcactgaggcctcttcgtgcgctgtcccagtttgaaggaatgaaggtggtggtcaatgctctcataggtgccatacctgccattctgaatgttttgcttgtctgcctcattttctggctcgtattttgtattctgggagtatacttcttttctggaaaatttgggaaatgcattaatggaacagactcagttataaattataccatcattacaaataaaagtcaatgtgaaagtggcaatttctcttggatcaaccagaaagtcaactttgacaatgtgggaaatgcttacctcgctctgctgcaagtggcaacatttaagggctggatggatattatatatgcagctgttgattccacagagaaagaacaacagccagagtttgagagcaattcactcggttacatttacttcgtagtctttatcatctttggctcattcttcactctgaatctcttcattggcgttatcattgacaacttcaaccaacagcagaaaaagttaggtggccaagacatttttatgacagaagaacagaagaaatactataatgcaatgaaaaaattaggatccaaaaaacctcaaaaacccattccacggcctctgaacaaatgtcaaggtctcgtgttcgacatagtcacaagccagatctttgacatcatcatcataagtctcattatcctaaacatgattagcatgatggctgaatcatacaaccaacccaaagccatgaaatccatccttgaccatctcaactgggtctttgtggtcatctttacgttagaatgtctcatcaaaatctttgctttgaggcaatactacttcaccaatggctggaatttatttgactgtgtggtcgtgcttctttccattgttagtacaatgatttctaccttggaaaatcaggagcacattcctttccctccgacgctcttcagaattgtccgcttggctcggattggccgaatcctgaggcttgtccgggctgcacgaggaatcaggactctcctctttgctctgatgatgtcgcttccttctctgttcaacattggtcttctactctttctgattatgtttatctatgccattctgggtatgaactggttttccaaagtgaatccagagtctggaatcgatgacatattcaacttcaagacttttgccagcagcatgctctgtctcttccagataagcacatcagcaggttgggattccctgctcagccccatgctgcgatcaaaagaatcatgtaactcttcctcagaaaactgccacctccctggcatagccacatcctactttgtcagttacattatcatctcctttctcattgttgtcaacatgtacattgctgtgattttagagaacttcaatacagccactgaagaaagtgaggaccctttgggtgaagatgactttgacatattttatgaagtgtgggaaaagtttgacccagaagcaacacaatttatcaaatattctgccctttctgactttgctgatgccttgcctgagcctttgcgtgtcgcaaagccaaataaatatcaatttctagtaatggacttgcccatggtgagtgaagatcgcctccactgcatggatattcttttcgccttcaccgctagggtactcggtggctctgatggcctagatagtatgaaagcaatgatggaagagaagttcatggaagccaatcctctcaagaagttgtatgaacccatagtcaccaccaccaagagaaaggaagaggaaagaggtgctgctattattcaaaaggcctttcgaaagtacatgatgaaggtgaccaagggtgaccaaggtgaccaaaatgacttggaaaacgggcctcattcaccactccagactctttgcaatggagacttgtctagctttggggtggccaagggcaaggtccactgtgactga

SEQ ID NO: 182717 - DNA, 6818 bp, Homo sapiens
  Payload ID: 16003
  Gene Symbol: NALCN
  Gene Name: sodium leak channel, non selective
  Uniprot ID: Q8IZF0
  ENST ID: ENST00000251127
  CDS Start-End: 83-5299
ccgcccgcgggcaccatgacagctctgagcgctggggttacagactgtggttttgtgcttgctcaccaaagctaacctcagcatgctcaaaaggaagcagagttccagggtggaagcccagccagtcactgactttggtcctgatgagtctctgtcggataatgctgacatcctctggattaacaaaccatgggttcactctttgctgcgcatctgtgccatcatcagcgtcatttctgtttgtatgaatacgccaatgaccttcgagcactatcctccacttcagtatgtgaccttcactttggatacattattgatgtttctctacacggcagagatgatagcaaaaatgcacatccggggcattgtcaagggggatagttcctatgtgaaagatcgctggtgtgtttttgatggatttatggtcttttgcctttgggtttctttggtgctacaggtgtttgaaattgctgatatagttgatcagatgtcaccttggggcatgttgcggattccacggccactgattatgatccgagcattccggatttatttccgatttgaactgccaaggaccagaattacaaatattttaaagcgatcgggagaacaaatatggagtgtttccatttttctacttttctttctacttctttatggaattttaggagttcagatgtttggaacatttacttatcactgtgttgtaaatgacacaaagccagggaatgtaacctggaatagtttagctattccagacacacactgctcaccagagctagaagaaggctaccagtgcccacctggatttaaatgcatggaccttgaagatctgggacttagcaggcaagagctgggctacagtggctttaatgagataggaactagtatattcaccgtctatgaggccgcctcacaggaaggctgggtgttcctcatgtacagagcaattgacagctttccccgttggcgttcctacttctatttcatcactctcattttcttcctcgcctggcttgtgaagaacgtgtttattgctgttatcattgaaacatttgcagaaatcagagtacagtttcaacaaatgtggggatcgagaagcagcactacctcaacagccaccacccagatgtttcatgaagatgctgctggaggttggcagctggtagctgtggatgtcaacaagccccagggacgcgccccagcctgcctccagaaaatgatgcggtcatccgttttccacatgttcatcctgagcatggtgaccgtggacgtgatcgtggcggctagcaactactacaaaggagaaaacttcaggaggcagtacgacgagttctacctggcggaggtggcttttacagtactttttgatttggaagcacttctgaagatatggtgtttgggatttactggatatattagctcatctctccacaaattcgaactactactcgtaattggaactactcttcatgtatacccagatctttatcattcacaattcacgtactttcaggttctccgagtagttcggctgattaagatttcacctgcattagaagactttgtgtacaagatatttggtcctggaaaaaagcttgggagtttggttgtatttactgccagcctcttgattgttatgtcagcaattagtttgcagatgttctgctttgtcgaagaactggacagatttactacgtttccgagggcatttatgtccatgttccagatcctcacccaggaaggatgggtggacgtaatggaccaaactctaaatgctgtgggacatatgtgggcacccgtggttgccatctatttcattctctatcatctttttgccactctgatcctcctgagtttgtttgttgctgttattttggacaacttagaacttgatgaagacctaaagaagcttaaacaattaaagcaaagtgaagcaaatgcggacaccaaagaaaagctccctttacgcctgcgaatctttgaaaaatttccaaacagacctcaaatggtgaaaatctcaaagcttccttcagattttacagttcctaaaatcagggagagttttatgaagcagtttattgaccgccagcaacaggacacatgttgcctcctgagaagcctcccgaccacctcttcctcctcctgcgaccactccaaacgctcagcaattgaggacaacaaatacatcgaccaaaaacttcgcaagtctgttttcagcatcagggcaaggaaccttctggaaaaggagaccgcagtcactaaaatcttaagagcttgcacccgacagcgcatgctgagcggatcatttgaggggcagcccgcaaaggagaggtcaatcctcagcgtgcagcatcatatccgccaagagcgcaggtcactaagacatggatcaaacagccagaggatcagcaggggaaaatctcttgaaactttgactcaagatcattccaatacagtgagatatagaaatgcacaaagagaagacagtgaaataaagatgattcaggaaaaaaaggagcaagcagagatgaaaaggaaagtgcaagaagaggaactcagagagaaccacccatacttcgataagccactgttcattgtcgggcgagaacacaggttcagaaacttttgccgggtggtggtccgagcacgcttcaacgcatctaaaacagaccctgtcacaggagctgtgaaaaatacaaagtaccatcaactttatgatttgctgggattggtcacttacctggactgggtcatgatcatcgtaaccatctgctcttgcatttccatgatgtttgagtccccgtttcgaagagtcatgcatgcacctactttgcagattgctgagtatgtgtttgtgatattcatgagcattgagcttaatctgaagattatggcagatggcttatttttcactccaactgctgtcatcagggacttcggtggagtaatggacatatttatatatcttgtgagcttgatatttctttgttggatgcctcaaaatgtacctgctgaatcgggagctcagcttctaatggtccttcggtgcctgagacctctgcgcatattcaaactggtgccccagatgaggaaagttgttcgagaacttttcagcggcttcaaggaaatttttttggtctccattcttttgctgacattaatgctcgtttttgcaagctttggagttcagctttttgctggaaaactggccaagtgcaatgatcccaacattattagaagggaagattgcaatggcatattcagaattaatgtcagtgtgtcaaagaacttaaatttaaaattgaggcctggagagaaaaaacctggattttgggtgccccgtgtttgggcgaatcctcggaactttaatttcgacaatgtgggaaacgctatgctggcgttgtttgaagttctctccttgaaaggctgggtggaagtgagagatgttattattcatcgtgtggggccgatccatggaatctatattcatgtttttgtattcctgggttgcatgattggactgaccctttttgttggagtagttattgctaatttcaatgaaaacaaggggacggctttgctgaccgtcgatcagagaagatgggaagacctgaagagccgactgaagatcgcacagcctcttcatcttccgcctcgcccggataatgatggttttagagctaaaatgtatgacataacccagcatccattttttaagaggacaatcgcattactcgtcctggcccagtcggtgttgctctctgtcaagtgggacgtcgaggacccggtgaccgtacctttggcaacaatgtcagttgttttcaccttcatctttgttctggaggttaccatgaagatcatagcaatgtcgcctgctggcttctggcaaagcagaagaaaccgatacgatctcctggtgacgtcgcttggcgttgtatgggtggtgcttcactttgccctcctgaatgcatatacttacatgatgggcgcttgtgtgattgtatttaggtttttctccatctgtggaaaacatgtaacgctaaagatgctcctcttgacagtggtcgtcagcatgtacaagagcttctttatcatagtaggcatgtttctcttgctgctgtgttacgcttttgctggagttgttttatttggtactgtgaaatatggggagaatattaacaggcatgcaaatttttcttcggctggaaaagctattaccgtactgttccgaattgtcacaggtgaagactggaacaagattatgcatgactgtatggttcagcctccgttttgtactccagatgaatttacatactgggcaacagactgtggaaattatgctggggcacttatgtatttctgttcattttatgtcatcattgcctacatcatgctaaatctgcttgtagccataattgtggagaatttctccttgttttattccactgaggaggaccagcttttaagttacaatgatcttcgccactttcaaataatatggaacatggtggatgataaaagagagggggtgatccccacgttccgcgtcaagttcctgctgcggctactgcgtgggaggctggaggtggacctggacaaggacaagctcctgtttaagcacatgtgctacgaaatggagaggctccacaatggcggcgacgtcaccttccatgatgtcctgagcatgctttcataccggtccgtggacatccggaagagcttgcagctggaggaactcctggcgagggagcagctggagtacaccatagaggaggaggtggccaagcagaccatccgcatgtggctcaagaagtgcctgaagcgcatcagagctaaacagcagcagtcgtgcagtatcatccacagcctgagagagagtcagcagcaagagctgagccggtttctgaacccgcccagcatcgagaccacccagcccagtgaggacacgaatgccaacagtcaggacaacagcatgcaacctgagacaagcagccagcagcagctcctgagccccacgctgtcggatcgaggaggaagtcggcaagatgcagccgacgcagggaaaccccagaggaaatttgggcagtggcgtctgccctcagccccaaaaccaataagccattcagtgtcctcagtcaacttacggtttggaggaaggacaaccatgaaatctgtcgtgtgcaaaatgaaccccatgactgacgcggcttcctgcggttctgaagttaagaagtggtggacccggcagctgactgtggagagcgacgaaagtggggatgaccttctggatatttaggtggatgtcaatgtagatgaatttctagtggtggaaaccgttttctaataatgtccttgattgtccagtgagcaatctgtaattgatctataactgaattccagcttgtcacaagatgtttataaattgattttcatcctgccacagaaaggcataagctgcatgtatgatgggttactatcaatcattgctcaaaaaaatttttgtataatgacagtactgataatattagaaatgataccgcaagcaaatgtatatcacttaaaaatgtcatatattctgtctgcgtaaactaaggtatatattcatatgtgctctaatgcagtattatcaccgccccgcaaaagagtgctaagcccaaagtggctgatatttagggtacaggggttatagctttagttcacatctttcccatttccactagaaatatttctcttgagagaatttattatttatgattgatctgaaaaggtcagcactgaacttatgctaaaatgatagtagttttacaaactacagattctgaattttaaaaagtatcttctttttctcgtgttatatttttaaatatacacaagacatttggtgaccagaacaagttgatttctgtcctcagttatgttaatgaaactgttgcctccttctaagaaaattgtgtgtgcaagcaccaggcaaagaaatggactcaggatgcttagcggtttaaaacaaacctgtagataaatcacttgagtgacatagttgcgcaaagatgttaagtttcttaagaaaccttttaataactgagtttagcaaaaagaataaaactatatagctcaatttatttaaaaaaatctttgcatgtgtgatgttatcattggcttcatttcttacccaaggtatgtctgttttgccataaatcagcagagtcatttcattctgggtgatcctaacacaccattgctacgttagatttgaaatgacatctctgttaaaagaatcttctatggaaataatggtgccctgcaaaatcttcctttgaactcacaggttagggatcacacaacttacttaatcgttttttgtttttgttttttttccttatatgtcaatggcccatgtcctccgggaaaattagaaaagcaaaatgattacaaagtgctgttagatttcttgtgctgggccagccaagtagaagtggacttgacttggacctttaactattttattacagattggacatttgctgttcagatgttttttaacagagggattatctcagaatcctgtgacctccaggttgttttataatctatttttctctatttaacattcctcagatagataggcaaataggacattccttctgtgtcacagaagtatcgtggtagtggcagtctacagtttatatgattcattgtaactatgagataaagaacaaccagtcatgtggccaaaaggattagatttgatttgatgttcacttggagtttactttttgtacatacaagataaaataaatattggatttgtaaaataa

SEQ ID NO: 182718 - DNA, 1126 bp, Homo sapiens
  Payload ID: 16003
  Gene Symbol: NALCN
  Gene Name: sodium leak channel, non selective
  Uniprot ID: Q8IZF0
  ENST ID: ENST00000376200
  CDS Start-End: 29-685
gtgcttgctcaccaaagctaacctcagcatgctcaaaaggaagcagagttccagggtggaagcccagccagtcactgactttggtcctgatgagtctctgtcggataatgctgacatcctctggattaacaaaccatgggttcactctttgctgcgcatctgtgccatcatcagcgtcatttctgtttgtatgaatacgccaatgaccttcgagcactatcctccacttcagtatgtgaccttcactttggatacattattgatgtttctctacacggcagagatgatagcaaaaatgcacatccggggcattgtcaagggggatagttcctatgtgaaagatcgctggtgtgtttttgatggatttatggtcttttgcctttgggtttctttggtgctacaggtgtttgaaattgctgatatagttgatcagatgtcaccttggggcatgttgcggattccacggccactgattatgatccgagcattccggatttatttccgatttgaactgccaaggaccagaattacaaatattttaaagcgatcgggagaacaaatatggagtgtttccatttttctacttttctttctacttctttatggaattttaggagttcagatgtttggaacatttacttatcactgtgttgtaaatgacacaaagccaggactctcactctgacacccaggctggagtgcagtggcatgatctcagcttactgaaacatccatctcccaggttcaagagattctcctgcttcagccccccaagtagctgggactacaggcgtgtgccaccacacccgggtaatttttgtatttttagcagagacagggcttcatcatgttggccaggctggtctcgaactcctgacctcaagagatctgcctgcctcagcctcccaaagtgctgggattaaaggcctgagccaccatgtccagccttatttttaaaaaaaaatttcagttcaatattactgcattttaaagccccacacataagcagaaaaactgtcagcaccattttaccgttactattagcccagacataaatgtagttttactcttagagactcaagaaatatccaaactcaaaataaaacagaaaatgttaattgatttg

SEQ ID NO: 182719 - DNA, 709 bp, Homo sapiens
  Payload ID: 16004
  Gene Symbol: SOGA3
  Gene Name: SOGA family member 3
  ENST ID: ENST00000467753
  CDS Start-End: 679-709
tctctgcacttcctggggagcgtctggcccagcttggtacctcgcgtgttagcctgctgagagctgcagctccagcccagccgcggaccgccgggaagtcacccgctctgggggcagctgaatcttgacgttaccgccattgtttggagaaatcgagtgggtgtggaactgcggcgagcgagcccaaagtcatgctcagccggaaagtcgcatacaataatatgaagttgaactttcctcggcgcagaaaggcacaataataaaccctgagatccccggaatatcagaaggaaagtgctgttgatttgttcagctacttggaaacctcgcctctgctgagaaattaaagaagctagtgacggatttatcttggaaatacacatactggaaattgatcttaccaccatgagggaagatgcaccagccttctgggttctgtctcagaattgctatataggaggaaatgggcactttaaaaagtacaacttttgcctatgatatgcgatgtaagaagatggctaagaatgaaaatattttctatctagcaattacacttaaaactaaagtgattcataagactacaaaactggcttaggaaggaaggttggcggcggtgaagagggaagaggatgatctagtaatgggctcttccaaatcgcatctggtaggttcatagccatgagtcagccaccaatcgggggcgctgccc

SEQ ID NO: 182720 - DNA, 4077 bp, Homo sapiens
  Payload ID: 16004
  Gene Symbol: SOGA3
  Gene Name: SOGA family member 3
  Uniprot ID: Q5TF21
  ENST ID: ENST00000525778
  CDS Start-End: 747-3590
ccgtgttcgagcggttttgggatcctctgccaagtacgggataagagaatagagcaaggagtttgagcgctgctgccaatcttccatctcgggcgtggctctggcctttttgtctctttatcccgccactccccacccccgtcccccgtccccctccccgccttcttctctttcctcttgaaagtaacctctctttggttacttctaccctatcgtcccttgcaatcccgccttctctcctgcccagttcggtgaggtcagctcatgaacatctctgcacttcctggggagcgtctggcccagcttggtacctcgcgtgttagcctgctgagagctgcagctccagcccagccgcggaccgccgggaagtcacccgctctgggggcagctgaatcttgacgttaccgccattgtttggagaaatcgagtgggtgtggaactgcggcgagcgagcccaaagtcatgctcagccggaaagtcgcatacaataatatgaagttgaactttcctcggcgcagaaaggcacaataataaaccctgagatccccggaatatcagaaggaaagtgctgttgatttgttcagctacttggaaacctcgcctctgctgagaagtgagcaagttctggatttctaaagggttggggatgaatgatgggcttaggaaggaaggttggcggcggtgaagagggaagaggatgatctagtaatgggctcttccaaatcgcatctggtaggttcatagccatgagtcagccaccaatcgggggcgctgcccctgccacagcagcagcttctcccgccgctgcagccactgaggctcgtctgcacccggagggcagcagcagaaagcagcagcgagctcagtcacccgctagaccgagggacagttcgctgcgacagacaatcgcggccacccggtccccagtgggggccggcactaaactcaattctgttcggcagcagcagctgcagcagcagcaacagcagggtaacaagaccgggagccgcacggggccgcccgccagcatccgaggaggcggaggtggggccgagaaggcgacgcccctggcgcccaaaggggccgctccgggagctgtccagcctgtggctggtgctgaagcggcccccgccgcgaccctggccgctttgggcggcaggaggcccggaccgcccgaggagccgcctcgggagctagagtccgtgccctcgaaactcggggaaccccctccgctcggagaagggggaggagggggcggggaaggaggaggagccggcggcggctccggggaaagggaggggggcgctccgcagccgccgccgcccaggggctggcgagggaaaggcgtacgcgctcagcagaggggcggcagcggcggggagggggcctccccttctccatcctcctcttctgcgggcaaaaccccaggaaccggcagcagaaactccggaagcggcgttgcggggggcggcagcggtggtggagggagctactggaaagaaggatgtctgcagtctgagctcatccagttccatctcaagaaggagcgggcggcagcggcggcggccgcggctcagatgcacgctaagaacggcggcggcagcagtagccgcagctccccggtgtctggcccccctgccgtttgcgagaccctggccgtcgcctccgcctccccaatggcggcggcggcggagggcccccagcagagcgcagagggcagcgcgagcggcgggggcatgcaggcggcagcgcccccttcgtcgcagccgcacccgcagcagctccaagagcaggaagaaatgcaagaggagatggagaagctgcgagaggaaaacgagactctcaagaacgagatcgatgagctgagaaccgagatggacgagatgagggacactttcttcgaggaggatgcctgtcaactgcaggaaatgcgccacgagttggagagagccaacaaaaactgccggatcctgcagtaccgcctccgcaaagccgagcgcaaaaggctccgctacgcccagaccggggaaatcgacggggagctgttgcgcagcctggagcaggacctcaaggttgcaaaggatgtatctgtgagacttcaccatgaattagaaaatgtggaagaaaagagaacaacaacagaagatgaaaatgagaaactgaggcaacagctcatagaagttgaaattgcaaagcaagctttacagaatgaactggaaaaaatgaaagagttatccttaaaaagaagaggaagcaaagatttgccaaaatctgaaaaaaaggctcaacagactcccacagaggaggacaatgaagatctgaagtgccagctgcagtttgttaaggaagaagccgctttgatgagaaagaaaatggccaagattgataaagaaaaggacagatttgaacacgagctccagaagtacagatccttttatggggatctggacagtcctttgcccaaaggagaagccggaggccctcccagcactagggaggccgagctcaagctacggctaaggctggtggaggaagaagccaacatcctgggcaggaaaatcgtcgaactggaggtggagaacagaggcctgaaggcggaactggacgaccttaggggcgatgacttcaacggctcggccaacccgctcatgagggagcagagcgaatccctgtcggagctgcggcagcacctgcagctggtggaagacgagacggagctgctgcggaggaacgtggccgacctggaggagcagaacaagcgcatcacggcggagctcaacaagtacaagtacaagtccggcggccacgacagcgcgcggcaccacgacaacgccaagaccgaggccctgcaggaggagctgaaggcggcgcgcctgcagatcaacgagctcagcggcaaggtcatgcagctgcagtacgagaaccgcgtgcttatgtccaacatgcagcgctacgacctggcctcgcacctgggcatccgcggcagcccccgcgacagcgacgccgagagcgacgcgggcaagaaggagagcgacgacgactcgcggcctccgcaccgcaagcgcgaagggcccatcggcggcgagagcgactcggaggaggtgcgcaacatccgctgcctcacgcccactcgctccttctacccggcgcccgggccctggcccaagagcttctccgatcggcagcagatgaaggacatccgctcggaggccgagcgcctgggcaagaccatcgaccggctcatcgccgacacgagcaccatcatcaccgaggcgcgcatctacgtggccaacggggacctgttcggactcatggacgaggaggacgacggcagccgcatccgggagcacgagctgctctaccgcatcaacgctcagatgaaggccttccgcaaggagctgcagaccttcatcgaccgcctcgaggtgcccaagtctgcggacgaccgcggcgccgaggagcccatttccgtgagtcagatgttccagcctatcattttacttattctcattcttgtattattttcatcactttcttacacaacaatatttaaacttgtcttcctttttacactgttttttgtactgtaaatctttcatcatttaccattcattgtagtattttcagtttgtttattttgttcacccttcaagacaagaagtaaaagaagtataatttctgtagtaaccaatgctataaaaacactgaagactgcttatttctttaaaaagatacaactcatcttaccaagaccaaattcaataagaagcccaaacactaaaatatttcaggtaagaaagtgtgacatttttctgtatgaattgttttaatttttacttctttttttcatcctgtttgtctcctcttgataaataattggcatactgaatataaaaatggactacatgtctcataattatttctcagtagttcactattattattcaaaagctggacggacattcacaatttggtcacatttccaaaaagtatatacatttgtaaagtatctttgccaggttgcatcaaactaacaagataattttgacatccaataaatatctgaaaaaaaatatg

SEQ ID NO: 182721 - DNA, 3756 bp, Homo sapiens
  Payload ID: 16004
  Gene Symbol: SOGA3
  Gene Name: SOGA family member 3
  ENST ID: ENST00000465909
  CDS Start-End: 447-3281
cagcttggtacctcgcgtgttagcctgctgagagctgcagctccagcccagccgcggaccgccgggaagtcacccgctctgggggcagctgaatcttgacgttaccgccattgtttggagaaatcgagtgggtgtggaactgcggcgagcgagcccaaagtcatgctcagccggaaagtcgcatacaataatatgaagttgaactttcctcggcgcagaaaggcacaataataaaccctgagatccccggaatatcagaaggaaagtgctgttgatttgttcagctacttggaaacctcgcctctgctgagaagtgagcaagttctggatttctaaagggttggggatgaatgatgggcttaggaaggaaggttggcggcggtgaagagggaagaggatgatctagtaatgggctcttccaaatcgcatctggtaggttcatagccatgagtcagccaccaatcgggggcgctgcccctgccacagcagcagcttctcccgccgctgcagccactgaggctcgtctgcacccggagggcagcagcagaaagcagcagcgagctcagtcacccgctagaccgagggacagttcgctgcgacagacaatcgcggccacccggtccccagtgggggccggcactaaactcaattctgttcggcagcagcagctgcagcagcagcaacagcagggtaacaagaccgggagccgcacggggccgcccgccagcatccgaggaggcggaggtggggccgagaaggcgacgcccctggcgcccaaaggggccgctccgggagctgtccagcctgtggctggtgctgaagcggcccccgccgcgaccctggccgctttgggcggcaggaggcccggaccgcccgaggagccgcctcgggagctagagtccgtgccctcgaaactcggggaaccccctccgctcggagaagggggaggagggggcggggaaggaggaggagccggcggcggctccggggaaagggaggggggcgctccgcagccgccgccgcccaggggctggcgagggaaaggcgtacgcgctcagcagaggggcggcagcggcggggagggggcctccccttctccatcctcctcttctgcgggcaaaaccccaggaaccggcagcagaaactccggaagcggcgttgcggggggcggcagcggtggtggagggagctactggaaagaaggatgtctgcagtctgagctcatccagttccatctcaagaaggagcgggcggcagcggcggcggccgcggctcagatgcacgctaagaacggcggcggcagcagtagccgcagctccccggtgtctggcccccctgccgtttgcgagaccctggccgtcgcctccgcctccccaatggcggcggcggcggagggcccccagcagagcgcagagggcagcgcgagcggcgggggcatgcaggcggcagcgcccccttcgtcgcagccgcacccgcagcagctccaagagcaggaagaaatgcaagaggagatggagaagctgcgagaggaaaacgagactctcaagaacgagatcgatgagctgagaaccgagatggacgagatgagggacactttcttcgaggaggatgcctgtcaactgcaggaaatgcgccacgagttggagagagccaacaaaaactgccggatcctgcagtaccgcctccgcaaagccgagcgcaaaaggctccgctacgcccagaccggggaaatcgacggggagctgttgcgcagcctggagcaggacctcaaggttgcaaaggatgtatctgtgagacttcaccatgaattagaaaatgtggaagaaaagagaacaacaacagaagatgaaaatgagaaactgaggcaacagctcatagaagttgaaattgcaaagcaagctttacagaatgaactggaaaaaatgaaagagttatccttaaaaagaagaggaagcaaagatttgccaaaatctgaaaaaaaggctcaacagactcccacagaggaggacaatgaagatctgaagtgccagctgcagtttgttaaggaagaagccgctttgatgagaaagaaaatggccaagattgataaagaaaaggacagatttgaacacgagctccagaagtacagatccttttatggggatctggacagtcctttgcccaaaggagaagccggaggccctcccagcactagggaggccgagctcaagctacggctaaggctggtggaggaagaagccaacatcctgggcaggaaaatcgtcgaactggaggtggagaacagaggcctgaaggcggaactggacgaccttaggggcgatgacttcaacggctcggccaacccgctcatgagggagcagagcgaatccctgtcggagctgcggcagcacctgcagctggtggaagacgagacggagctgctgcggaggaacgtggccgacctggaggagcagaacaagcgcatcacggcggagctcaacaagtacaagtacaagtccggcggccacgacagcgcgcggcaccacgacaacgccaagaccgaggccctgcaggaggagctgaaggcggcgcgcctgcagatcaacgagctcagcggcaaggtcatgcagctgcagtacgagaaccgcgtgcttatgtccaacatgcagcgctacgacctggcctcgcacctgggcatccgcggcagcccccgcgacagcgacgccgagagcgacgcgggcaagaaggagagcgacgacgactcgcggcctccgcaccgcaagcgcgaagggcccatcggcggcgagagcgactcggaggaggtgcgcaacatccgctgcctcacgcccactcgctccttctacccggcgcccgggccctggcccaagagcttctccgatcggcagcagatgaaggacatccgctcggaggccgagcgcctgggcaagaccatcgaccggctcatcgccgacacgagcaccatcatcaccgaggcgcgcatctacgtggccaacggggacctgttcggactcatggacgaggaggacgacggcagccgcatccgggagcacgagctgctctaccgcatcaacgctcagatgaaggccttccgcaaggagctgcagaccttcatcgaccgcctcgaggtgcccaagtctgcggacgaccgcggcgccgaggagcccatttccatgttccagcctatcattttacttattctcattcttgtattattttcatcactttcttacacaacaatatttaaacttgtcttcctttttacactgttttttgtactgtaaatctttcatcatttaccattcattgtagtattttcagtttgtttattttgttcacccttcaagacaagaagtaaaagaagtataatttctgtagtaaccaatgctataaaaacactgaagactgcttatttctttaaaaagatacaactcatcttaccaagaccaaattcaataagaagcccaaacactaaaatatttcaggtaagaaagtgtgacatttttctgtatgaattgttttaatttttacttctttttttcatcctgtttgtctcctcttgataaataattggcatactgaatataaaaatggactacatgtctcataattatttctcagtagttcactattattattcaaaagctggacggacattcacaatttggtcacatttccaaaaagtatatacatttgtaaagtatctttgccaggttgcatcaaactaacaagataattttgacatccaataaatatctg

SEQ ID NO: 182722 - DNA, 11696 bp, Homo sapiens
  Payload ID: 16005
  Gene Symbol: SLC1A2
  Gene Name: solute carrier family 1 (glial high affinity glutamate transporter), member 2
  Uniprot ID: P43004
  ENST ID: ENST00000278379
  CDS Start-End: 284-2008
caccctcggagcccccggagctccccgccaagcgccatccccgcgggcggaggggagcgcgggtcgcgcgccgtggagagccgggacgcggattagcgcccgcaggagcctcctgcgcccgttgaggcgctaaagggcttaccccggaggcgggtggaagggcgggcagaggctcctcttaaataccgctcccggccgcacttcgcgctcaccccggcgtccgctttctccctcgcccacagctgccggatagtgctgaagaggagggggcgttccccagaccatggcatctacggaaggtgccaacaatatgcccaagcaggtggaagtgcgaatgcacgacagtcatcttggctcagaggaacccaagcaccggcacctgggcctgcgcctgtgtgacaagctggggaagaatctgctgctcaccctgacggtgtttggtgtcatcctgggagcagtgtgtggagggcttcttcgcttggcatctcccatccaccctgatgtggttatgttaatagccttcccaggggatatactcatgaggatgctaaaaatgctcattctccctctaatcatctccagcttaatcacagggttgtcaggcctggatgctaaggctagtggccgcttgggcacgagagccatggtgtattacatgtccacgaccatcattgctgcagtactgggggtcattctggtcttggctatccatccaggcaatcccaagctcaagaagcagctggggcctgggaagaagaatgatgaagtgtccagcctggatgccttcctggaccttattcgaaatctcttccctgaaaaccttgtccaagcctgctttcaacagattcaaacagtgacgaagaaagtcctggttgcaccaccgccggacgaggaggccaacgcaaccagcgctgttgtctctctgttgaacgagactgtgactgaggtgccggaggagactaagatggttatcaagaagggcctggagttcaaggatgggatgaacgtcttaggtctgatagggtttttcattgcttttggcatcgctatggggaagatgggagatcaggccaagctgatggtggatttcttcaacattttgaatgagattgtaatgaagttagtgatcatgatcatgtggtactctcccctgggtatcgcctgcctgatctgtggaaagatcattgcaatcaaggacttagaagtggttgctaggcaactggggatgtacatggtaacagtgatcataggcctcatcatccacgggggcatctttctccccttgatttactttgtagtgaccaggaaaaaccccttctccttttttgctggcattttccaagcttggatcactgccctgggcaccgcttccagtgctggaactttgcctgtcacctttcgttgcctggaagaaaatctggggattgataagcgtgtgactagattcgtccttcctgttggagcaaccattaacatggatggtacagccctttatgaagcggtagccgccatctttatagcccaaatgaatggtgttgtcctggatggaggacagattgtgactgtaagcctcacagccaccctggcaagcgtcggcgcggccagtatccccagtgccgggctggtcaccatgctcctcattctgacagccgtgggcctgccaacagaggacatcagcctgctggtggctgtggactggctgctggacaggatgagaacttcagtcaatgttgtgggtgactcttttggggctgggatagtctatcacctctccaagtctgagctggataccattgactcccagcatcgagtgcatgaagatattgaaatgaccaagactcaatccatttatgatgacatgaagaaccacagggaaagcaactctaatcaatgtgtctatgctgcacacaactctgtcatagtagatgaatgcaaggtaactctggcagccaatggaaagtcagccgactgcagtgttgaggaagaaccttggaaacgtgagaaataaggatatgagtctcagcaaattcttgaataaactccccagcgtatcctatggtaactgatgatataaacaagctttctttaaaaaggaaaaaaatgcgtatatttctatgtttacttaatctgttagccgaggcttagaggagctcttgtgagtcagtgatgacaggcacggtgctgtgtctttgccaaataatgctttataaccgtctaattttctcacttgtattattatttgaatggatgctgctggaggaatcagttggaattgaagacacgttcttgccagcttcccttttctcccaagatgcagaaatgtggatgctcttttcccaggggacatgagtaaagcagtgtggtacactccagggacttgggaaaatgagcaaacacacagcgtgttattccttaaagtgttctccatgtctcgccttgttatgcacaagagattctattaaaagcctctagaagtaactccccttaaaatgtctagtaaagcttgcacatggattgattaaaagcaaatacctgtcttagggaattctgacaatttatcttccatatgctctttaagtaaaatgtttcaaagacagttttaaagggagccatgctcttaaaggcagttgattaaagaacctgttacatctctgccttaccctgtgtaatctgtgagaacaatggttgaaatttcaaagtatgtttcattattctttctaaatttgataattgattaggaagtattttatatataaccactgtagatattgacaaaagtaagagagcacagtcaacataaagtttaaccagagttaaatattcaaatttatttatgttcggtttgccttcacctggtgtagtaaaatcaaatgagattatttggtatgtgttttgctttgtttaacccaaaagattattttttggttcctaaagaaaaagatatttttaatctgtcaattatttcagtcatcatctcatcgtcctagaaagcctggtcattttactgtcctcacacatggaagacacttgtgttggctgtgcctcttttaatgtcatctcttgatgaaacaaaaatactggtatttatccaatatgttgaaagcgttttgttatcttctatcaaagcacataaaaccagttataggacacagttggaagcagagccagtcttcctcctcagtcttctcagtagaaaggaacagaaaacaaacatctgtgcaaaaccctataaaagtgatattcctatggcagagtccaggcagccttgaacaatgacatggcaacaaaggatggctctgtacaacttcacagatggaatcttgtttaaggctgtgaagttttaaggaataaataatataattggtgtagcacagtgccttgcatgcagtaggcagccaacaaatccttaatgattggtaatgcaagctaaaatttttaatgtctctactatccttttttattgaataacgcacagtattttcctaaggttgctgggtttgggagtaagcttgggacttgaatcattgagaaataaagcacatttgactctaagaagtatgtagaaccttgtttataggtgagaataggctgtattatatgaaaccagcggagggatgctgagacagtcatggtttatagaatccaaattctctgagatgagggtgcttatggacctcaaatagcctttcttatctgctccttgtgacttctctcttttaaatcagatacctttgaaacatacaagagacatgagattccagttgtttttgtctcctaaaccctagtgatttttggataaggatcactactgaacagtattaggcaacttttcatttttgcttttcaaatgacattggtctttatttccagtagatgggcagtaaacagggtcagggtggtcaagggatatgattaagtgtagtagtagaaaatgcattctttttttttttttttttttagacagagtcttgctctgttgctcaggctggagtacagtggcacgatctcagctcactgcactgcaatgtccacctctctagttcaagcgattctcctgtctcagcctcccgagtagctgggactacaggcacatgccaccatgcctggctaattttttgtatttttagtacagatgggtttcattatgttagccaggatggtctcgatctcctgacctcatgatccacccgccatggcctcccaaagtgctgggattacaggcgtgagccaccgtgcccggccagaaaatacattctttacagcaaatgttataggttaaggagacagttcctgggtttagctgtgaaactgtttaggattttctttaagtggtgttcccaagagcttttttctggtaagttggaggctataggcaaagcgtctaggagcttgttgttttttgctatggaaggccagctttgggatctatatacatgggcatgtttctcaatggagtggtcacaggattctcttctcagaactctgcctgaaacctttccggtgtgttttgtcttcaactttttcctagctatcctattagcctgtaaatatgtcagcagacaatgtgtttggaagaaacaaggtgtacaacttcacaaagcaagttttttctggtctgagacttactgtgtgcaggaagtctcgtgagaatatacttagaaaatcacacttatctggaaattcaataagtcatattaaaaatatacaatttcttgaactcaggactagcctgaaaatccaaaatgcatgtagagttgacatgttgacatatgtctatgtcctctgtttttatttaagcctcatttatttctcccttgccatgcccatttgggattttctttgcccagcatatgtgccataaacagaacaaatggatccagggtatacctctaataacctttatctaaatagaatacatttaacctgtcaattatatgtatagatttatcctaattggttcaacatatatatgaatgcttgtaatagtctgttactatttgataatgcataaatgttatatttatatacagttacagcaggccagaaacatacatacactgcatcctgtaaggtctgtaaatcagggcttcggcaatgccattttgctatagactcattcatgttttttaggaatcagaatcatttcaggagaaaaccaactaagtagactttaattcttctctttctcattcttgccctttgagaaacccaagtggaatcatcacttaattacttactcaaattcaatgaatcaaatccaatccaatcagtgagaagaatagcttatctttcaaggtaatactttaccttagatctttgagggcatgcttcccatacaaagagcatcagaaaatcagggcaatcatctagatctcacagatcttcaacataggactctaggttatgagagctgaaccacatagctatcagtttcagtttttacttcctattgagtgtgtagaaacacagcctatggttttgctgtctgcggaagttaccataccctgtaaaagacaaatatttctttctcctctcgaaccactagtcagcctggatattcatgaaagctgaaagaaggggtgccaaaatgcctagctcctggatttagactcatggaatatgagaaaggcttagggaaaattcaagtcatggggagattcctgctaggtgatgccaggaatctcaatgacctgttgattagagggtctctggtcatttccacttgtgtgtggagaaatacatcatttgcatatgtatctagtcaagaagcccttttggagcaaagtggttgggaaactcatttactgggtccaccaaaggaaacccaattctgccatgtttttgcaaatactacacgtccctttgctctcaatagcaaaagtgatgttatagttttttttacttttgtcagaatcaaggcttcggccacctgtgcaatattttcccatggaatgcagcagtaaatccaagtaggtatatccgtgctcagagagaattctccatagttctgactcctgaaaaacaagtctcattagctctcatctagtttgatgactaaaagtgcacagcagttataccccagtggaagtgatttttctcacctagctgctctctaactcttacggctatctagttgtctgagctgctggtttgttttacttattctccaactgaactcattccaaaccaagaaaaaggaccaaatgaaattttcagttattatcatacttgctccttgaataagaatgctagagtctggaggcagaagaagactaagttaaaaaaaaaacagcctgaaggaattctggagtgagttttgtaagtctaattgtcaaagaagataaatggtctcagtatctgtagtaatttctggttaagcctagagggatcactgagtgccaatccaagcaggtggcactagaggcagattgttctcctagcatagagtgagtttccagctgctcatgacacattttcttatgattttccctaaaagaaaaccaaattttctactccacctcttcctttcctatcattccacttattgttgctgctttgctaacagccagcttagtaagccatcacacaagttagtgtgaggcttggttttaaaatagataacagagaatcttgattaaatagtatccaactttgtagcataacacagctaattcaggcaatgacatagagatgataagaaacaacatggtttggtagagggaacatttgatttagactctgcccatttttagctgtatgacttacataagtcattttgtgtccaagcctcattttctcccatatgaaaagtgaaggggttggattaaatgactaaaatccccttccagccctatgagcccaatgtattatgatctctgctttgtttccttcttaagaggcttcctactataaaatgtgacctatttacattttaagttgaagtagcccacaataatgaataatcaatttagatttttctcatctcctttgggagaaattaaattcaagcctctattcatttgatgttttacaacaagcttcaaagttggccatgttcattcacagtttgatattttgagacaccaataaaagttttttaataaaagttcccttgacttaaactcaccttcctaatagaagtagtgatttggctcacggaaaaatgtttccagagtcaacatgagaggactggatgaacctacagcctcactcaagctgttgcatcattgctgctgtagcaacagagccctctctgaatacccaaaacacacaattttctccaacaattctaattgcccacccagtatgggaatttgagagcctttggtgaataaccttgatcactcttttgaaatttggtacaacacttgcacaatcacggcaactgtttgtaaatatcttttcttctccgccagtatgtagacatgcacacccattcacaagtaagcccgcaaattcattttcacattttcctcttggtttgtttttatcatgggtatcacattgcaggaagagatgctctaacttacaagaatggaattttctgactatcattgccctcttcaaggcctgattagtttgtagggtggatgggatacaatgcatggtctacaaggtccatgtcaccagccatgatctttaaacaacctcttgcactttctggcactgctgcaatggcccatggtggacacctctgctgtttgtccaaacttctgctaaatagagtagtgttggtatttgttgtgttgtgaactcctttgttgtcagagaagacttcagctcttcaggtttgcaagggcaagatgtaaagctaggactgaaaggattgggttttgtttttcggccggcttttttccattagtgcaaaaaacctgatgcaagggcagcaagataaacacaatttcttcattgacccagataagaacctgtagaaaagtgagagatgcccctaagttcctatttcatttatcctaaataatatcctgaataactactgatcagtttttttctatgtccagccttgcttcactttccaacctccaggccaaatattcattttgatattttacaaaatccttctggtttttacacagggcccttttgtgctgagaataaaaccagctattggaacagacctcactgctttgtagagtcagaagttgacctagagaatgggtagcaacaggtcctcagtttctctggagacacccccaatccttgggtgagtgttgaaacctgacaactgactgttagccttgtcatcatcctcactggagatggagatgttgcagtcggagcctcactccttctggggcactgtttcttctcatggcaaccattttgcctgcctggaaacagcctgttgcctttgctagggggcaaatacacacactagccaaggaagttggtccagcacatctctgaggtttctcccccatggacccatggagcgaattccctgagataaatgatcagaaagttggctgtctggtggtttaatactccataagagttacttcccttatagaaagtcatcctttggcatctagatttttctacaaatcaccttaactccctccctttctctttctcctggaaaacctcagcattgcatctccatgttgcacaacacagatcagattatctggtcactatagagatttgtatataaaaaaactacttttttgaggattttgtatattgtttttctatttgttttctacagcttgaggaaagagctggcaaactgtgaatctaacttgatcttgttgccagcagatatattttggcttcctggtaagagtctgtgttaccagggacaatatattgccctctgatcagtattgcaccctaaatccacaaattcctccagcccagtcttacatttttttaaacaaatcccctagcttgtttgctattatttataaagagcattagaaaatgtatttatagacctggatgttatatgtttaatattaatttagcctttaataatgttataggtttgtaactattcttcagaaattataaagaactcagtgtagactgaattaatctatttagtatctgtaattttgcagacatattttcttacagtattttctatgtaaccacacatgtagaattataactaattagagcacaagaagtttcttcagcaatttagagctaccaattgtttcttgactatatagtcacatttgacaaatttaagaacccagtctttagtgatgcaataaacaaaatgaaccattaagaacaaggaattgcttaaatcccttagctggtgaggatatacatctaaataattcatctttctaactcaaggaatggtgctgattttttaaatgtttgacaccaggccttgtttttccagctgagcattctcattttgcttttctctaagactatcaaagacaaggtattaatagtaggattattcctagatcagaatgtttcatacattcctaaaggtttatgtggaaattggcttaggaaaactttgagtagcagagactgaggatgagtgctagagatgaaatcaggacagatttgttgcagttaattcttgccaagcaaattagtggtaaatgtcacattgttatgtgaattgagcacatatttttaaagaaagtttacaaaaaatttttagaaccaactatgaggcaatactgtatcactgggggctgggagtgggggcttagaatcatactgaaattgtttaaaagcagcccaggtagtttctgtcctcaggtgaataacagactatataacttccccgaaaggtaaaacgatagccactgcagagacgaggtgtcttccttccaccaaatactttctgagatggtggtaggagtagtatttttaccgtggtttaaaaagtagtcagttacatagaaagtgtattggtatgtatttgaacctgctcttcattaaacaaacagattagatgtaccctcgactggcaataattgtatctattttcaagtacagctagctgtcaaagcatgaagctcttgtgtatacacactgacacttggttcacgcatgaagaacagtgcctatgcactttgtgtagctataatgtaggtatctaggtgtaatttcagtgaaatggtgtatagatgtattgtaatttaaatgtatatgttatttttggctattcatctaaatgcagtagacatgttgatcggtgttttgcaaacatttctttttccttcttagataactagtcgtgaatcatttctcctctttctcagtgtggcttgggaatatatatgagtgaagaatttatctgtgaatcctttgtactgatgattgtttgaaagtctgtgtgtgtccagcacctttgtaaatacacaattcagagcagggatgggctgggtgtgtgtcctggttcttagtgaaaggtcatctcatgtctgtttaatacatggtgaatgcaactgtggaacttttgattacctagacttaggtaggtttagaatgagaacatccatctacagtcctcctttgcttggtggattgggctcagaggaacaaaaagttagtctgactctgtgcatattagcatcatgtctttagagaaaggtcagcctctctggttgccaaatactcatcatgatgctcatgacttaaaggttctgaggagccttgtctcccttggatttttgagtcagggtacaggaaaaaacattgctgactaactaactgcaaatgcatctgcaggtgaaaccctacgaaagcacagttctggctataaacttcagagttctctgtaaaaaacttagagcactagaagcacaggaatagtgagtgtacagcttatgcggttgtagaggggcaactgatgaacacaggtcccacatatatgagggagtatgacgttctctacctaatatgttctgtgtgcatgttttgaatgattgaagatgggattaactaatgcaagtttacagttgcctcctaaaacacacattctgtataattatcgctaaatacaatgctgtgaggtctatagttcctgtaacccctttctcctccccaaggacagagaagaactagccatgtgctatagggaaccctgagtgccctactcttttcccaagaagggtaaagcctacaatatcatcagggggcatgaagcacattaatttgcagtggctgcttcatatgaggagatatggtggacaggctaatttttccttgaaaatgtggcttcttcaactcctttcaaatttaggatggaatacttcctgaaataaaactgggctttatgcaggattctctttgaaaattcttgtatgtccagaacaaaagataaaactaattgtattcctcacattcacaatccccattggtctgaagtcacgtagcacagagcatctatagcacatagtgtttaaagactaatgaatgcaaaaagataaaatcttcaactaatttttgaattgtttctcatatatgctactagaaaatgccttgttgatgaagcacattttgggtagttgaggtcttttgttttcgcctttagctttctaagctttcttacaatgtggactgattactgtaacatttcacgtgtaaaataactggatattctttatatactggaaataacctgtgaatccaatatttcactaagtgttttaacttttgtgtatatatctctcatcaataaatgtggatttcaattt

SEQ ID NO: 182723 - DNA, 11538 bp, Homo sapiens
  Payload ID: 16005
  Gene Symbol: SLC1A2
  Gene Name: solute carrier family 1 (glial high affinity glutamate transporter), member 2
  Uniprot ID: P43004
  ENST ID: ENST00000395750
  CDS Start-End: 172-1869
cgactccgctggacctgggacccccagacgtgggaggatgggggtgacctagtgtcttccagtagggcaatctctggacatctttatctccccagtacctctccagatcctgaagcctggggccagggaggagaggttagatgtcagcagtggaaggacagtgccaacaatatgcccaagcaggtggaagtgcgaatgcacgacagtcatcttggctcagaggaacccaagcaccggcacctgggcctgcgcctgtgtgacaagctggggaagaatctgctgctcaccctgacggtgtttggtgtcatcctgggagcagtgtgtggagggcttcttcgcttggcatctcccatccaccctgatgtggttatgttaatagccttcccaggggatatactcatgaggatgctaaaaatgctcattctccctctaatcatctccagcttaatcacagggttgtcaggcctggatgctaaggctagtggccgcttgggcacgagagccatggtgtattacatgtccacgaccatcattgctgcagtactgggggtcattctggtcttggctatccatccaggcaatcccaagctcaagaagcagctggggcctgggaagaagaatgatgaagtgtccagcctggatgccttcctggaccttattcgaaatctcttccctgaaaaccttgtccaagcctgctttcaacagattcaaacagtgacgaagaaagtcctggttgcaccaccgccggacgaggaggccaacgcaaccagcgctgttgtctctctgttgaacgagactgtgactgaggtgccggaggagactaagatggttatcaagaagggcctggagttcaaggatgggatgaacgtcttaggtctgatagggtttttcattgcttttggcatcgctatggggaagatgggagatcaggccaagctgatggtggatttcttcaacattttgaatgagattgtaatgaagttagtgatcatgatcatgtggtactctcccctgggtatcgcctgcctgatctgtggaaagatcattgcaatcaaggacttagaagtggttgctaggcaactggggatgtacatggtaacagtgatcataggcctcatcatccacgggggcatctttctccccttgatttactttgtagtgaccaggaaaaaccccttctccttttttgctggcattttccaagcttggatcactgccctgggcaccgcttccagtgctggaactttgcctgtcacctttcgttgcctggaagaaaatctggggattgataagcgtgtgactagattcgtccttcctgttggagcaaccattaacatggatggtacagccctttatgaagcggtagccgccatctttatagcccaaatgaatggtgttgtcctggatggaggacagattgtgactgtaagcctcacagccaccctggcaagcgtcggcgcggccagtatccccagtgccgggctggtcaccatgctcctcattctgacagccgtgggcctgccaacagaggacatcagcctgctggtggctgtggactggctgctggacaggatgagaacttcagtcaatgttgtgggtgactcttttggggctgggatagtctatcacctctccaagtctgagctggataccattgactcccagcatcgagtgcatgaagatattgaaatgaccaagactcaatccatttatgatgacatgaagaaccacagggaaagcaactctaatcaatgtgtctatgctgcacacaactctgtcatagtagatgaatgcaaggtaactctggcagccaatggaaagtcagccgactgcagtgttgaggaagaaccttggaaacgtgagaaataaggatatgagtctcagcaaattcttgaataaactccccagcgtatcctatggtaactgatgatataaacaagctttctttaaaaaggaaaaaaatgcgtatatttctatgtttacttaatctgttagccgaggcttagaggagctcttgtgagtcagtgatgacaggcacggtgctgtgtctttgccaaataatgctttataaccgtctaattttctcacttgtattattatttgaatggatgctgctggaggaatcagttggaattgaagacacgttcttgccagcttcccttttctcccaagatgcagaaatgtggatgctcttttcccaggggacatgagtaaagcagtgtggtacactccagggacttgggaaaatgagcaaacacacagcgtgttattccttaaagtgttctccatgtctcgccttgttatgcacaagagattctattaaaagcctctagaagtaactccccttaaaatgtctagtaaagcttgcacatggattgattaaaagcaaatacctgtcttagggaattctgacaatttatcttccatatgctctttaagtaaaatgtttcaaagacagttttaaagggagccatgctcttaaaggcagttgattaaagaacctgttacatctctgccttaccctgtgtaatctgtgagaacaatggttgaaatttcaaagtatgtttcattattctttctaaatttgataattgattaggaagtattttatatataaccactgtagatattgacaaaagtaagagagcacagtcaacataaagtttaaccagagttaaatattcaaatttatttatgttcggtttgccttcacctggtgtagtaaaatcaaatgagattatttggtatgtgttttgctttgtttaacccaaaagattattttttggttcctaaagaaaaagatatttttaatctgtcaattatttcagtcatcatctcatcgtcctagaaagcctggtcattttactgtcctcacacatggaagacacttgtgttggctgtgcctcttttaatgtcatctcttgatgaaacaaaaatactggtatttatccaatatgttgaaagcgttttgttatcttctatcaaagcacataaaaccagttataggacacagttggaagcagagccagtcttcctcctcagtcttctcagtagaaaggaacagaaaacaaacatctgtgcaaaaccctataaaagtgatattcctatggcagagtccaggcagccttgaacaatgacatggcaacaaaggatggctctgtacaacttcacagatggaatcttgtttaaggctgtgaagttttaaggaataaataatataattggtgtagcacagtgccttgcatgcagtaggcagccaacaaatccttaatgattggtaatgcaagctaaaatttttaatgtctctactatccttttttattgaataacgcacagtattttcctaaggttgctgggtttgggagtaagcttgggacttgaatcattgagaaataaagcacatttgactctaagaagtatgtagaaccttgtttataggtgagaataggctgtattatatgaaaccagcggagggatgctgagacagtcatggtttatagaatccaaattctctgagatgagggtgcttatggacctcaaatagcctttcttatctgctccttgtgacttctctcttttaaatcagatacctttgaaacatacaagagacatgagattccagttgtttttgtctcctaaaccctagtgatttttggataaggatcactactgaacagtattaggcaacttttcatttttgcttttcaaatgacattggtctttatttccagtagatgggcagtaaacagggtcagggtggtcaagggatatgattaagtgtagtagtagaaaatgcattctttttttttttttttttttagacagagtcttgctctgttgctcaggctggagtacagtggcacgatctcagctcactgcactgcaatgtccacctctctagttcaagcgattctcctgtctcagcctcccgagtagctgggactacaggcacatgccaccatgcctggctaattttttgtatttttagtacagatgggtttcattatgttagccaggatggtctcgatctcctgacctcatgatccacccgccatggcctcccaaagtgctgggattacaggcgtgagccaccgtgcccggccagaaaatacattctttacagcaaatgttataggttaaggagacagttcctgggtttagctgtgaaactgtttaggattttctttaagtggtgttcccaagagcttttttctggtaagttggaggctataggcaaagcgtctaggagcttgttgttttttgctatggaaggccagctttgggatctatatacatgggcatgtttctcaatggagtggtcacaggattctcttctcagaactctgcctgaaacctttccggtgtgttttgtcttcaactttttcctagctatcctattagcctgtaaatatgtcagcagacaatgtgtttggaagaaacaaggtgtacaacttcacaaagcaagttttttctggtctgagacttactgtgtgcaggaagtctcgtgagaatatacttagaaaatcacacttatctggaaattcaataagtcatattaaaaatatacaatttcttgaactcaggactagcctgaaaatccaaaatgcatgtagagttgacatgttgacatatgtctatgtcctctgtttttatttaagcctcatttatttctcccttgccatgcccatttgggattttctttgcccagcatatgtgccataaacagaacaaatggatccagggtatacctctaataacctttatctaaatagaatacatttaacctgtcaattatatgtatagatttatcctaattggttcaacatatatatgaatgcttgtaatagtctgttactatttgataatgcataaatgttatatttatatacagttacagcaggccagaaacatacatacactgcatcctgtaaggtctgtaaatcagggcttcggcaatgccattttgctatagactcattcatgttttttaggaatcagaatcatttcaggagaaaaccaactaagtagactttaattcttctctttctcattcttgccctttgagaaacccaagtggaatcatcacttaattacttactcaaattcaatgaatcaaatccaatccaatcagtgagaagaatagcttatctttcaaggtaatactttaccttagatctttgagggcatgcttcccatacaaagagcatcagaaaatcagggcaatcatctagatctcacagatcttcaacataggactctaggttatgagagctgaaccacatagctatcagtttcagtttttacttcctattgagtgtgtagaaacacagcctatggttttgctgtctgcggaagttaccataccctgtaaaagacaaatatttctttctcctctcgaaccactagtcagcctggatattcatgaaagctgaaagaaggggtgccaaaatgcctagctcctggatttagactcatggaatatgagaaaggcttagggaaaattcaagtcatggggagattcctgctaggtgatgccaggaatctcaatgacctgttgattagagggtctctggtcatttccacttgtgtgtggagaaatacatcatttgcatatgtatctagtcaagaagcccttttggagcaaagtggttgggaaactcatttactgggtccaccaaaggaaacccaattctgccatgtttttgcaaatactacacgtccctttgctctcaatagcaaaagtgatgttatagttttttttacttttgtcagaatcaaggcttcggccacctgtgcaatattttcccatggaatgcagcagtaaatccaagtaggtatatccgtgctcagagagaattctccatagttctgactcctgaaaaacaagtctcattagctctcatctagtttgatgactaaaagtgcacagcagttataccccagtggaagtgatttttctcacctagctgctctctaactcttacggctatctagttgtctgagctgctggtttgttttacttattctccaactgaactcattccaaaccaagaaaaaggaccaaatgaaattttcagttattatcatacttgctccttgaataagaatgctagagtctggaggcagaagaagactaagttaaaaaaaaaacagcctgaaggaattctggagtgagttttgtaagtctaattgtcaaagaagataaatggtctcagtatctgtagtaatttctggttaagcctagagggatcactgagtgccaatccaagcaggtggcactagaggcagattgttctcctagcatagagtgagtttccagctgctcatgacacattttcttatgattttccctaaaagaaaaccaaattttctactccacctcttcctttcctatcattccacttattgttgctgctttgctaacagccagcttagtaagccatcacacaagttagtgtgaggcttggttttaaaatagataacagagaatcttgattaaatagtatccaactttgtagcataacacagctaattcaggcaatgacatagagatgataagaaacaacatggtttggtagagggaacatttgatttagactctgcccatttttagctgtatgacttacataagtcattttgtgtccaagcctcattttctcccatatgaaaagtgaaggggttggattaaatgactaaaatccccttccagccctatgagcccaatgtattatgatctctgctttgtttccttcttaagaggcttcctactataaaatgtgacctatttacattttaagttgaagtagcccacaataatgaataatcaatttagatttttctcatctcctttgggagaaattaaattcaagcctctattcatttgatgttttacaacaagcttcaaagttggccatgttcattcacagtttgatattttgagacaccaataaaagttttttaataaaagttcccttgacttaaactcaccttcctaatagaagtagtgatttggctcacggaaaaatgtttccagagtcaacatgagaggactggatgaacctacagcctcactcaagctgttgcatcattgctgctgtagcaacagagccctctctgaatacccaaaacacacaattttctccaacaattctaattgcccacccagtatgggaatttgagagcctttggtgaataaccttgatcactcttttgaaatttggtacaacacttgcacaatcacggcaactgtttgtaaatatcttttcttctccgccagtatgtagacatgcacacccattcacaagtaagcccgcaaattcattttcacattttcctcttggtttgtttttatcatgggtatcacattgcaggaagagatgctctaacttacaagaatggaattttctgactatcattgccctcttcaaggcctgattagtttgtagggtggatgggatacaatgcatggtctacaaggtccatgtcaccagccatgatctttaaacaacctcttgcactttctggcactgctgcaatggcccatggtggacacctctgctgtttgtccaaacttctgctaaatagagtagtgttggtatttgttgtgttgtgaactcctttgttgtcagagaagacttcagctcttcaggtttgcaagggcaagatgtaaagctaggactgaaaggattgggttttgtttttcggccggcttttttccattagtgcaaaaaacctgatgcaagggcagcaagataaacacaatttcttcattgacccagataagaacctgtagaaaagtgagagatgcccctaagttcctatttcatttatcctaaataatatcctgaataactactgatcagtttttttctatgtccagccttgcttcactttccaacctccaggccaaatattcattttgatattttacaaaatccttctggtttttacacagggcccttttgtgctgagaataaaaccagctattggaacagacctcactgctttgtagagtcagaagttgacctagagaatgggtagcaacaggtcctcagtttctctggagacacccccaatccttgggtgagtgttgaaacctgacaactgactgttagccttgtcatcatcctcactggagatggagatgttgcagtcggagcctcactccttctggggcactgtttcttctcatggcaaccattttgcctgcctggaaacagcctgttgcctttgctagggggcaaatacacacactagccaaggaagttggtccagcacatctctgaggtttctcccccatggacccatggagcgaattccctgagataaatgatcagaaagttggctgtctggtggtttaatactccataagagttacttcccttatagaaagtcatcctttggcatctagatttttctacaaatcaccttaactccctccctttctctttctcctggaaaacctcagcattgcatctccatgttgcacaacacagatcagattatctggtcactatagagatttgtatataaaaaaactacttttttgaggattttgtatattgtttttctatttgttttctacagcttgaggaaagagctggcaaactgtgaatctaacttgatcttgttgccagcagatatattttggcttcctggtaagagtctgtgttaccagggacaatatattgccctctgatcagtattgcaccctaaatccacaaattcctccagcccagtcttacatttttttaaacaaatcccctagcttgtttgctattatttataaagagcattagaaaatgtatttatagacctggatgttatatgtttaatattaatttagcctttaataatgttataggtttgtaactattcttcagaaattataaagaactcagtgtagactgaattaatctatttagtatctgtaattttgcagacatattttcttacagtattttctatgtaaccacacatgtagaattataactaattagagcacaagaagtttcttcagcaatttagagctaccaattgtttcttgactatatagtcacatttgacaaatttaagaacccagtctttagtgatgcaataaacaaaatgaaccattaagaacaaggaattgcttaaatcccttagctggtgaggatatacatctaaataattcatctttctaactcaaggaatggtgctgattttttaaatgtttgacaccaggccttgtttttccagctgagcattctcattttgcttttctctaagactatcaaagacaaggtattaatagtaggattattcctagatcagaatgtttcatacattcctaaaggtttatgtggaaattggcttaggaaaactttgagtagcagagactgaggatgagtgctagagatgaaatcaggacagatttgttgcagttaattcttgccaagcaaattagtggtaaatgtcacattgttatgtgaattgagcacatatttttaaagaaagtttacaaaaaatttttagaaccaactatgaggcaatactgtatcactgggggctgggagtgggggcttagaatcatactgaaattgtttaaaagcagcccaggtagtttctgtcctcaggtgaataacagactatataacttccccgaaaggtaaaacgatagccactgcagagacgaggtgtcttccttccaccaaatactttctgagatggtggtaggagtagtatttttaccgtggtttaaaaagtagtcagttacatagaaagtgtattggtatgtatttgaacctgctcttcattaaacaaacagattagatgtaccctcgactggcaataattgtatctattttcaagtacagctagctgtcaaagcatgaagctcttgtgtatacacactgacacttggttcacgcatgaagaacagtgcctatgcactttgtgtagctataatgtaggtatctaggtgtaatttcagtgaaatggtgtatagatgtattgtaatttaaatgtatatgttatttttggctattcatctaaatgcagtagacatgttgatcggtgttttgcaaacatttctttttccttcttagataactagtcgtgaatcatttctcctctttctcagtgtggcttgggaatatatatgagtgaagaatttatctgtgaatcctttgtactgatgattgtttgaaagtctgtgtgtgtccagcacctttgtaaatacacaattcagagcagggatgggctgggtgtgtgtcctggttcttagtgaaaggtcatctcatgtctgtttaatacatggtgaatgcaactgtggaacttttgattacctagacttaggtaggtttagaatgagaacatccatctacagtcctcctttgcttggtggattgggctcagaggaacaaaaagttagtctgactctgtgcatattagcatcatgtctttagagaaaggtcagcctctctggttgccaaatactcatcatgatgctcatgacttaaaggttctgaggagccttgtctcccttggatttttgagtcagggtacaggaaaaaacattgctgactaactaactgcaaatgcatctgcaggtgaaaccctacgaaagcacagttctggctataaacttcagagttctctgtaaaaaacttagagcactagaagcacaggaatagtgagtgtacagcttatgcggttgtagaggggcaactgatgaacacaggtcccacatatatgagggagtatgacgttctctacctaatatgttctgtgtgcatgttttgaatgattgaagatgggattaactaatgcaagtttacagttgcctcctaaaacacacattctgtataattatcgctaaatacaatgctgtgaggtctatagttcctgtaacccctttctcctccccaaggacagagaagaactagccatgtgctatagggaaccctgagtgccctactcttttcccaagaagggtaaagcctacaatatcatcagggggcatgaagcacattaatttgcagtggctgcttcatatgaggagatatggtggacaggctaatttttccttgaaaatgtggcttcttcaactcctttcaaatttaggatggaatacttcctgaaataaaactgggctttatgcaggattctctttgaaaattcttgtatgtccagaacaaaagataaaactaattgtattcctcacattcacaatccccattggtctgaagtcacgtagcacagagcatctatagcacatagtgtttaaagactaatgaatgcaaaaagataaaatcttcaactaatttttgaattgtttctcatatatgctactagaaaatgccttgttgatgaagcacattttgggtagttgaggtcttttgttttcgcctttagctttctaagctttcttacaatgtggactgattactgtaacatttcacgtgtaaaataactggatattctttatatactggaaataacctgtgaatccaatatttcactaagtgttttaacttttgtgtatatatctctcatcaa

SEQ ID NO: 182724 - DNA, 11689 bp, Homo sapiens
  Payload ID: 16005
  Gene Symbol: SLC1A2
  Gene Name: solute carrier family 1 (glial high affinity glutamate transporter), member 2
  Uniprot ID: P43004
  ENST ID: ENST00000395753
  CDS Start-End: 323-2020
aggccagagatttattcgagcttcggcgggggagggagcgcagctgggccgcgtttaggctgcaccacccgcgtgtttcagccgctcgactccgctggacctgggacccccagacgtgggaggatggggtgggtgtgcctgcctgtgagtttgggggtgctggaccaaagtgaacacagatgagtcaactccacccattgtctctgcaagaaaacagctcaaaactcaccccatgaatgagagaggaagatgccaccctttgggactgtctgtaccctggcagaaatggaatgatttatccaaataagcaagtgccaacaatatgcccaagcaggtggaagtgcgaatgcacgacagtcatcttggctcagaggaacccaagcaccggcacctgggcctgcgcctgtgtgacaagctggggaagaatctgctgctcaccctgacggtgtttggtgtcatcctgggagcagtgtgtggagggcttcttcgcttggcatctcccatccaccctgatgtggttatgttaatagccttcccaggggatatactcatgaggatgctaaaaatgctcattctccctctaatcatctccagcttaatcacagggttgtcaggcctggatgctaaggctagtggccgcttgggcacgagagccatggtgtattacatgtccacgaccatcattgctgcagtactgggggtcattctggtcttggctatccatccaggcaatcccaagctcaagaagcagctggggcctgggaagaagaatgatgaagtgtccagcctggatgccttcctggaccttattcgaaatctcttccctgaaaaccttgtccaagcctgctttcaacagattcaaacagtgacgaagaaagtcctggttgcaccaccgccggacgaggaggccaacgcaaccagcgctgttgtctctctgttgaacgagactgtgactgaggtgccggaggagactaagatggttatcaagaagggcctggagttcaaggatgggatgaacgtcttaggtctgatagggtttttcattgcttttggcatcgctatggggaagatgggagatcaggccaagctgatggtggatttcttcaacattttgaatgagattgtaatgaagttagtgatcatgatcatgtggtactctcccctgggtatcgcctgcctgatctgtggaaagatcattgcaatcaaggacttagaagtggttgctaggcaactggggatgtacatggtaacagtgatcataggcctcatcatccacgggggcatctttctccccttgatttactttgtagtgaccaggaaaaaccccttctccttttttgctggcattttccaagcttggatcactgccctgggcaccgcttccagtgctggaactttgcctgtcacctttcgttgcctggaagaaaatctggggattgataagcgtgtgactagattcgtccttcctgttggagcaaccattaacatggatggtacagccctttatgaagcggtagccgccatctttatagcccaaatgaatggtgttgtcctggatggaggacagattgtgactgtaagcctcacagccaccctggcaagcgtcggcgcggccagtatccccagtgccgggctggtcaccatgctcctcattctgacagccgtgggcctgccaacagaggacatcagcctgctggtggctgtggactggctgctggacaggatgagaacttcagtcaatgttgtgggtgactcttttggggctgggatagtctatcacctctccaagtctgagctggataccattgactcccagcatcgagtgcatgaagatattgaaatgaccaagactcaatccatttatgatgacatgaagaaccacagggaaagcaactctaatcaatgtgtctatgctgcacacaactctgtcatagtagatgaatgcaaggtaactctggcagccaatggaaagtcagccgactgcagtgttgaggaagaaccttggaaacgtgagaaataaggatatgagtctcagcaaattcttgaataaactccccagcgtatcctatggtaactgatgatataaacaagctttctttaaaaaggaaaaaaatgcgtatatttctatgtttacttaatctgttagccgaggcttagaggagctcttgtgagtcagtgatgacaggcacggtgctgtgtctttgccaaataatgctttataaccgtctaattttctcacttgtattattatttgaatggatgctgctggaggaatcagttggaattgaagacacgttcttgccagcttcccttttctcccaagatgcagaaatgtggatgctcttttcccaggggacatgagtaaagcagtgtggtacactccagggacttgggaaaatgagcaaacacacagcgtgttattccttaaagtgttctccatgtctcgccttgttatgcacaagagattctattaaaagcctctagaagtaactccccttaaaatgtctagtaaagcttgcacatggattgattaaaagcaaatacctgtcttagggaattctgacaatttatcttccatatgctctttaagtaaaatgtttcaaagacagttttaaagggagccatgctcttaaaggcagttgattaaagaacctgttacatctctgccttaccctgtgtaatctgtgagaacaatggttgaaatttcaaagtatgtttcattattctttctaaatttgataattgattaggaagtattttatatataaccactgtagatattgacaaaagtaagagagcacagtcaacataaagtttaaccagagttaaatattcaaatttatttatgttcggtttgccttcacctggtgtagtaaaatcaaatgagattatttggtatgtgttttgctttgtttaacccaaaagattattttttggttcctaaagaaaaagatatttttaatctgtcaattatttcagtcatcatctcatcgtcctagaaagcctggtcattttactgtcctcacacatggaagacacttgtgttggctgtgcctcttttaatgtcatctcttgatgaaacaaaaatactggtatttatccaatatgttgaaagcgttttgttatcttctatcaaagcacataaaaccagttataggacacagttggaagcagagccagtcttcctcctcagtcttctcagtagaaaggaacagaaaacaaacatctgtgcaaaaccctataaaagtgatattcctatggcagagtccaggcagccttgaacaatgacatggcaacaaaggatggctctgtacaacttcacagatggaatcttgtttaaggctgtgaagttttaaggaataaataatataattggtgtagcacagtgccttgcatgcagtaggcagccaacaaatccttaatgattggtaatgcaagctaaaatttttaatgtctctactatccttttttattgaataacgcacagtattttcctaaggttgctgggtttgggagtaagcttgggacttgaatcattgagaaataaagcacatttgactctaagaagtatgtagaaccttgtttataggtgagaataggctgtattatatgaaaccagcggagggatgctgagacagtcatggtttatagaatccaaattctctgagatgagggtgcttatggacctcaaatagcctttcttatctgctccttgtgacttctctcttttaaatcagatacctttgaaacatacaagagacatgagattccagttgtttttgtctcctaaaccctagtgatttttggataaggatcactactgaacagtattaggcaacttttcatttttgcttttcaaatgacattggtctttatttccagtagatgggcagtaaacagggtcagggtggtcaagggatatgattaagtgtagtagtagaaaatgcattctttttttttttttttttttagacagagtcttgctctgttgctcaggctggagtacagtggcacgatctcagctcactgcactgcaatgtccacctctctagttcaagcgattctcctgtctcagcctcccgagtagctgggactacaggcacatgccaccatgcctggctaattttttgtatttttagtacagatgggtttcattatgttagccaggatggtctcgatctcctgacctcatgatccacccgccatggcctcccaaagtgctgggattacaggcgtgagccaccgtgcccggccagaaaatacattctttacagcaaatgttataggttaaggagacagttcctgggtttagctgtgaaactgtttaggattttctttaagtggtgttcccaagagcttttttctggtaagttggaggctataggcaaagcgtctaggagcttgttgttttttgctatggaaggccagctttgggatctatatacatgggcatgtttctcaatggagtggtcacaggattctcttctcagaactctgcctgaaacctttccggtgtgttttgtcttcaactttttcctagctatcctattagcctgtaaatatgtcagcagacaatgtgtttggaagaaacaaggtgtacaacttcacaaagcaagttttttctggtctgagacttactgtgtgcaggaagtctcgtgagaatatacttagaaaatcacacttatctggaaattcaataagtcatattaaaaatatacaatttcttgaactcaggactagcctgaaaatccaaaatgcatgtagagttgacatgttgacatatgtctatgtcctctgtttttatttaagcctcatttatttctcccttgccatgcccatttgggattttctttgcccagcatatgtgccataaacagaacaaatggatccagggtatacctctaataacctttatctaaatagaatacatttaacctgtcaattatatgtatagatttatcctaattggttcaacatatatatgaatgcttgtaatagtctgttactatttgataatgcataaatgttatatttatatacagttacagcaggccagaaacatacatacactgcatcctgtaaggtctgtaaatcagggcttcggcaatgccattttgctatagactcattcatgttttttaggaatcagaatcatttcaggagaaaaccaactaagtagactttaattcttctctttctcattcttgccctttgagaaacccaagtggaatcatcacttaattacttactcaaattcaatgaatcaaatccaatccaatcagtgagaagaatagcttatctttcaaggtaatactttaccttagatctttgagggcatgcttcccatacaaagagcatcagaaaatcagggcaatcatctagatctcacagatcttcaacataggactctaggttatgagagctgaaccacatagctatcagtttcagtttttacttcctattgagtgtgtagaaacacagcctatggttttgctgtctgcggaagttaccataccctgtaaaagacaaatatttctttctcctctcgaaccactagtcagcctggatattcatgaaagctgaaagaaggggtgccaaaatgcctagctcctggatttagactcatggaatatgagaaaggcttagggaaaattcaagtcatggggagattcctgctaggtgatgccaggaatctcaatgacctgttgattagagggtctctggtcatttccacttgtgtgtggagaaatacatcatttgcatatgtatctagtcaagaagcccttttggagcaaagtggttgggaaactcatttactgggtccaccaaaggaaacccaattctgccatgtttttgcaaatactacacgtccctttgctctcaatagcaaaagtgatgttatagttttttttacttttgtcagaatcaaggcttcggccacctgtgcaatattttcccatggaatgcagcagtaaatccaagtaggtatatccgtgctcagagagaattctccatagttctgactcctgaaaaacaagtctcattagctctcatctagtttgatgactaaaagtgcacagcagttataccccagtggaagtgatttttctcacctagctgctctctaactcttacggctatctagttgtctgagctgctggtttgttttacttattctccaactgaactcattccaaaccaagaaaaaggaccaaatgaaattttcagttattatcatacttgctccttgaataagaatgctagagtctggaggcagaagaagactaagttaaaaaaaaaacagcctgaaggaattctggagtgagttttgtaagtctaattgtcaaagaagataaatggtctcagtatctgtagtaatttctggttaagcctagagggatcactgagtgccaatccaagcaggtggcactagaggcagattgttctcctagcatagagtgagtttccagctgctcatgacacattttcttatgattttccctaaaagaaaaccaaattttctactccacctcttcctttcctatcattccacttattgttgctgctttgctaacagccagcttagtaagccatcacacaagttagtgtgaggcttggttttaaaatagataacagagaatcttgattaaatagtatccaactttgtagcataacacagctaattcaggcaatgacatagagatgataagaaacaacatggtttggtagagggaacatttgatttagactctgcccatttttagctgtatgacttacataagtcattttgtgtccaagcctcattttctcccatatgaaaagtgaaggggttggattaaatgactaaaatccccttccagccctatgagcccaatgtattatgatctctgctttgtttccttcttaagaggcttcctactataaaatgtgacctatttacattttaagttgaagtagcccacaataatgaataatcaatttagatttttctcatctcctttgggagaaattaaattcaagcctctattcatttgatgttttacaacaagcttcaaagttggccatgttcattcacagtttgatattttgagacaccaataaaagttttttaataaaagttcccttgacttaaactcaccttcctaatagaagtagtgatttggctcacggaaaaatgtttccagagtcaacatgagaggactggatgaacctacagcctcactcaagctgttgcatcattgctgctgtagcaacagagccctctctgaatacccaaaacacacaattttctccaacaattctaattgcccacccagtatgggaatttgagagcctttggtgaataaccttgatcactcttttgaaatttggtacaacacttgcacaatcacggcaactgtttgtaaatatcttttcttctccgccagtatgtagacatgcacacccattcacaagtaagcccgcaaattcattttcacattttcctcttggtttgtttttatcatgggtatcacattgcaggaagagatgctctaacttacaagaatggaattttctgactatcattgccctcttcaaggcctgattagtttgtagggtggatgggatacaatgcatggtctacaaggtccatgtcaccagccatgatctttaaacaacctcttgcactttctggcactgctgcaatggcccatggtggacacctctgctgtttgtccaaacttctgctaaatagagtagtgttggtatttgttgtgttgtgaactcctttgttgtcagagaagacttcagctcttcaggtttgcaagggcaagatgtaaagctaggactgaaaggattgggttttgtttttcggccggcttttttccattagtgcaaaaaacctgatgcaagggcagcaagataaacacaatttcttcattgacccagataagaacctgtagaaaagtgagagatgcccctaagttcctatttcatttatcctaaataatatcctgaataactactgatcagtttttttctatgtccagccttgcttcactttccaacctccaggccaaatattcattttgatattttacaaaatccttctggtttttacacagggcccttttgtgctgagaataaaaccagctattggaacagacctcactgctttgtagagtcagaagttgacctagagaatgggtagcaacaggtcctcagtttctctggagacacccccaatccttgggtgagtgttgaaacctgacaactgactgttagccttgtcatcatcctcactggagatggagatgttgcagtcggagcctcactccttctggggcactgtttcttctcatggcaaccattttgcctgcctggaaacagcctgttgcctttgctagggggcaaatacacacactagccaaggaagttggtccagcacatctctgaggtttctcccccatggacccatggagcgaattccctgagataaatgatcagaaagttggctgtctggtggtttaatactccataagagttacttcccttatagaaagtcatcctttggcatctagatttttctacaaatcaccttaactccctccctttctctttctcctggaaaacctcagcattgcatctccatgttgcacaacacagatcagattatctggtcactatagagatttgtatataaaaaaactacttttttgaggattttgtatattgtttttctatttgttttctacagcttgaggaaagagctggcaaactgtgaatctaacttgatcttgttgccagcagatatattttggcttcctggtaagagtctgtgttaccagggacaatatattgccctctgatcagtattgcaccctaaatccacaaattcctccagcccagtcttacatttttttaaacaaatcccctagcttgtttgctattatttataaagagcattagaaaatgtatttatagacctggatgttatatgtttaatattaatttagcctttaataatgttataggtttgtaactattcttcagaaattataaagaactcagtgtagactgaattaatctatttagtatctgtaattttgcagacatattttcttacagtattttctatgtaaccacacatgtagaattataactaattagagcacaagaagtttcttcagcaatttagagctaccaattgtttcttgactatatagtcacatttgacaaatttaagaacccagtctttagtgatgcaataaacaaaatgaaccattaagaacaaggaattgcttaaatcccttagctggtgaggatatacatctaaataattcatctttctaactcaaggaatggtgctgattttttaaatgtttgacaccaggccttgtttttccagctgagcattctcattttgcttttctctaagactatcaaagacaaggtattaatagtaggattattcctagatcagaatgtttcatacattcctaaaggtttatgtggaaattggcttaggaaaactttgagtagcagagactgaggatgagtgctagagatgaaatcaggacagatttgttgcagttaattcttgccaagcaaattagtggtaaatgtcacattgttatgtgaattgagcacatatttttaaagaaagtttacaaaaaatttttagaaccaactatgaggcaatactgtatcactgggggctgggagtgggggcttagaatcatactgaaattgtttaaaagcagcccaggtagtttctgtcctcaggtgaataacagactatataacttccccgaaaggtaaaacgatagccactgcagagacgaggtgtcttccttccaccaaatactttctgagatggtggtaggagtagtatttttaccgtggtttaaaaagtagtcagttacatagaaagtgtattggtatgtatttgaacctgctcttcattaaacaaacagattagatgtaccctcgactggcaataattgtatctattttcaagtacagctagctgtcaaagcatgaagctcttgtgtatacacactgacacttggttcacgcatgaagaacagtgcctatgcactttgtgtagctataatgtaggtatctaggtgtaatttcagtgaaatggtgtatagatgtattgtaatttaaatgtatatgttatttttggctattcatctaaatgcagtagacatgttgatcggtgttttgcaaacatttctttttccttcttagataactagtcgtgaatcatttctcctctttctcagtgtggcttgggaatatatatgagtgaagaatttatctgtgaatcctttgtactgatgattgtttgaaagtctgtgtgtgtccagcacctttgtaaatacacaattcagagcagggatgggctgggtgtgtgtcctggttcttagtgaaaggtcatctcatgtctgtttaatacatggtgaatgcaactgtggaacttttgattacctagacttaggtaggtttagaatgagaacatccatctacagtcctcctttgcttggtggattgggctcagaggaacaaaaagttagtctgactctgtgcatattagcatcatgtctttagagaaaggtcagcctctctggttgccaaatactcatcatgatgctcatgacttaaaggttctgaggagccttgtctcccttggatttttgagtcagggtacaggaaaaaacattgctgactaactaactgcaaatgcatctgcaggtgaaaccctacgaaagcacagttctggctataaacttcagagttctctgtaaaaaacttagagcactagaagcacaggaatagtgagtgtacagcttatgcggttgtagaggggcaactgatgaacacaggtcccacatatatgagggagtatgacgttctctacctaatatgttctgtgtgcatgttttgaatgattgaagatgggattaactaatgcaagtttacagttgcctcctaaaacacacattctgtataattatcgctaaatacaatgctgtgaggtctatagttcctgtaacccctttctcctccccaaggacagagaagaactagccatgtgctatagggaaccctgagtgccctactcttttcccaagaagggtaaagcctacaatatcatcagggggcatgaagcacattaatttgcagtggctgcttcatatgaggagatatggtggacaggctaatttttccttgaaaatgtggcttcttcaactcctttcaaatttaggatggaatacttcctgaaataaaactgggctttatgcaggattctctttgaaaattcttgtatgtccagaacaaaagataaaactaattgtattcctcacattcacaatccccattggtctgaagtcacgtagcacagagcatctatagcacatagtgtttaaagactaatgaatgcaaaaagataaaatcttcaactaatttttgaattgtttctcatatatgctactagaaaatgccttgttgatgaagcacattttgggtagttgaggtcttttgttttcgcctttagctttctaagctttcttacaatgtggactgattactgtaacatttcacgtgtaaaataactggatattctttatatactggaaataacctgtgaatccaatatttcactaagtgttttaacttttgtgtatatatctctcatcaa

SEQ ID NO: 182725 - DNA, 685 bp, Homo sapiens
  Payload ID: 16005
  Gene Symbol: SLC1A2
  Gene Name: solute carrier family 1 (glial high affinity glutamate transporter), member 2
  ENST ID: ENST00000449068
  CDS Start-End: 87-685
gcgcagctgggccgcgtttaggctgcaccacccgcgtgtttcagccgctcgactccgctggacctgggacccccagacgtgggaggatgggtgccaacaatatgcccaagcaggtggaagtgcgaatgcacgacagtcatcttggctcagaggaacccaagcaccggcacctgggcctgcgcctgtgtgacaagctggggaagaatctgctgctcaccctgacggtgtttggtgtcatcctgggagcagtgtgtggagggcttcttcgcttggcatctcccatccaccctgatgtggttatgttaatagccttcccaggggatatactcatgaggatgctaaaaatgctcattctccctctaatcatctccagcttaatcacagggttgtcaggcctggatgctaaggctagtggccgcttgggcacgagagccatggtgtattacatgtccacgaccatcattgctgcagtactgggggtcattctggtcttggctatccatccaggcaatcccaagctcaagaagcagctggggcctgggaagaagaatgatgaagtgtccagcctggatgccttcctggaccttattcgaaatctcttccctgaaaaccttgtccaagcctgctttcaacagattcaaacagtgacgaagaaagtcctggttgcaccaccgccggacgagga

SEQ ID NO: 182726 - DNA, 607 bp, Homo sapiens
  Payload ID: 16005
  Gene Symbol: SLC1A2
  Gene Name: solute carrier family 1 (glial high affinity glutamate transporter), member 2
  ENST ID: ENST00000464522
  CDS Start-End: 1-276
acttcagtcaatgttgtgggtgactcttttggggctgggatagtctatcacctctccaagtctgagctggataccattgactcccagcatcgagtgcatgaagatattgaaatgaccaagactcaatccatttatgatgacatgaagaaccacagggaaagcaactctaatcaatgtgtctatgctgcacacaactctgtcatagtagatgaatgcaagggcccttttgtgctgagaataaaaccagctattggaacagacctcactgctttgtagagtcagaagttgacctagagaatgggtagcaacaggtcctcagtttctctggagacacccccaatccttgggtgagtgttgaaacctgacaactgactgttagccttgtcatcatcctcactggagatggagatgttgcagtcggagcctcactccttctggggcactgtttcttctcatggcaaccattttgcctgcctggaaacagcctgttgcctttgctagggggcaaatacacacactagccaaggaagttggtccagcacatctctgaggtttctcccccatggacccatggagcgaattccctgagataaatgatcagaaagtt

SEQ ID NO: 182727 - DNA, 597 bp, Homo sapiens
  Payload ID: 16005
  Gene Symbol: SLC1A2
  Gene Name: solute carrier family 1 (glial high affinity glutamate transporter), member 2
  ENST ID: ENST00000531628
  CDS Start-End: 1-597
tgatcatgtggtactctcccctgggtatcgcctgcctgatctgtggaaagatcattgcaatcaaggacttagaagtggttgctaggcaactggggatgtacatggtaacagtgatcataggcctcatcatccacgggggcatctttctccccttgatttactttgtagtgaccaggaaaaaccccttctccttttttgctggcattttccaagcttggatcactgccctgggcaccgcttccagtgctggaactttgcctgtcacctttcgttgcctggaagaaaatctggggattgataagcgtgtgactagattcgtccttcctgttggagcaaccattaacatggatggtacagccctttatgaagcggtagccgccatctttatagcccaaatgaatggtgttgtcctggatggaggacagattgtgactgtaagggacaggatgagaacttcagtcaatgttgtgggtgactcttttggggctgggatagtctatcacctctccaagtctgagctggataccattgactcccagcatcgagtgcatgaagatattgaaatgaccaagactcaatccatttatgatgacatga

SEQ ID NO: 182728 - DNA, 1890 bp, Homo sapiens
  Payload ID: 16005
  Gene Symbol: SLC1A2
  Gene Name: solute carrier family 1 (glial high affinity glutamate transporter), member 2
  Uniprot ID: P43004
  ENST ID: ENST00000606205
  CDS Start-End: 105-1796
taaataccgctcccggccgcacttcgcgctcaccccggcgtccgctttctccctcgcccacagctgccggatagtgctgaagaggagggggcgttccccagaccatggcatctacggaaggtgccaacaatatgcccaagcaggtggaagtgcgaatgcacgacagtcatcttggctcagaggaacccaagcaccggcacctgggcctgcgcctgtgtgacaagctggggaagaatctgctgctcaccctgacggtgtttggtgtcatcctgggagcagtgtgtggagggcttcttcgcttggcatctcccatccaccctgatgtggttatgttaatagccttcccaggggatatactcatgaggatgctaaaaatgctcattctccctctaatcatctccagcttaatcacagggttgtcaggcctggatgctaaggctagtggccgcttgggcacgagagccatggtgtattacatgtccacgaccatcattgctgcagtactgggggtcattctggtcttggctatccatccaggcaatcccaagctcaagaagcagctggggcctgggaagaagaatgatgaagtgtccagcctggatgccttcctggaccttattcgaaatctcttccctgaaaaccttgtccaagcctgctttcaacagattcaaacagtgacgaagaaagtcctggttgcaccaccgccggacgaggaggccaacgcaaccagcgctgttgtctctctgttgaacgagactgtgactgaggtgccggaggagactaagatggttatcaagaagggcctggagttcaaggatgggatgaacgtcttaggtctgatagggtttttcattgcttttggcatcgctatggggaagatgggagatcaggccaagctgatggtggatttcttcaacattttgaatgagattgtaatgaagttagtgatcatgatcatgtggtactctcccctgggtatcgcctgcctgatctgtggaaagatcattgcaatcaaggacttagaagtggttgctaggcaactggggatgtacatggtaacagtgatcataggcctcatcatccacgggggcatctttctccccttgatttactttgtagtgaccaggaaaaaccccttctccttttttgctggcattttccaagcttggatcactgccctgggcaccgcttccagtgctggaactttgcctgtcacctttcgttgcctggaagaaaatctggggattgataagcgtgtgactagattcgtccttcctgttggagcaaccattaacatggatggtacagccctttatgaagcggtagccgccatctttatagcccaaatgaatggtgttgtcctggatggaggacagattgtgactgtaagcctcacagccaccctggcaagcgtcggcgcggccagtatccccagtgccgggctggtcaccatgctcctcattctgacagccgtgggcctgccaacagaggacatcagcctgctggtggctgtggactggctgctggacaggatgagaacttcagtcaatgttgtgggtgactcttttggggctgggatagtctatcacctctccaagtctgagctggataccattgactcccagcatcgagtgcatgaagatattgaaatgaccaagactcaatccatttatgatgacatgaagaaccacagggaaagcaactctaatcaatgtgtctatgctgcacacaactctgtcatagtagatgaatgcaaggtacatttcccattcatggatatcgagacttgtatatagtagtgcatgcttgatttctttaaaaaaaaaaaaaccgtaaagccctgcatgtattattgtcacatttattttcctaaagaatcatgtaacccaa

SEQ ID NO: 182729 - DNA, 4170 bp, Homo sapiens
  Payload ID: 16006
  Gene Symbol: SLC1A3
  Gene Name: solute carrier family 1 (glial high affinity glutamate transporter), member 3
  Uniprot ID: P43003
  ENST ID: ENST00000265113
  CDS Start-End: 477-2105
gctttatttttcaattcttcctagtcccggttttgcatttctaatgacagtgaactgacaaagcgtgaaagtggtctaaggagcaaaacaaagccagcaagcctgcttctggtgtgccaagattaatcaatattccagaaacctcggggtttccccctcctccctgtgcggtttccattccccactcctcctttcccgggcacagactcctccccttttcttaagttgccctgatagtaacttgcagtttcagagcacatgcacactgtcagggctagcctgcctgcttacgcgcgctgcggattgttgctccgttgtacctgctggggaattcacctcgttactgcttgatatcttccaccccttacaaaatcagaaaagttgtgttttctaataccaaagaggaggtttggctttctgtgggtgattcccagacactgaagtgcaaagaagagaccctcctagaaaagtaaaatatgactaaaagcaatggagaagagcccaagatggggggcaggatggagagattccagcagggagtccgtaaacgcacacttttggccaagaagaaagtgcagaacattacaaaggaggatgttaaaagttacctgtttcggaatgcttttgtgctgctcacagtcaccgctgtcattgtgggtacaatccttggatttaccctccgaccatacagaatgagctaccgggaagtcaagtacttctcctttcctggggaacttctgatgaggatgttacagatgctggtcttaccacttatcatctccagtcttgtcacaggaatggcggcgctagatagtaaggcatcagggaagatgggaatgcgagctgtagtctattatatgactaccaccatcattgctgtggtgattggcataatcattgtcatcatcatccatcctgggaagggcacaaaggaaaacatgcacagagaaggcaaaattgtacgagtgacagctgcagatgccttcctggacttgatcaggaacatgttccctccaaatctggtagaagcctgctttaaacagtttaaaaccaactatgagaagagaagctttaaagtgcccatccaggccaacgaaacgcttgtgggtgctgtgataaacaatgtgtctgaggccatggagactcttacccgaatcacagaggagctggtcccagttccaggatctgtgaatggagtcaatgccctgggtctagttgtcttctccatgtgcttcggttttgtgattggaaacatgaaggaacaggggcaggccctgagagagttctttgattctcttaacgaagccatcatgagactggtagcagtaataatgtggtatgcccccgtgggtattctcttcctgattgctgggaagattgtggagatggaagacatgggtgtgattggggggcagcttgccatgtacaccgtgactgtcattgttggcttactcattcacgcagtcatcgtcttgccactcctctacttcttggtaacacggaaaaacccttgggtttttattggagggttgctgcaagcactcatcaccgctctggggacctcttcaagttctgccaccctacccatcaccttcaagtgcctggaagagaacaatggcgtggacaagcgcgtcaccagattcgtgctccccgtaggagccaccattaacatggatgggactgccctctatgaggctttggctgccattttcattgctcaagttaacaactttgaactgaacttcggacaaattattacaatcagcatcacagccacagctgccagtattggggcagctggaattcctcaggcgggcctggtcactatggtcattgtgctgacatctgtcggcctgcccactgacgacatcacgctcatcatcgcggtggactggttcctggatcgcctccggaccaccaccaacgtactgggagactccctgggagctgggattgtggagcacttgtcacgacatgaactgaagaacagagatgttgaaatgggtaactcagtgattgaagagaatgaaatgaagaaaccatatcaactgattgcacaggacaatgaaactgagaaacccatcgacagtgaaaccaagatgtagactaacataaagaaacactttcttgagcaccaggtgttaaaaaccattataaaatctttccatctcattacagctcattcgctccagcaagcccgtcatcttccctttcctcccttctgataagactggaaaatagtcctccaaaacacaagggaggattttgggtggccaaagtgtacaattttcatcccacaattgaaatttttaaatcatttcatgttagtcttaccgaataaggtaccaagatcacaaatagtgttgatcagatcttacaagtttatgtggcacacaatcctataaatgtgatttttttatataagttaaagagacaaatagtaggctaaaaacattttaaaatcaacttttgaaatttaaaaatctttcagaatacaattcagttttagtttcaaaatgttaacaacttgaattacaaccggttatcagttggacagtaagattttatccctttctcttctgactggtatacctatttcattagtagctaggtgcacatatacatctagcacagctgtgaggacagacagaaggcaaagtttccatgtggccttgagcaagtcccatctcacctctaggcctcagtgtcctcatctataaaatgagggacttccctagaagtcttcatggtctcttccagcccagacatcctgtgatgtcatgaaagcacctgccctctgtttcccctcagaacaccctgtaccatccatggagcacgaggccttcagaaaagacacttcaatgggagtgaacatttctaactaaggacaggatggctgtgtgtggtggtcaccaggtcctgtgagcaaagtgcaggttatgcaagtcgccaggcaggaggccattccaggagtgggattattcatcaaactctttgcccagttcatcccaatgggggaagtattcccttctttcctactctgggaagaatgtctcctgccactcctcaactgatgatagacttcgaaaacagatgagaagactagcagctagcaagggtgcttgtggtcacactgtggaacactaaagagctaggaaagagttgagcacaggcaacattacaaacaaaggatttgaaaacaccaagagtacaggtcttctttaaggaagaataaaaaagaagaggttcatttttctggctttttttttcacctgaaacactttttctcgagtccaaaatcattccccccgtgaagtctgcttaccaaaacataagacgacttatatatttgaaagaagtcaaatgaatgagctctctaatagaagtccatgagttgagtgggtatttcttatttgaaagtgtttttctttaatcaaaagtccttagaatgagggaaacaaaatatttatttgttttggaatcccacttatcaaatcattcaaaactttcagctggagtggggtttgcttttgttttgtttgtgtccataagagaaatggtagaagatgaatcagtatgaagacactgtcaatgaggttatgagaaaaaaacagcaggggcattagtttcaggcaaggcagctcccaggtttagagattaatttttaccccctaaggaatatccagtcaaagacgctgagtgggagctgtcaggcagtagcagctgtgtttgagtttctggctgaaaatggtgaagaatggacttaattatgctaacaaactgaaaaatctagacatagatcctctgatatacaattagagatatttttatatagaccccaagcattctgtgcataaaagttaacattaggctgtggtgcagtaaccatttaatgtcgaggctctatttcggaaatacactacaaatgttaaagtacgtggctgtcctcttaagacactagtagagcaaagacttaatcatatcaacttaattctgttacacaatatgtgttttttaatatactaaccatttcttatggaaaggtcctgtggggagcccatcctctcgccaagccatcacaggctctgcatacacatgcactcagtgtggactgggaagcattactttgtagatgtattttcaataaagaaaaaaatagttttacattaa

SEQ ID NO: 182730 - DNA, 3652 bp, Homo sapiens
  Payload ID: 16006
  Gene Symbol: SLC1A3
  Gene Name: solute carrier family 1 (glial high affinity glutamate transporter), member 3
  Uniprot ID: P43003
  ENST ID: ENST00000381918
  CDS Start-End: 96-1589
ttgtgttttctaataccaaagaggaggtttggctttctgtgggtgattcccagacactgaagtgcaaagaagagaccctcctagaaaagtaaaatatgactaaaagcaatggagaagagcccaagatggggggcaggatggagagattccagcagggagtccgtaaacgcacacttttggccaagaagaaagtgcagaacattacaaaggaggatgttaaaagttacctgtttcggaatgcttttgtgctgctcacagtcaccgctgtcattgtgggtacaatccttggatttaccctccgaccatacagaatgagctaccgggaagtcaagtacttctcctttcctggggaacttctgatgaggatgttacagatgctggtcttaccacttatcatctccagtcttgtcacaggaatggcggcgctagatagtaaggcatcagggaagatgggaatgcgagctgtagtctattatatgactaccaccatcattgctgtggtgattggcataatcattgtcatcatcatccatcctgggaagggcacaaaggaaaacatgcacagagaaggcaaaattgtacgagtgacagctgcagatgccttcctggacttgatcaggaacatgttccctccaaatctggtagaagcctgctttaaacagtttaaaaccaactatgagaagagaagctttaaagtgcccatccaggccaacgaaacgcttgtgggtgctgtgataaacaatgtgtctgaggccatggagactcttacccgaatcacagaggagctggtcccagttccaggatctgtgaatggagtcaatgccctgggtctagttgtcttctccatgtgcttcggttttgtgattggaaacatgaaggaacaggggcaggccctgagagagttctttgattctcttaacgaagccatcatgagactggtagcagtaataatgtggtatgcccccgtgggtattctcttcctgattgctgggaagattgtggagatggaagacatgggtgtgattggggggcagcttgccatgtacaccgtgactgtcattgttggcttactcattcacgcagtcatcgtcttgccactcctctacttcttggtaacacggaaaaacccttgggtttttattggagggttgctgcaagcactcatcaccgctctggggacctcttcaagttctgccaccctacccatcaccttcaagtgcctggaagagaacaatggcgtggacaagcgcgtcaccagattcgtgctccccgtaggagccaccattaacatggatgggactgccctctatgaggctttggctgccattttcattgctcaagttaacaactttgaactgaacttcggacaaattattacaatcagggatcgcctccggaccaccaccaacgtactgggagactccctgggagctgggattgtggagcacttgtcacgacatgaactgaagaacagagatgttgaaatgggtaactcagtgattgaagagaatgaaatgaagaaaccatatcaactgattgcacaggacaatgaaactgagaaacccatcgacagtgaaaccaagatgtagactaacataaagaaacactttcttgagcaccaggtgttaaaaaccattataaaatctttccatctcattacagctcattcgctccagcaagcccgtcatcttccctttcctcccttctgataagactggaaaatagtcctccaaaacacaagggaggattttgggtggccaaagtgtacaattttcatcccacaattgaaatttttaaatcatttcatgttagtcttaccgaataaggtaccaagatcacaaatagtgttgatcagatcttacaagtttatgtggcacacaatcctataaatgtgatttttttatataagttaaagagacaaatagtaggctaaaaacattttaaaatcaacttttgaaatttaaaaatctttcagaatacaattcagttttagtttcaaaatgttaacaacttgaattacaaccggttatcagttggacagtaagattttatccctttctcttctgactggtatacctatttcattagtagctaggtgcacatatacatctagcacagctgtgaggacagacagaaggcaaagtttccatgtggccttgagcaagtcccatctcacctctaggcctcagtgtcctcatctataaaatgagggacttccctagaagtcttcatggtctcttccagcccagacatcctgtgatgtcatgaaagcacctgccctctgtttcccctcagaacaccctgtaccatccatggagcacgaggccttcagaaaagacacttcaatgggagtgaacatttctaactaaggacaggatggctgtgtgtggtggtcaccaggtcctgtgagcaaagtgcaggttatgcaagtcgccaggcaggaggccattccaggagtgggattattcatcaaactctttgcccagttcatcccaatgggggaagtattcccttctttcctactctgggaagaatgtctcctgccactcctcaactgatgatagacttcgaaaacagatgagaagactagcagctagcaagggtgcttgtggtcacactgtggaacactaaagagctaggaaagagttgagcacaggcaacattacaaacaaaggatttgaaaacaccaagagtacaggtcttctttaaggaagaataaaaaagaagaggttcatttttctggctttttttttcacctgaaacactttttctcgagtccaaaatcattccccccgtgaagtctgcttaccaaaacataagacgacttatatatttgaaagaagtcaaatgaatgagctctctaatagaagtccatgagttgagtgggtatttcttatttgaaagtgtttttctttaatcaaaagtccttagaatgagggaaacaaaatatttatttgttttggaatcccacttatcaaatcattcaaaactttcagctggagtggggtttgcttttgttttgtttgtgtccataagagaaatggtagaagatgaatcagtatgaagacactgtcaatgaggttatgagaaaaaaacagcaggggcattagtttcaggcaaggcagctcccaggtttagagattaatttttaccccctaaggaatatccagtcaaagacgctgagtgggagctgtcaggcagtagcagctgtgtttgagtttctggctgaaaatggtgaagaatggacttaattatgctaacaaactgaaaaatctagacatagatcctctgatatacaattagagatatttttatatagaccccaagcattctgtgcataaaagttaacattaggctgtggtgcagtaaccatttaatgtcgaggctctatttcggaaatacactacaaatgttaaagtacgtggctgtcctcttaagacactagtagagcaaagacttaatcatatcaacttaattctgttacacaatatgtgttttttaatatactaaccatttcttatggaaaggtcctgtggggagcccatcctctcgccaagccatcacaggctctgcatacacatgcactcagtgtggactgggaagcattactttgtagatgtattttcaataaagaaaaaaatagttttacatt

SEQ ID NO: 182731 - DNA, 566 bp, Homo sapiens
  Payload ID: 16006
  Gene Symbol: SLC1A3
  Gene Name: solute carrier family 1 (glial high affinity glutamate transporter), member 3
  ENST ID: ENST00000513646
  CDS Start-End: 247-566
acactgcaaccttgaggtctggtattgtggctctccagtccttgattcctgctgagattatgcaatttgccaagagcttgcctggtgtggagcagcactgatttctcacccctggaggctataactcatgtctctttttctcccattctagttgtgttttctaataccaaagaggaggtttggctttctgtgggtgattcccagacactgaagtgcaaagaagagaccctcctagaaaagtaaaatatgactaaaagcaatggagaagagcccaagatggggggcaggatggagagattccagcagggagtccgtaaacgcacacttttggccaagaagaaagtgcagaacattacaaaggaggatgttaaaagttacctgtttcggaatgcttttgtgctgctcacagtcaccgctgtcattgtgggtacaatccttggatttaccctccgaccatacagaatgagctaccgggaagtcaagtacttctcctttcctggggaacttctgatgaggatgttacagatgctggtcttaccacttatcatctccagtcttgtcacagg

SEQ ID NO: 182732 - DNA, 540 bp, Homo sapiens
  Payload ID: 16006
  Gene Symbol: SLC1A3
  Gene Name: solute carrier family 1 (glial high affinity glutamate transporter), member 3
  ENST ID: ENST00000505202
  CDS Start-End: 221-540
ggtgtctgtttatgccgggtccgctgttaattcggagttgagtcattcggggtggattgggggcagattgtggcgcgagatctagaaaaggatcaaggttgagcggatctgcttaaaagtgactgttgtgttttctaataccaaagaggaggtttggctttctgtgggtgattcccagacactgaagtgcaaagaagagaccctcctagaaaagtaaaatatgactaaaagcaatggagaagagcccaagatggggggcaggatggagagattccagcagggagtccgtaaacgcacacttttggccaagaagaaagtgcagaacattacaaaggaggatgttaaaagttacctgtttcggaatgcttttgtgctgctcacagtcaccgctgtcattgtgggtacaatccttggatttaccctccgaccatacagaatgagctaccgggaagtcaagtacttctcctttcctggggaacttctgatgaggatgttacagatgctggtcttaccacttatcatctccagtcttgtcacagg

SEQ ID NO: 182733 - DNA, 784 bp, Homo sapiens
  Payload ID: 16006
  Gene Symbol: SLC1A3
  Gene Name: solute carrier family 1 (glial high affinity glutamate transporter), member 3
  ENST ID: ENST00000513903
  CDS Start-End: 481-784
aaaacaaagccagcaagcctgcttctggtgtgccaagattaatcaatattccagaaacctcggggtttccccctcctccctgtgcggtttccattccccactcctcctttcccgggcacagactcctccccttttcttaagttgccctgatagtaacttgcagtttcagagcacatgcacactgtcagggctagcctgcctgcttacgcgcgctgcggattgttgctccgttgtacctgctggggaattcacctcgttactgcttgatatcttccaccccttacaaaatcagaaaagtcatttgcgaggagtcctttggtttccagttacctcccccacaggcgcacacgctggctgcttgcgttggcagcgacacacatccatgttgtgttttctaataccaaagaggaggtttggctttctgtgggtgattcccagacactgaagtgcaaagaagagaccctcctagaaaagtaaaatatgactaaaagcaatggagaagagcccaagatggggggcaggatggagagattccagcagggagtccgtaaacgcacacttttggccaagaagaaagtgcagaacattacaaaggaggatgttaaaagttacctgtttcggaatgcttttgtgctgctcacagtcaccgctgtcattgtgggtacaatccttggatttaccctccgaccatacagaatgagctaccgggaagtcaagtacttctcctttcctggggaacttctgatgaggatgttacagatgctggtcttaccacttatcatct

SEQ ID NO: 182734 - DNA, 4030 bp, Homo sapiens
  Payload ID: 16006
  Gene Symbol: SLC1A3
  Gene Name: solute carrier family 1 (glial high affinity glutamate transporter), member 3
  ENST ID: ENST00000613445
  CDS Start-End: 477-1967
gctttatttttcaattcttcctagtcccggttttgcatttctaatgacagtgaactgacaaagcgtgaaagtggtctaaggagcaaaacaaagccagcaagcctgcttctggtgtgccaagattaatcaatattccagaaacctcggggtttccccctcctccctgtgcggtttccattccccactcctcctttcccgggcacagactcctccccttttcttaagttgccctgatagtaacttgcagtttcagagcacatgcacactgtcagggctagcctgcctgcttacgcgcgctgcggattgttgctccgttgtacctgctggggaattcacctcgttactgcttgatatcttccaccccttacaaaatcagaaaagttgtgttttctaataccaaagaggaggtttggctttctgtgggtgattcccagacactgaagtgcaaagaagagaccctcctagaaaagtaaaatatgactaaaagcaatggagaagagcccaagatggggggcaggatggagagattccagcagggagtccgtaaacgcacacttttggccaagaagaaagtgcagaacattacaaaggaggatgttaaaagttacctgtttcggaatgcttttgtgctgctcacagtcaccgctgtcattgtgggaatggcggcgctagatagtaaggcatcagggaagatgggaatgcgagctgtagtctattatatgactaccaccatcattgctgtggtgattggcataatcattgtcatcatcatccatcctgggaagggcacaaaggaaaacatgcacagagaaggcaaaattgtacgagtgacagctgcagatgccttcctggacttgatcaggaacatgttccctccaaatctggtagaagcctgctttaaacagtttaaaaccaactatgagaagagaagctttaaagtgcccatccaggccaacgaaacgcttgtgggtgctgtgataaacaatgtgtctgaggccatggagactcttacccgaatcacagaggagctggtcccagttccaggatctgtgaatggagtcaatgccctgggtctagttgtcttctccatgtgcttcggttttgtgattggaaacatgaaggaacaggggcaggccctgagagagttctttgattctcttaacgaagccatcatgagactggtagcagtaataatgtggtatgcccccgtgggtattctcttcctgattgctgggaagattgtggagatggaagacatgggtgtgattggggggcagcttgccatgtacaccgtgactgtcattgttggcttactcattcacgcagtcatcgtcttgccactcctctacttcttggtaacacggaaaaacccttgggtttttattggagggttgctgcaagcactcatcaccgctctggggacctcttcaagttctgccaccctacccatcaccttcaagtgcctggaagagaacaatggcgtggacaagcgcgtcaccagattcgtgctccccgtaggagccaccattaacatggatgggactgccctctatgaggctttggctgccattttcattgctcaagttaacaactttgaactgaacttcggacaaattattacaatcagcatcacagccacagctgccagtattggggcagctggaattcctcaggcgggcctggtcactatggtcattgtgctgacatctgtcggcctgcccactgacgacatcacgctcatcatcgcggtggactggttcctggatcgcctccggaccaccaccaacgtactgggagactccctgggagctgggattgtggagcacttgtcacgacatgaactgaagaacagagatgttgaaatgggtaactcagtgattgaagagaatgaaatgaagaaaccatatcaactgattgcacaggacaatgaaactgagaaacccatcgacagtgaaaccaagatgtagactaacataaagaaacactttcttgagcaccaggtgttaaaaaccattataaaatctttccatctcattacagctcattcgctccagcaagcccgtcatcttccctttcctcccttctgataagactggaaaatagtcctccaaaacacaagggaggattttgggtggccaaagtgtacaattttcatcccacaattgaaatttttaaatcatttcatgttagtcttaccgaataaggtaccaagatcacaaatagtgttgatcagatcttacaagtttatgtggcacacaatcctataaatgtgatttttttatataagttaaagagacaaatagtaggctaaaaacattttaaaatcaacttttgaaatttaaaaatctttcagaatacaattcagttttagtttcaaaatgttaacaacttgaattacaaccggttatcagttggacagtaagattttatccctttctcttctgactggtatacctatttcattagtagctaggtgcacatatacatctagcacagctgtgaggacagacagaaggcaaagtttccatgtggccttgagcaagtcccatctcacctctaggcctcagtgtcctcatctataaaatgagggacttccctagaagtcttcatggtctcttccagcccagacatcctgtgatgtcatgaaagcacctgccctctgtttcccctcagaacaccctgtaccatccatggagcacgaggccttcagaaaagacacttcaatgggagtgaacatttctaactaaggacaggatggctgtgtgtggtggtcaccaggtcctgtgagcaaagtgcaggttatgcaagtcgccaggcaggaggccattccaggagtgggattattcatcaaactctttgcccagttcatcccaatgggggaagtattcccttctttcctactctgggaagaatgtctcctgccactcctcaactgatgatagacttcgaaaacagatgagaagactagcagctagcaagggtgcttgtggtcacactgtggaacactaaagagctaggaaagagttgagcacaggcaacattacaaacaaaggatttgaaaacaccaagagtacaggtcttctttaaggaagaataaaaaagaagaggttcatttttctggctttttttttcacctgaaacactttttctcgagtccaaaatcattccccccgtgaagtctgcttaccaaaacataagacgacttatatatttgaaagaagtcaaatgaatgagctctctaatagaagtccatgagttgagtgggtatttcttatttgaaagtgtttttctttaatcaaaagtccttagaatgagggaaacaaaatatttatttgttttggaatcccacttatcaaatcattcaaaactttcagctggagtggggtttgcttttgttttgtttgtgtccataagagaaatggtagaagatgaatcagtatgaagacactgtcaatgaggttatgagaaaaaaacagcaggggcattagtttcaggcaaggcagctcccaggtttagagattaatttttaccccctaaggaatatccagtcaaagacgctgagtgggagctgtcaggcagtagcagctgtgtttgagtttctggctgaaaatggtgaagaatggacttaattatgctaacaaactgaaaaatctagacatagatcctctgatatacaattagagatatttttatatagaccccaagcattctgtgcataaaagttaacattaggctgtggtgcagtaaccatttaatgtcgaggctctatttcggaaatacactacaaatgttaaagtacgtggctgtcctcttaagacactagtagagcaaagacttaatcatatcaacttaattctgttacacaatatgtgttttttaatatactaaccatttcttatggaaaggtcctgtggggagcccatcctctcgccaagccatcacaggctctgcatacacatgcactcagtgtggactgggaagcattactttgtagatgtattttcaataaagaaaaaaatagttttacatt

SEQ ID NO: 182735 - DNA, 3832 bp, Homo sapiens
  Payload ID: 16006
  Gene Symbol: SLC1A3
  Gene Name: solute carrier family 1 (glial high affinity glutamate transporter), member 3
  ENST ID: ENST00000612708
  CDS Start-End: 477-1769
gctttatttttcaattcttcctagtcccggttttgcatttctaatgacagtgaactgacaaagcgtgaaagtggtctaaggagcaaaacaaagccagcaagcctgcttctggtgtgccaagattaatcaatattccagaaacctcggggtttccccctcctccctgtgcggtttccattccccactcctcctttcccgggcacagactcctccccttttcttaagttgccctgatagtaacttgcagtttcagagcacatgcacactgtcagggctagcctgcctgcttacgcgcgctgcggattgttgctccgttgtacctgctggggaattcacctcgttactgcttgatatcttccaccccttacaaaatcagaaaagttgtgttttctaataccaaagaggaggtttggctttctgtgggtgattcccagacactgaagtgcaaagaagagaccctcctagaaaagtaaaatatgactaaaagcaatggagaagagcccaagatggggggcaggatggagagattccagcagggagtccgtaaacgcacacttttggccaagaagaaagtgcagaacattacaaaggaggatgttaaaagttacctgtttcggaatgcttttgtgctgctcacagtcaccgctgtcattgtgggtacaatccttggatttaccctccgaccatacagaatgagctaccgggaagtcaagtacttctcctttcctggggaacttctgatgaggatgttacagatgctggtcttaccacttatcatctccagtcttgtcacaggaatggcggcgctagatagtaaggcatcagggaagatgggaatgcgagctgtagtctattatatgactaccaccatcattgctgtggtgattggcataatcattgtcatcatcatccatcctgggaagggcacaaaggaaaacatgcacagagaaggcaaaattgtacgagtgacagctgcagatgccttcctggacttgatcaggtatgcccccgtgggtattctcttcctgattgctgggaagattgtggagatggaagacatgggtgtgattggggggcagcttgccatgtacaccgtgactgtcattgttggcttactcattcacgcagtcatcgtcttgccactcctctacttcttggtaacacggaaaaacccttgggtttttattggagggttgctgcaagcactcatcaccgctctggggacctcttcaagttctgccaccctacccatcaccttcaagtgcctggaagagaacaatggcgtggacaagcgcgtcaccagattcgtgctccccgtaggagccaccattaacatggatgggactgccctctatgaggctttggctgccattttcattgctcaagttaacaactttgaactgaacttcggacaaattattacaatcagcatcacagccacagctgccagtattggggcagctggaattcctcaggcgggcctggtcactatggtcattgtgctgacatctgtcggcctgcccactgacgacatcacgctcatcatcgcggtggactggttcctggatcgcctccggaccaccaccaacgtactgggagactccctgggagctgggattgtggagcacttgtcacgacatgaactgaagaacagagatgttgaaatgggtaactcagtgattgaagagaatgaaatgaagaaaccatatcaactgattgcacaggacaatgaaactgagaaacccatcgacagtgaaaccaagatgtagactaacataaagaaacactttcttgagcaccaggtgttaaaaaccattataaaatctttccatctcattacagctcattcgctccagcaagcccgtcatcttccctttcctcccttctgataagactggaaaatagtcctccaaaacacaagggaggattttgggtggccaaagtgtacaattttcatcccacaattgaaatttttaaatcatttcatgttagtcttaccgaataaggtaccaagatcacaaatagtgttgatcagatcttacaagtttatgtggcacacaatcctataaatgtgatttttttatataagttaaagagacaaatagtaggctaaaaacattttaaaatcaacttttgaaatttaaaaatctttcagaatacaattcagttttagtttcaaaatgttaacaacttgaattacaaccggttatcagttggacagtaagattttatccctttctcttctgactggtatacctatttcattagtagctaggtgcacatatacatctagcacagctgtgaggacagacagaaggcaaagtttccatgtggccttgagcaagtcccatctcacctctaggcctcagtgtcctcatctataaaatgagggacttccctagaagtcttcatggtctcttccagcccagacatcctgtgatgtcatgaaagcacctgccctctgtttcccctcagaacaccctgtaccatccatggagcacgaggccttcagaaaagacacttcaatgggagtgaacatttctaactaaggacaggatggctgtgtgtggtggtcaccaggtcctgtgagcaaagtgcaggttatgcaagtcgccaggcaggaggccattccaggagtgggattattcatcaaactctttgcccagttcatcccaatgggggaagtattcccttctttcctactctgggaagaatgtctcctgccactcctcaactgatgatagacttcgaaaacagatgagaagactagcagctagcaagggtgcttgtggtcacactgtggaacactaaagagctaggaaagagttgagcacaggcaacattacaaacaaaggatttgaaaacaccaagagtacaggtcttctttaaggaagaataaaaaagaagaggttcatttttctggctttttttttcacctgaaacactttttctcgagtccaaaatcattccccccgtgaagtctgcttaccaaaacataagacgacttatatatttgaaagaagtcaaatgaatgagctctctaatagaagtccatgagttgagtgggtatttcttatttgaaagtgtttttctttaatcaaaagtccttagaatgagggaaacaaaatatttatttgttttggaatcccacttatcaaatcattcaaaactttcagctggagtggggtttgcttttgttttgtttgtgtccataagagaaatggtagaagatgaatcagtatgaagacactgtcaatgaggttatgagaaaaaaacagcaggggcattagtttcaggcaaggcagctcccaggtttagagattaatttttaccccctaaggaatatccagtcaaagacgctgagtgggagctgtcaggcagtagcagctgtgtttgagtttctggctgaaaatggtgaagaatggacttaattatgctaacaaactgaaaaatctagacatagatcctctgatatacaattagagatatttttatatagaccccaagcattctgtgcataaaagttaacattaggctgtggtgcagtaaccatttaatgtcgaggctctatttcggaaatacactacaaatgttaaagtacgtggctgtcctcttaagacactagtagagcaaagacttaatcatatcaacttaattctgttacacaatatgtgttttttaatatactaaccatttcttatggaaaggtcctgtggggagcccatcctctcgccaagccatcacaggctctgcatacacatgcactcagtgtggactgggaagcattactttgtagatgtattttcaataaagaaaaaaatagttttacatt

SEQ ID NO: 182736 - DNA, 1306 bp, Homo sapiens
  Payload ID: 16007
  Gene Symbol: SLC1A7
  Gene Name: solute carrier family 1 (glutamate transporter), member 7
  Uniprot ID: O00341
  ENST ID: ENST00000371491
  CDS Start-End: 169-645
ctctaaggcggccacacgggcatggccgtggggctggcgactggtgtttagcaactccgaccacctgcctgctgaggggctagagccctcagcccagaccctgtgcccccggccgggctctcatgcgtggaatggtgctgtgccccttgccagcaggccaggctcaccatggtgccgcatgccatcttggcacgggggagggacgtgtgcaggcggaatggactcctcatcctgtctgtgctgtctgtcatcgtgggctgcctcctcggcttcttcttgaggacccggcgcctctcaccacaggaaattagttacttccagttccctggagagctcctgatgaggatgctgaagatgatgatcctgccactggtggtctccagcttgatgtccggacttgcctccctggatgccaagacctctagccgcctgggcgtcctcaccgtggcgtactacctgtggaccaccttcatggctgtcatcgtgggcatcttcatggtctccatcatccacccaggcagcgcggcccagaaggagaccacggagcagagtgggaagcccatcatgagctcagccgatgccctgttggacctcatccggcagaaagaagaaagttggaggaacggaccaaagggtcctggctgaatgggcacctccttaagagttttccaggaatcaccacccaacgacttccactcacctctcgatggccaccccattagcaagagaatcagagcttgatggcaggtcccatttggtccccacaacataataggacttctgttaaggaaggacgggagaatggagactgcataggcaactagctgtccctgccaaggcccacatttaaaatgattgtaattgtaaaggaagttgtaaagaaatgtctatataggtataagttccatttggcttcttacgagcttccaaatgttctccgtgtgtgtaaactgagtcttgaaagaggggaagagggttaccgaggacaagagtgagtgggaggcgacccaggtggaggcagtgtgagtgtggggcggcaggttggaggaagagcaggcatgcaacggaagcctcttaccagatgctcacctcagagttggcatttctcacaagacacactcctagaaggggactgtgaagacaaagatacaaatgcttttagagaaaggttgctgccaggaccatgtgagggtgcccatctcaccaaacctcccacattgtgcactgtcatttgaaaaatactttgtcagtttgacaggtggaaatatcttgaatttgttgatgaaactaaacattttaaaaagca

SEQ ID NO: 182737 - DNA, 2637 bp, Homo sapiens
  Payload ID: 16007
  Gene Symbol: SLC1A7
  Gene Name: solute carrier family 1 (glutamate transporter), member 7
  Uniprot ID: O00341
  ENST ID: ENST00000371494
  CDS Start-End: 129-1811
ctggtgtttagcaactccgaccacctgcctgctgaggggctagagccctcagcccagaccctgtgcccccggccgggctctcatgcgtggaatggtgctgtgccccttgccagcaggccaggctcaccatggtgccgcatgccatcttggcacgggggagggacgtgtgcaggcggaatggactcctcatcctgtctgtgctgtctgtcatcgtgggctgcctcctcggcttcttcttgaggacccggcgcctctcaccacaggaaattagttacttccagttccctggagagctcctgatgaggatgctgaagatgatgatcctgccactggtggtctccagcttgatgtccggacttgcctccctggatgccaagacctctagccgcctgggcgtcctcaccgtggcgtactacctgtggaccaccttcatggctgtcatcgtgggcatcttcatggtctccatcatccacccaggcagcgcggcccagaaggagaccacggagcagagtgggaagcccatcatgagctcagccgatgccctgttggacctcatccggaacatgttcccagccaacctagtagaagccacattcaaacagtaccgcaccaagaccaccccagttgtcaagtcccccaaggtggcaccagaggaggcccctcctcggcggatcctcatctacggggtccaggaggagaatggctcccatgtgcagaacttcgccctggacctgaccccgccgcccgaggtcgtttacaagtcagagccgggcaccagcgatggcatgaatgtgctgggcatcgtcttcttctctgccaccatgggcatcatgctgggccgcatgggtgacagcggggcccccctggtcagcttctgccagtgcctcaatgagtcggtcatgaagatcgtggcggtggctgtgtggtatttccccttcggcattgtgttcctcattgcgggtaagatcctggagatggacgaccccagggccgtcggcaagaagctgggcttctactcagtcaccgtggtgtgcgggctggtgctccacgggctctttatcctgcccctgctctacttcttcatcaccaagaagaatcccatcgtcttcatccgtggcatcctgcaggctctgctcatcgcgctggccacctcctccagctcagccacactgcccatcaccttcaagtgcctgctggagaacaaccacatcgaccggcgcatcgctcgcttcgtgctgcccgtgggtgccaccatcaacatggacggcactgcgctctacgaggctgtggccgccatcttcatcgcccaggtcaacaactacgagctggactttggccagatcatcaccatcagtatcacagccactgcagccagcattggggcagctggcatcccccaggccggcctcgtcaccatggtcatcgtgctcacctccgtgggactgcccaccgatgacatcaccctcatcattgccgttgactgggctctggaccgtttccgcaccatgattaacgtgctgggtgatgcgctggcagcggggatcatggcccatatatgtcggaaggattttgcccgggacacaggcaccgagaaactgctgccctgcgagaccaagccagtgagcctccaggagatcgtggcagcccagcagaatggctgtgtgaagagtgtagccgaggcctccgagctcaccctgggccccacctgcccccaccacgtccccgttcaagtggagcaggatgaggagctgcccgctgcgagtctgaaccactgcaccatccagatcagtgagctggagaccaatgtctgagcctgcggagctgcaggggcaggcgaggcctccaggggcagggtcctgaggcaggaactcgactctccaaccctcctgagcagccggcaggggccaggatcacacattcttctcacccttgagaggctggaattaaccccgcttgacggaaaatgtatctcagagaagggaaaggctgcatgggggagccccatctagggagtgatgggcccggcattgcctgaggccccgctgtgacagtttccccggtgtgagcccggtgagggcggcaggcaggggttatccggccccactttctggatgacagacttgaggctctgagagctgaaaacacttgtccaaggtctcacgttaaggtcaagacactaactcaaatctttcaagccccgcctctcctcttggaggacagggcagcctgcagctgtgtccaggcccaggccccaccccataacaggtggcctcagccacacagttctccccaaggggagcagcccagggccaagccccgctgccttccccaggccacagtgcgtccagtctcctgtcctgccacgtgtcttttgcaaagctccttggatgtggagacagatgtctttactagagctgaaaggcccccttgacacatccaggccaacctcccatggaataggtaggcaagccaggactccgggaaggaggtgcagccaggatgctctggtggagctgccgatggggccctggtgtcagaactccccaaaggcctgtgcgtccaagtggagtcaggttttctattcctttctgtgtttgcaaattcagtgttaactaaataaaggtattttgtttttca

SEQ ID NO: 182738 - DNA, 2873 bp, Homo sapiens
  Payload ID: 16007
  Gene Symbol: SLC1A7
  Gene Name: solute carrier family 1 (glutamate transporter), member 7
  ENST ID: ENST00000620347
  CDS Start-End: 184-2043
aggattgtggcttccctctaaggcggccacacgggcatggccgtggggctggcgactggtgtttagcaactccgaccacctgcctgctgaggggctagagccctcagcccagaccctgtgcccccggccgggctctcatgcgtggaatggtgctgtgccccttgccagcaggccaggctcaccatggtgccgcatgccatcttggcacgggggagggacgtgtgcaggcggaatggactcctcatcctgtctgtgctgtctgtcatcgtgggctgcctcctcggcttcttcttgaggacccggcgcctctcaccacaggaaattagttacttccagttccctggagagctcctgatgaggatgctgaagatgatgatcctgccactggtggtctccagcttgatgtccggacttgcctccctggatgccaagacctctagccgcctgggcgtcctcaccgtggcgtactacctgtggaccaccttcatggctgtcatcgtgggcatcttcatggtctccatcatccacccaggcagcgcggcccagaaggagaccacggagcagagtgggaagcccatcatgagctcagccgatgccctgttggacctcatccggaacatgttcccagccaacctagtagaagccacattcaaacagtaccgcaccaagaccaccccagttgtcaagtcccccaaggtggcaccagaggaggcccctcctcggcggatcctcatctacggggtccaggaggagaatggctcccatgtgcagaacttcgccctggacctgaccccgccgcccgaggtcgtttacaagtcagagccgggcaccagcgatggcatgaatgtgctgggcatcgtcttcttctctgccaccatgggcatcatgctgggccgcatgggtgacagcggggcccccctggtcagcttctgccagtgcctcaatgagtcggtcatgaagatcgtggcggtggctgtgtggtatttccccttcggcattgtgttcctcattgcgggtaagatcctggagatggacgaccccagggccgtcggcaagaagctgggcttctactcagtcaccgtggtgtgcgggctggtgctccacgggctctttatcctgcccctgctctacttcttcatcaccaagaagaatcccatcgtcttcatccgtggcatcctgcaggctctgctcatcgcgctggccacctcctccaggaagaaccaagtgagagcactgcagtgcccgcggtccttacctcctgccggagcagcgctgcagaggcacaaacactcctggcggggtggctgcctggggaggggtgagcttcccgacagaggccccagccatcctggaggagggtgctgggcagacaccggcccctctaaccgtagctcagccacactgcccatcaccttcaagtgcctgctggagaacaaccacatcgaccggcgcatcgctcgcttcgtgctgcccgtgggtgccaccatcaacatggacggcactgcgctctacgaggctgtggccgccatcttcatcgcccaggtcaacaactacgagctggactttggccagatcatcaccatcagtatcacagccactgcagccagcattggggcagctggcatcccccaggccggcctcgtcaccatggtcatcgtgctcacctccgtgggactgcccaccgatgacatcaccctcatcattgccgttgactgggctctggaccgtttccgcaccatgattaacgtgctgggtgatgcgctggcagcggggatcatggcccatatatgtcggaaggattttgcccgggacacaggcaccgagaaactgctgccctgcgagaccaagccagtgagcctccaggagatcgtggcagcccagcagaatggctgtgtgaagagtgtagccgaggcctccgagctcaccctgggccccacctgcccccaccacgtccccgttcaagtggagcaggatgaggagctgcccgctgcgagtctgaaccactgcaccatccagatcagtgagctggagaccaatgtctgagcctgcggagctgcaggggcaggcgaggcctccaggggcagggtcctgaggcaggaactcgactctccaaccctcctgagcagccggcaggggccaggatcacacattcttctcacccttgagaggctggaattaaccccgcttgacggaaaatgtatctcagagaagggaaaggctgcatgggggagccccatctagggagtgatgggcccggcattgcctgaggccccgctgtgacagtttccccggtgtgagcccggtgagggcggcaggcaggggttatccggccccactttctggatgacagacttgaggctctgagagctgaaaacacttgtccaaggtctcacgttaaggtcaagacactaactcaaatctttcaagccccgcctctcctcttggaggacagggcagcctgcagctgtgtccaggcccaggccccaccccataacaggtggcctcagccacacagttctccccaaggggagcagcccagggccaagccccgctgccttccccaggccacagtgcgtccagtctcctgtcctgccacgtgtcttttgcaaagctccttggatgtggagacagatgtctttactagagctgaaaggcccccttgacacatccaggccaacctcccatggaataggtaggcaagccaggactccgggaaggaggtgcagccaggatgctctggtggagctgccgatggggccctggtgtcagaactccccaaaggcctgtgcgtccaagtggagtcaggttttctattcctttctgtgtttgcaaattcagtgttaactaaataaaggtattttgtttttcacttc

SEQ ID NO: 182739 - DNA, 3378 bp, Homo sapiens
  Payload ID: 16007
  Gene Symbol: SLC1A7
  Gene Name: solute carrier family 1 (glutamate transporter), member 7
  ENST ID: ENST00000620288
  CDS Start-End: 173-649
ttccctctaaggcggccacacgggcatggccgtggggctggcgactggtgtttagcaactccgaccacctgcctgctgaggggctagagccctcagcccagaccctgtgcccccggccgggctctcatgcgtggaatggtgctgtgccccttgccagcaggccaggctcaccatggtgccgcatgccatcttggcacgggggagggacgtgtgcaggcggaatggactcctcatcctgtctgtgctgtctgtcatcgtgggctgcctcctcggcttcttcttgaggacccggcgcctctcaccacaggaaattagttacttccagttccctggagagctcctgatgaggatgctgaagatgatgatcctgccactggtggtctccagcttgatgtccggacttgcctccctggatgccaagacctctagccgcctgggcgtcctcaccgtggcgtactacctgtggaccaccttcatggctgtcatcgtgggcatcttcatggtctccatcatccacccaggcagcgcggcccagaaggagaccacggagcagagtgggaagcccatcatgagctcagccgatgccctgttggacctcatccggaacatgttcccagccaacctagtagaagccacattcaaacagtaacaacccttggccctgacttctctctgggtggggtgtcacccaccagtaccgcaccaagaccaccccagttgtcaagtcccccaaggtggcaccagaggaggcccctcctcggcggatcctcatctacggggtccaggaggagaatggctcccatgtgcagaacttcgccctggacctgaccccgccgcccgaggtcgtttacaagtcagagccgggcaccagcgatggcatgaatgtgctgggcatcgtcttcttctctgccaccatgggtatgtgctgcccacctgcccagcagtgccgtggagccgggcccccagcccctcccagcagcctgctcctccacctcttactgaggtctggggagaatgctggagaggtttactgtgaaaaactggaaatattcaccacacctgtttatttaaatccttcgcctccccaccccaccccaggggcttccccctggcacctccccctcaggcccgtctgggccatttcttaggcccgcagctggcatccctgccacacccttccctttgctgccctcctctgggatgccaggcccctcacctatgcaagccccttggaggcccgcaccttggtttttaaattttgtgttatttttcttaaagatgggtcccaaattatacaagcttcagaccccacaaagcctgtggaaatgtcctgcctgccatccccgactcctccactgggttttcttgtcaaggaaaagacctcaccaacctcgttcatgcaaaaactctaggggtgactttctacctcgtcctctgccttggcccccacctttgcatccggtcgggtctgcccccaaagtcccctccaagccgtgcgtttccttctaccccgcgtcactgcccgggtcaaggccgtgtggtctctcgcctggttcctgtgaaagctgcctagaaaacttccacggctgtccctgctggtgtgtccagctcaggaggtcacaagtctgaccgtgctctgcccattgcccctggaaaggggccgaacccctagtgccggctgaaaagccccgtgagactggcccgtgtgctcctctccgcacaaccctcagcccggctgctcttgccactccccctccacgtttgtcatcttcagggtgctccccacaagtgccatgccctcaggagagtcctccgcagactaggccgagtgccccgagctacactgcctggttactctgtgagcactagactcgattgcaaggatatcattgcttgctgtctgcacagccatgaccagccccatacaggctgacgggcttgtctccatccaccccagagcccaccgctgccgtggctacagcaggcactcagcagacctggcatcatgctgggccgcatgggtgacagcggggcccccctggtcagcttctgccagtgcctcaatgagtcggtcatgaagatcgtggcggtggctgtgtggtatttccccttcggcattgtgttcctcattgcgggtaagatcctggagatggacgaccccagggccgtcggcaagaagctgggcttctactcagtcaccgtggtgtgcgggctggtgctccacgggctctttatcctgcccctgctctacttcttcatcaccaagaagaatcccatcgtcttcatccgtggcatcctgcaggctctgctcatcgcgctggccacctcctccagaaactgctgccctgcgagaccaagccagtgagcctccaggagatcgtggcagcccagcagaatggctgtgtgaagagtgtagccgaggcctccgagctcaccctgggccccacctgcccccaccacgtccccgttcaagtggagcaggatgaggagctgcccgctgcgagtctgaaccactgcaccatccagatcagtgagctggagaccaatgtctgagcctgcggagctgcaggggcaggcgaggcctccaggggcagggtcctgaggcaggaactcgactctccaaccctcctgagcagccggcaggggccaggatcacacattcttctcacccttgagaggctggaattaaccccgcttgacggaaaatgtatctcagagaagggaaaggctgcatgggggagccccatctagggagtgatgggcccggcattgcctgaggccccgctgtgacagtttccccggtgtgagcccggtgagggcggcaggcaggggttatccggccccactttctggatgacagacttgaggctctgagagctgaaaacacttgtccaaggtctcacgttaaggtcaagacactaactcaaatctttcaagccccgcctctcctcttggaggacagggcagcctgcagctgtgtccaggcccaggccccaccccataacaggtggcctcagccacacagttctccccaaggggagcagcccagggccaagccccgctgccttccccaggccacagtgcgtccagtctcctgtcctgccacgtgtcttttgcaaagctccttggatgtggagacagatgtctttactagagctgaaaggcccccttgacacatccaggccaacctcccatggaataggtaggcaagccaggactccgggaaggaggtgcagccaggatgctctggtggagctgccgatggggccctggtgtcagaactccccaaaggcctgtgcgtccaagtggagtcaggttttctattcctttctgtgtttgcaaattcagtgttaactaaataaaggtattttgtttttc

SEQ ID NO: 182740 - DNA, 2499 bp, Homo sapiens
  Payload ID: 16007
  Gene Symbol: SLC1A7
  Gene Name: solute carrier family 1 (glutamate transporter), member 7
  ENST ID: ENST00000611397
  CDS Start-End: 184-1602
aggattgtggcttccctctaaggcggccacacgggcatggccgtggggctggcgactggtgtttagcaactccgaccacctgcctgctgaggggctagagccctcagcccagaccctgtgcccccggccgggctctcatgcgtggaatggtgctgtgccccttgccagcaggccaggctcaccatggtgccgcatgccatcttggcacgggggagggacgtgtgcaggcggaatggactcctcatcctgtctgtgctgtctgtcatcgtgggctgcctcctcggcttcttcttgaggacccggcgcctctcaccacaggaaattagttacttccagttccctggagagctcctgatgaggatgctgaagatgatgatcctgccactggtggtctccaggaacatgttcccagccaacctagtagaagccacattcaaacagtaccgcaccaagaccaccccagttgtcaagtcccccaaggtggcaccagaggaggcccctcctcggcggatcctcatctacggggtccaggaggagaatggctcccatgtgcagaacttcgccctggacctgaccccgccgcccgaggtcgtttacaagtcagagccgggcaccagcgatggcatgaatgtgctgggcatcgtcttcttctctgccaccatgggcatcatgctgggccgcatgggtgacagcggggcccccctggtcagcttctgccagtgcctcaatgagtcggtcatgaagatcgtggcggtggctgtgtggtatttccccttcggcattgtgttcctcattgcgggtaagatcctggagatggacgaccccagggccgtcggcaagaagctgggcttctactcagtcaccgtggtgtgcgggctggtgctccacgggctctttatcctgcccctgctctacttcttcatcaccaagaagaatcccatcgtcttcatccgtggcatcctgcaggctctgctcatcgcgctggccacctcctccagctcagccacactgcccatcaccttcaagtgcctgctggagaacaaccacatcgaccggcgcatcgctcgcttcgtgctgcccgtgggtgccaccatcaacatggacggcactgcgctctacgaggctgtggccgccatcttcatcgcccaggtcaacaactacgagctggactttggccagatcatcaccatcagtatcacagccactgcagccagcattggggcagctggcatcccccaggccggcctcgtcaccatggtcatcgtgctcacctccgtgggactgcccaccgatgacatcaccctcatcattgccgttgactgggctctggaccgtttccgcaccatgattaacgtgctgggtgatgcgctggcagcggggatcatggcccatatatgtcggaaggattttgcccgggacacaggcaccgagacctgtttcccttcaccagaaactgctgccctgcgagaccaagccagtgagcctccaggagatcgtggcagcccagcagaatggctgtgtgaagagtgtagccgaggcctccgagctcaccctgggccccacctgcccccaccacgtccccgttcaagtggagcaggatgaggagctgcccgctgcgagtctgaaccactgcaccatccagatcagtgagctggagaccaatgtctgagcctgcggagctgcaggggcaggcgaggcctccaggggcagggtcctgaggcaggaactcgactctccaaccctcctgagcagccggcaggggccaggatcacacattcttctcacccttgagaggctggaattaaccccgcttgacggaaaatgtatctcagagaagggaaaggctgcatgggggagccccatctagggagtgatgggcccggcattgcctgaggccccgctgtgacagtttccccggtgtgagcccggtgagggcggcaggcaggggttatccggccccactttctggatgacagacttgaggctctgagagctgaaaacacttgtccaaggtctcacgttaaggtcaagacactaactcaaatctttcaagccccgcctctcctcttggaggacagggcagcctgcagctgtgtccaggcccaggccccaccccataacaggtggcctcagccacacagttctccccaaggggagcagcccagggccaagccccgctgccttccccaggccacagtgcgtccagtctcctgtcctgccacgtgtcttttgcaaagctccttggatgtggagacagatgtctttactagagctgaaaggcccccttgacacatccaggccaacctcccatggaataggtaggcaagccaggactccgggaaggaggtgcagccaggatgctctggtggagctgccgatggggccctggtgtcagaactccccaaaggcctgtgcgtccaagtggagtcaggttttctattcctttctgtgtttgcaaattcagtgttaactaaataaaggtattttgtttttcacttc

SEQ ID NO: 182741 - DNA, 4561 bp, Homo sapiens
  Payload ID: 16008
  Gene Symbol: SLC1A4
  Gene Name: solute carrier family 1 (glutamate/neutral amino acid transporter), member 4
  Uniprot ID: P43007
  ENST ID: ENST00000234256
  CDS Start-End: 244-1842
ctccagccggcggctgctccagggaggctgggcgcgatcctctccgcccgcggctccaacccgcactctgcgcctctcctcgcctttctcgcacctgctcctgcgccaggcccggagacccccggggcggcttcccagaacctgcggagcacaactggccgaccgacccattcattgggaaccccgtcttttgccagagcccacgtcccctgccacctctagctcggagcggcgtgtagcgccatggagaagagcaacgagaccaacggctaccttgacagcgctcaggcggggcctgcggccgggcccggagctccggggaccgcggcgggacgcgcacggcgttgcgcgggcttcctgcggcgccaagcgctggtgctgctcaccgtgtccggggtgctggcgggcgcgggcctgggcgcggcgttgcgcgggctcagcctgagccgcacgcaggtcacctacctggccttccccggcgagatgctgctccgcatgctgcgcatgatcatcctgccgctggtggtctgcagcctggtgtcgggcgccgcctcgctcgatgccagctgcctcgggcgtctgggcggcatcgctgtcgcctactttggcctcaccacactgagtgcctcggcgctcgccgtggccttggcgttcatcatcaagccaggatccggtgcgcagacccttcagtccagcgacctggggctggaggactcggggcctcctcctgtccccaaagagacggtggactctttcctcgacctggccagaaacctgtttccctccaatcttgtggttgcagctttccgtacgtatgcaaccgattataaagtcgtgacccagaacagcagctctggaaatgtaacccatgaaaagatccccataggcactgagatagaagggatgaacattttaggattggtcctgtttgctctggtgttaggagtggccttaaagaaactaggctccgaaggagaagacctcatccgtttcttcaattccctcaacgaggcgacgatggtgctggtgtcctggattatgtggtacgtacctgtgggcatcatgttccttgttggaagcaagatcgtggaaatgaaagacatcatcgtgctggtgaccagcctggggaaatacatcttcgcatctatattgggccatgttattcatggaggaattgttctgccacttatttattttgttttcacacgaaaaaacccattcagattcctcctgggcctcctcgccccatttgcgacagcatttgctacctgctccagctcagcgacccttccctctatgatgaagtgcattgaagagaacaatggtgtggacaagaggatcagcaggtttattctccccatcggggccaccgtgaacatggacggagcagccatcttccagtgtgtggccgcggtgttcattgcgcaactcaacaacgtagagctcaacgcaggacagattttcaccattctagtgactgccacagcgtccagtgttggagcagcaggcgtgccagctggaggggtcctcaccattgccattatcctggaggccattgggctgcctactcatgacctgcctctgatcctggctgtggactggattgtggaccggaccaccacggtggtgaatgtggaaggggatgccctgggtgcaggcattctccaccacctgaatcagaaggcaacaaagaaaggcgagcaggaacttgctgaggtgaaagtggaagccatccccaactgcaagtctgaggaggagacatcgcccctggtgacacaccagaaccccgctggccccgtggccagtgccccagaactggaatccaaggagtcggttctgtgatggggctgggctttgggcttgcctgccagcagtgatgtcccaccctgttcacccagccgccagtcatggacacagggcactgcccttgccaacttttaccctcccaagcaatgctttggcccagtcgctggcctgaggcttacctctcggcactggcattgggctccccagccggaactggttaccaaggacaaggacactctgacattcggcttgatccatgtccaggtgcaactgtgtgtacaccagggatctgtttggaaacaaccccttgagctgccaggctcaagaaatcatggactcacagggtcctgtgtggttacatcttggaaaaaatgcagatgtatttcactctccccggtcagctctgcatcaggtgttttctgagcaaaccaagggggtttatagtcatctgtcgcattgcctcgagttgcagtaattgaaaaaatgctcaaattcttagccatggctggcctttgctgagctgggactcaggtgtttaaagagtttgtgctatagctaggtgtggatagcttctgatccctgggttctgggagactgcaggtgccgcacattgtcaagttagaaatactccaggtgggtgttagcactgtggtggtctctggtccacagccttaggtaaacaacttagattctgaggtcaaagaaaaaaggagagggaatgcagccttgtgggggagaagcggggcagagggttctctaatctaatcaggacaggacaggtttcacatacaattgtcccagttcgcatcccagccctggggcacttttctgcttccttccagaggcctgggcctctgataacactttggctttttctccattcacgctgatttggcaaaaggccagagatgggcctccttccctggggaggtgtgatgtagttatcacattcaggacccttgttgatttatcatctattatttgaattcaactggacactctgtaaaatgctgcactgcagcaaaaacaaaaccaccaccaccccagagaaaaccatgtactaattggagtggggtacccccattcacaggttcccaggtcccctggctttggctgatttcaaaatatagagccctttcttgccagtacatccaagtttaaaattatcagcgaaatggtccatgtttttccaattacctgctgacacggttctaagctaagtgaaggggaagatctgagagcgtgctgtttgtggctgttgatgcatattcgtgatgtaacaggtcctggggcctcactttaccccatttgtaaaatggggctaatgtcacctgcctcttacctacctcagagggatttggtgaagcaaactgttaatcttcgaaaacgaccatttcacttcttggatatcaagtgctaacccagtatgttcttcttttttatgtaagggacagctttctccacagagtcctttctgctggtgaggacagcatttctgagcagggctttgttctctatgtgcattaggacttttatcatgcccttgttctgtgtgtagttacttgacagcatcaaatgccgcctcttcctaatgtccttcaagttttcatgaactagcaaccccaccttccaccatggttctgggcgcctgattttgctgtgactcccagacccagccactgtttctgccaccctgtaacaggccattaaagctccccagtgttcagcctccttcactcccttgttttccctgttgctatgtgtcacctgggccctacagacaggggcacacgcttatggatgtgtgtaccattgagatgagaatgggtagatggaacggagaccatcaagccacacccccttcttaaaactggggacatgagcctgagcagaaagggtgaagaagagccatgggacacagagttgacccagccagggggaaagcccagctctctttaaaccagctaagccattccagtctcctgtgaagccaaaagggaccaggaaccgtgcaaaggaaactggaaacttttccccgctgggtagagcatgttgctgatactcttctgttttcaagggaaacaatcacattgtttgattccaaatggtaaatgaacactcactattcttcaggcttcagtaaatctttttttcttccttcatatatatatacacaacacacacacacatatgtatatctatacacacatgtgtgttgtgtatatgcatgtgtgtgtgtgcgtgtgtgtatagttttagctccaagccaagcaagtttgtgtttggatagaggggaacttaactattaactacaagttgtatgtctgtggtatcttgattttcccatttctaaagatgaatttcacaaagccataaagcgtgaaattagagctggacttaagactcattggccgaccatcctgtgtcctggcctggccctgcagtaagaagcgtgtctgggtctggagaagggtgcttccgagagtgtgcaggtggcccttccccttggaggcgagaagagagaatgtgctgtctatcttcctggttttcagtccacagagtcggtagaccaggggttacgtgactggggaaaatctcacatctccttgtctgaaaacatttcccctgctgttctctttctaacatgttgtggtaaatctgttcagatactgctcatctgactgttttgtacatgtgacaattgccttaaaacctagcacagtcctcagaaatgaataccgtgtttccactggaa

SEQ ID NO: 182742 - DNA, 1217 bp, Homo sapiens
  Payload ID: 16008
  Gene Symbol: SLC1A4
  Gene Name: solute carrier family 1 (glutamate/neutral amino acid transporter), member 4
  Uniprot ID: P43007
  ENST ID: ENST00000531327
  CDS Start-End: 265-969
agctgcctggcgggcgacccagccccatcctgatggccccaggacacaagcccaggagcgccccggtgcgcgcggttccgcggcccaggggcgccgggtttggtggcacagcgagccccctttctctagcgaaacctgtttccctccaatcttgtggttgcagctttccgtacgtatgcaaccgattataaagtcgtgacccagaacagcagctctggaaatgtaacccatgaaaagatccccataggcactgagatagaagggatgaacattttaggattggtcctgtttgctctggtgttaggagtggccttaaagaaactaggctccgaaggagaagacctcatccgtttcttcaattccctcaacgaggcgacgatggtgctggtgtcctggattatgtgctcagcgacccttccctctatgatgaagtgcattgaagagaacaatggtgtggacaagaggatcagcaggtttattctccccatcggggccaccgtgaacatggacggagcagccatcttccagtgtgtggccgcggtgttcattgcgcaactcaacaacgtagagctcaacgcaggacagattttcaccattctagtgactgccacagcgtccagtgttggagcagcaggcgtgccagctggaggggtcctcaccattgccattatcctggaggccattgggctgcctactcatgacctgcctctgatcctggctgtggactggattgtggaccggaccaccacggtggtgaatgtggaaggggatgccctgggtgcaggcattctccaccacctgaatcagaaggcaacaaagaaaggcgagcaggaacttgctgaggtgaaagtggaagccatccccaactgcaagtctgaggaggagacatcgcccctggtgacacaccagaaccccgctggccccgtggccagtgccccagaactggaatccaaggagtcggttctgtgatggggctgggctttgggcttgcctgccagcagtgatgtcccaccctgttcacccagccgccagtcatggacacagggcactgcccttgccaacttttaccctcccaagcaatgctttggcccagtcgctggcctgaggcttacctctcggcactggcattgggctccccagccggaactggttaccaaggacaaggacactctgacattcggcttgatccatgtccaggtgcaactgtgtgtacacca

SEQ ID NO: 182743 - DNA, 1719 bp, Homo sapiens
  Payload ID: 16009
  Gene Symbol: SLC1A6
  Gene Name: solute carrier family 1 (high affinity aspartate/glutamate transporter), member 6
  Uniprot ID: P48664
  ENST ID: ENST00000221742
  CDS Start-End: 9-1703
gatagaccatgagcagccatggcaacagcctgttcctgcgggagagcggccagcggctgggccgggtgggctggctgcagcggctgcaggaaagcctgcagcagagagcactgcgcacgcgcctgcgcctgcagaccatgaccctcgagcacgtgctgcgcttcctgcgccgaaacgccttcattctgctgacggtcagcgccgtggtcattggggtcagcctggcctttgccctgcgcccatatcagctcacctaccgccagatcaagtacttctcttttcctggagagcttctgatgaggatgctgcagatgctggtgttacctctcattgtctccagcctggtcacaggtatggcatccctggacaacaaggccacggggcggatggggatgcgggcagctgtgtactacatggtgaccaccatcatcgcggtcttcatcggcatcctcatggtcaccatcatccatcccgggaagggctccaaggaggggctgcaccgggagggccggatcgagaccatccccacagctgatgccttcatggacctgatcagaaatatgtttccaccaaaccttgtggaggcctgcttcaaacagttcaagacgcagtacagcacgagggtggtaaccaggaccatggtgaggacagagaacgggtctgagccgggtgcctccatgcctcctccattctcagtggagaacggaaccagcttcctggaaaatgtcactcgggccttgggtaccctgcaggagatgctgagctttgaggagactgtacccgtgcctggctccgccaatggcatcaacgccctgggcctcgtggtcttctctgtggcctttgggctggtcattggtggcatgaaacacaagggcagagtcctcagggacttcttcgacagcctcaatgaggctattatgaggctggtgggcatcattatctggtatgcacctgtgggcatcctgttcctgattgctgggaagattctggagatggaagacatggccgtcctggggggtcagctgggcatgtacaccctgaccgtcatcgtgggcctgttcctccatgccggcattgtccttcccctcatctacttcctcgtcactcaccggaaccccttccccttcattgggggcatgctacaagccctcatcaccgctatgggcacgtcttccagctcggcaacgctgcccatcaccttccgctgcctggaggagggcctgggtgtggaccgccgcatcaccaggttcgtcctgcccgtgggcgccacggtcaacatggatggcactgccctctacgaggccctggctgccatcttcattgctcaagttaacaactacgagctcaacctgggtcagatcacaaccatcagcatcacggccacagcagccagtgttggggctgctggcatcccccaggcgggtctggtcaccatggtcattgtgcttacgtcggtcggcttgcccacggaagacatcacgctcatcattgccgtggactggttccttgaccggcttcgcacaatgaccaacgtactgggggactcaattggagcggccgtcatcgagcacttgtctcagcgggagctggagcttcaggaagctgagcttaccctccccagcctggggaaaccctacaagtccctcatggcacaggagaagggggcatcccggggacggggaggcaacgagagtgctatgtgaggggcctccagctctg

SEQ ID NO: 182744 - DNA, 1794 bp, Homo sapiens
  Payload ID: 16009
  Gene Symbol: SLC1A6
  Gene Name: solute carrier family 1 (high affinity aspartate/glutamate transporter), member 6
  ENST ID: ENST00000430939
  CDS Start-End: 131-1633
actggcatcctgactccttgagaaagagcccatctagcatccttctcgccgttgcttccagcaacatggcccttcttccagctttaggatgtcctaagcgcttccagctgtccaggtcacactctgtcgcatgtcgatagaccatgagcagccatggcaacagcctgttcctgcgggagagcggccagcggctgggccgggtgggctggctgcagcggctgcaggaaagcctgcagcagagagcactgcgcacgcgcctgcgcctgcagaccatgaccctcgagcacgtgctgcgcttcctgcgccgaaacgccttcattctgctgacggtcagcgccgtggtcattggggtcagcctggcctttgccctgcgcccatatcagctcacctaccgccagatcaagtacttctcttttcctggagagcttctgatgaggatgctgcagatgctggtgttacctctcattgtctccagcctggtcacagaaatatgtttccaccaaaccttgtggaggcctgcttcaaacagttcaagacgcagtacagcacgagggtggtaaccaggaccatggtgaggacagagaacgggtctgagccgggtgcctccatgcctcctccattctcagtggagaacggaaccagcttcctggaaaatgtcactcgggccttgggtaccctgcaggagatgctgagctttgaggagactgtacccgtgcctggctccgccaatggcatcaacgccctgggcctcgtggtcttctctgtggcctttgggctggtcattggtggcatgaaacacaagggcagagtcctcagggacttcttcgacagcctcaatgaggctattatgaggctggtgggcatcattatctggtatgcacctgtgggcatcctgttcctgattgctgggaagattctggagatggaagacatggccgtcctggggggtcagctgggcatgtacaccctgaccgtcatcgtgggcctgttcctccatgccggcattgtccttcccctcatctacttcctcgtcactcaccggaaccccttccccttcattgggggcatgctacaagccctcatcaccgctatgggcacgtcttccagctcggcaacgctgcccatcaccttccgctgcctggaggagggcctgggtgtggaccgccgcatcaccaggttcgtcctgcccgtgggcgccacggtcaacatggatggcactgccctctacgaggccctggctgccatcttcattgctcaagttaacaactacgagctcaacctgggtcagatcacaaccatcagcatcacggccacagcagccagtgttggggctgctggcatcccccaggcgggtctggtcaccatggtcattgtgcttacgtcggtcggcttgcccacggaagacatcacgctcatcattgccgtggactggttccttgaccggcttcgcacaatgaccaacgtactgggggactcaattggagcggccgtcatcgagcacttgtctcagcgggagctggagcttcaggaagctgagcttaccctccccagcctggggaaaccctacaagtccctcatggcacaggagaagggggcatcccggggacggggaggcaacgagagtgctatgtgaggggcctccagctctgcccccccagagaggagggaagggggctggggaggggagtcctggtgacacatctgttgcccaactgaccgtgggctgaacacacgttctgcttgactcatttaggggggagggaaaagtgaaataaaggagcaggaatgaaaggt

SEQ ID NO: 182745 - DNA, 2420 bp, Homo sapiens
  Payload ID: 16009
  Gene Symbol: SLC1A6
  Gene Name: solute carrier family 1 (high affinity aspartate/glutamate transporter), member 6
  Uniprot ID: P48664
  ENST ID: ENST00000544886
  CDS Start-End: 794-1732
cttcgcgctggcacggagcatttccagcctcacgcgctttaattttctcagctttaattttctgtggggtcggccaagccatcttccttgtttagcggaggaagccaggctcagagagggagaggagttggcccaagggcacacagcagccaagtggccaaggccggaaggtgcacccgcaaggagaagggggcagcggagccctctccctggctgttgttactgggacactagagccgcgccttccccaggcctccgccgaggctgctggagcgggtcccgcggtgccagggcctgttccccgcgctccgccagggatgctggggcctccgagggctccggaggcggtttagggggcgggggcgcggaggcgcggctccgagcagggggcgggggctggatgccggagaggccactcacccccgcccacccccagtccccctcccttcgcaagcacgctgtcccccttctcccacacggctgcggagcctgggctgggcgcgggggaggcggagggcatcgcggaggggatcccgccccctcccccggccgctcggtgcccccacacccacgtgagcgcagggccggcccggatccctcccgcagcatagcgcgtcccggctccgcgccggtgcctccacggtccggtccccgcgccggtgctgcacagtccctggcgggtccccgcggccccggccgggcgcttcgccgggctccggctcctgcatccgggcgcagcgcgcaggccgaggcgcgggcaggccgcccccgccgctccggacgccgatagaccatgagcagccatggcaacagcctgttcctgcgggagagcggccagcggctgggccgggtgggctggctgcagcggctgcaggaaagcctgcagcagagagcactgcgcacgcgcctgcgcctgcagaccatgaccctcgagcacgtgctgcgcttcctgcgccgaaacgccttcattctgctgacggtcagcgccgtggtcattggggtcagcctggcctttgccctgcgcccatatcagctcacctaccgccagatcaagtacttctcttttcctggagagcttctgatgaggatgctgcagatgctggtgttacctctcattgtctccagcctggtcacaggtatggcatccctggacaacaaggccacggggcggatggggatgcgggcagctgtgtactacatggtgaccaccatcatcgcggtcttcatcggcatcctcatggtcaccatcatccatcccgggaagggctccaaggaggggctgcaccgggagggccggatcgagaccatccccacagctgatgccttcatggacctgatcagaaatatgtttccaccaaaccttgtggaggcctgcttcaaacagttcaagacgcagtacagcacgagggtggtaaccaggaccatggtgaggacagagaacgggtctgagccgggtgcctccatgcctcctccattctcagtggagaacggaaccagcttcctggaaaatgtcactcgggccttgggtaccctgcaggagatgctgagctttgaggagactgtacccgtgcctggctccgccaatggcatcaacgccctgggcctcgtggtcttctctgtggcctttgggctggtcattggtggcatgaaacacaagggcagagtcctcagggacttcttcgacagcctcaatgaggctattatgaggctggtgggcatcattatctggtgagtcctggtctgtgcccacgggatggtggagccagagctgggaagtcaggctgtggggaagctgccgaagggcttgctggggacttttggtcattcatttacgtattgggtgattcacttacccactcaccaactcattcattcatgtctttctgggatgatttcatcactagttgacttccttgttcatctgttcattcattcattcttctatgcattggttagttcatggaatatctcactctttcattcattcatgtccttctgcaatgattcattcactgctttgttcatctgttcattcactcattcttctatgcattgatgaaatcactcattcagtgatttattcatctatactcatgcttcaatgcattgatttactcatttcctcatgcatttattcattcatctatgcattggttaaatcactggccaactcactaactcattcattcattcacacttttctgcaatgatttgttcacttgttcactcccttgcttatctgttcattcactcattcttcaatacattgaccaagccattcactgacatttattcagctacatttattctttcatgcattggtttctggatttatttggtcattcatttatttattttgcaaaattaatgtatttttaattgacaaataaaaactgtatatattttcatgtgcaacataa

SEQ ID NO: 182746 - DNA, 424 bp, Homo sapiens
  Payload ID: 16009
  Gene Symbol: SLC1A6
  Gene Name: solute carrier family 1 (high affinity aspartate/glutamate transporter), member 6
  ENST ID: ENST00000595863
  CDS Start-End: 95-424
gtccacctcatgcccgatgttcttgcagttgaggccccagctgaggttcttgtgcgtggcgagcagctcgtccaggttcttttccagatagaccatgagcagccatggcaacagcctgttcctgcgggagagcggccagcggctgggccgggtgggctggctgcagcggctgcaggaaagcctgcagcagagagcactgcgcacgcgcctgcgcctgcagaccatgaccctcgagcacgtgctgcgcttcctgcgccgaaacgccttcattctgctgacggtcagcgccgtggtcattggggtcagcctggcctttgccctgcgcccatatcagctcacctaccgccagatcaagtacttctcttttcctggagagcttctgatgaggatgctgcagatgctggtgttacctctcattgtctcc

SEQ ID NO: 182747 - DNA, 1735 bp, Homo sapiens
  Payload ID: 16009
  Gene Symbol: SLC1A6
  Gene Name: solute carrier family 1 (high affinity aspartate/glutamate transporter), member 6
  ENST ID: ENST00000600144
  CDS Start-End: 275-1735
agaagcagcattgtggtttcaggagatgggtccatttggagcaggatcctaagtggggcttggcattgggaatttggattagctctagaggacgcaggatctggaaaatcagggcagatttcccatcccttggatatggtggggagttgaggagggcaaggaagatcccagaaaagccagtggcagcaaaacacaaaggccagggacctacgtactggtaaaactgagacctccaagaaacctgcagctcgacctggttgaattcagatagaccatgagcagccatggcaacagcctgttcctgcgggagagcggccagcggctgggccgggtgggctggctgcagcggctgcaggaaagcctgcagcagagagcactgcgcacgcgcctgcgcctgcagaccatgaccctcgagcacgtgctgcgcttcctgcgccgaaacgccttcattctgctgacggtcagcgccgtggtcattggggtcagcctggcctttgccctgcgcccatatcagctcacctaccgccagatcaagtacttctcttttcctggagagcttctgatgaggatgctgcagatgctggtgttacctctcattgtctccagcctggtcacaggtatggcatccctggacaacaaggccacggggcggatggggatgcgggcagctgtgtactacatggtgaccaccatcatcgcggtcttcatcggcatcctcatggtcaccatcatccatcccgggaagggctccaaggaggggctgcaccgggagggccggatcgagaccatccccacagctgatgccttcatggacctgatcagaaatatgtttccaccaaaccttgtggaggcctgcttcaaacagttcaagacgcagtacagcacgagggtggtaaccaggaccatggtgaggacagagaacgggtctgagccgggtgcctccatgcctcctccattctcagtggagaacggaaccagcttcctggaaaatgtcactcgggccttgggtaccctgcaggagatgctgagctttgaggagactgtacccgtgcctggctccgccaatggcatcaacgccctgggcctcgtggtcttctctgtggcctttgggctggtcattggtggcatgaaacacaagggcagagtcctcagggacttcttcgacagcctcaatgaggctattatgaggctggtgggcatcattatctgctcggcaacgctgcccatcaccttccgctgcctggaggagggcctgggtgtggaccgccgcatcaccaggttcgtcctgcccgtgggcgccacggtcaacatggatggcactgccctctacgaggccctggctgccatcttcattgctcaagttaacaactacgagctcaacctgggtcagatcacaaccatcagcatcacggccacagcagccagtgttggggctgctggcatcccccaggcgggtctggtcaccatggtcattgtgcttacgtcggtcggcttgcccacggaagacatcacgctcatcattgccgtggactggttccttgaccggcttcgcacaatgaccaacgtactgggggactcaattggagcggccgtcatcgagcacttgtctcagcgggagctggagcttcaggaagctgagcttaccctccccagcctggggaaaccctacaagtccctcatggcacaggagaagggggcatcccggggacggggaggcaacgagagtgctatgtga

SEQ ID NO: 182748 - DNA, 566 bp, Homo sapiens
  Payload ID: 16009
  Gene Symbol: SLC1A6
  Gene Name: solute carrier family 1 (high affinity aspartate/glutamate transporter), member 6
  ENST ID: ENST00000601761
  CDS Start-End: 345-566
acattttctgagcaggaaacccaagagacagggttttacgctgtcacccaagttggagtgcagtgcaaggagaagcagcattgtggtttcaggagatgggtccatttggagcaggatcctaagtggggcttggcattgggaatttggattagctctagaggacgcaggatctggaaaatcagggcagatttcccatcccttggatatggtggggagttgaggagggcaaggaagatcccagaaaagccagtggcagcaaaacacaaaggccagggacctacgtactggtaaaactgagacctccaagaaacctgcagctcgacctggttgaattcagatagaccatgagcagccatggcaacagcctgttcctgcgggagagcggccagcggctgggccgggtgggctggctgcagcggctgcaggaaagcctgcagcagagagcactgcgcacgcgcctgcgcctgcagaccatgaccctcgagcacgtgctgcgcttcctgcgccgaaacgccttcattctgctgacggtcagcgccgtggtcattggtgagctctgcctcttg

SEQ ID NO: 182749 - DNA, 695 bp, Homo sapiens
  Payload ID: 16009
  Gene Symbol: SLC1A6
  Gene Name: solute carrier family 1 (high affinity aspartate/glutamate transporter), member 6
  ENST ID: ENST00000597262
  CDS Start-End: 214-695
gcgcagggccggcccggatccctcccgcagcatagcgcgtcccggctccgcgccggtgcctccacggtccggtccccgcgccggtgctgcacagtccctggcgggtccccgcggccccggccgggcgcttcgccgggctccggctcctgcatccgggcgcagcgcgcaggccgaggcgcgggcaggccgcccccgccgctccggacgccgaccatgagcagccatggcaacagcctgttcctgcgggagagcggccagcggctgggccgggtgggctggctgcagcggctgcaggaaagcctgcagcagagagcactgcgcacgcgcctgcgcctgcagaccatgaccctcgagcacgtgctgcgcttcctgcgccgaaacgccttcattctgctgacggtcagcgccgtggtcattggggtcagcctggcctttgccctgcgcccatatcagctcacctaccgccagatcaagtacttctcttttcctggagagcttctgatgaggatgctgcagatgctggtgttacctctcattgtctccagcctggtcacaggtatggcatccctggacaacaaggccacggggcggatggggatgcgggcagctgtgtactacatggtgaccaccatcatcgcggtcttcatcggcatcctcatggtcaccatcatccatcccgggaagggctccaagga

SEQ ID NO: 182750 - DNA, 2987 bp, Homo sapiens
  Payload ID: 16009
  Gene Symbol: SLC1A6
  Gene Name: solute carrier family 1 (high affinity aspartate/glutamate transporter), member 6
  Uniprot ID: P48664
  ENST ID: ENST00000598504
  CDS Start-End: 1361-2299
gcatagcgcgtcccggctccgcgccggtgcctccacggtccggtccccgcgccggtgctgcacagtccctggcgggtccccgcggccccggccgggcgcttcgccgggctccggctcctgcatccgggcgcagcgcgcaggccgaggcgcgggcaggccgcccccgccgctccggacgccgggatgtaagaggctccgagaagcagcccacacatctcatcagatctaagtgtctagaggtcgggagaaccaagtgggaaagacccaccctcacccctcaccctgtagaaactgggaacactagaagggacattttctgagcaggaaacccaagagacagggttttacgctgtcacccaagttggagtgcagtggtacgatcatagctcattgcagcctcaaactcctgggttcaagcgatcctcctgctttagcctcttgagtggctaggactacaggcacaggccaccgtgcctggctaatttttaatttttaaaaaagagacagggtctggctatgttgcccaggctggccatgaactcctgggctcaagcggttctccagccttcacctcccaaagtgttgggattgcaggcatgagccactgcgtctggcccacagatgctaagtgctgtctgctcttctccaggggtcagcaaattttttcagcaaatggcccaagagtaaacattttgagctttgtggcccgtacaatctctgtcccaacaactcaactcaggcattgtagcttgaaagcagctgtagacaataggtaatgcatgagtgtggctgtgtgccaataaaactttatttacaaaaacaagcagtaggctgaatttgactagcagaccatagtttgtcaataccgtattatgtcttgtaaggaagagaaaggaaccggacaaaactctagcctcgggagttttcctgactgttcagatcttagctgaatgatctcccttggtatctacaggcaacttcctgctgtggcttagggactggaaacataatatcccagagggattccctgtgtagtctgtggttcactctttgggattttttttttttttttttttcacagcaaggagaagcagcattgtggtttcaggagatgggtccatttggagcaggatcctaagtggggcttggcattgggaatttggattagctctagaggacgcaggatctggaaaatcagggcagatttcccatcccttggatatggtggggagttgaggagggcaaggaagatcccagaaaagccagtggcagcaaaacacaaaggccagggacctacgtactggtaaaactgagacctccaagaaacctgcagctcgacctggttgaattcagatagaccatgagcagccatggcaacagcctgttcctgcgggagagcggccagcggctgggccgggtgggctggctgcagcggctgcaggaaagcctgcagcagagagcactgcgcacgcgcctgcgcctgcagaccatgaccctcgagcacgtgctgcgcttcctgcgccgaaacgccttcattctgctgacggtcagcgccgtggtcattggggtcagcctggcctttgccctgcgcccatatcagctcacctaccgccagatcaagtacttctcttttcctggagagcttctgatgaggatgctgcagatgctggtgttacctctcattgtctccagcctggtcacaggtatggcatccctggacaacaaggccacggggcggatggggatgcgggcagctgtgtactacatggtgaccaccatcatcgcggtcttcatcggcatcctcatggtcaccatcatccatcccgggaagggctccaaggaggggctgcaccgggagggccggatcgagaccatccccacagctgatgccttcatggacctgatcagaaatatgtttccaccaaaccttgtggaggcctgcttcaaacagttcaagacgcagtacagcacgagggtggtaaccaggaccatggtgaggacagagaacgggtctgagccgggtgcctccatgcctcctccattctcagtggagaacggaaccagcttcctggaaaatgtcactcgggccttgggtaccctgcaggagatgctgagctttgaggagactgtacccgtgcctggctccgccaatggcatcaacgccctgggcctcgtggtcttctctgtggcctttgggctggtcattggtggcatgaaacacaagggcagagtcctcagggacttcttcgacagcctcaatgaggctattatgaggctggtgggcatcattatctggtgagtcctggtctgtgcccacgggatggtggagccagagctgggaagtcaggctgtggggaagctgccgaagggcttgctggggacttttggtcattcatttacgtattgggtgattcacttacccactcaccaactcattcattcatgtctttctgggatgatttcatcactagttgacttccttgttcatctgttcattcattcattcttctatgcattggttagttcatggaatatctcactctttcattcattcatgtccttctgcaatgattcattcactgctttgttcatctgttcattcactcattcttctatgcattgatgaaatcactcattcagtgatttattcatctatactcatgcttcaatgcattgatttactcatttcctcatgcatttattcattcatctatgcattggttaaatcactggccaactcactaactcattcattcattcacacttttctgcaatgatttgttcacttgttcactcccttgcttatctgttcattcactcattcttcaatacattgaccaagccattcactgacatttattcagctacatttattctttcatgcattggtttctggatttatttggtcattcatttatttattttgcaaaattaatgtatttttaattgacaaataaaaactgtatatattttcatgtgcaacataa

SEQ ID NO: 182751 - DNA, 493 bp, Homo sapiens
  Payload ID: 16009
  Gene Symbol: SLC1A6
  Gene Name: solute carrier family 1 (high affinity aspartate/glutamate transporter), member 6
  ENST ID: ENST00000594383
  CDS Start-End: 388-493
gcgcgtcccggctccgcgccggtgcctccacggtccggtccccgcgccggtgctgcacagtccctggcgggtccccgcggccccggccgggcgcttcgccgggctccggctcctgcatccgggcgcagcgcgcaggccgaggcgcgggcaggccgcccccgccgctccggacgccggtgagtggggactccgcggctcggcgcggggactcggtgtggctgcggcgcggaggttgcgggcaggtgggggatccgaggcgctggggtcaggcgtgtggggcgctccctgcgcccacgtccccacttctccgccgccctttgtctctgagctcctgcttgccccttagagccgttgccaccgcttttctcctggtcgttctgatagaccatgagcagccatggcaacagcctgttcctgcgggagagcggccagcggctgggccgggtgggctggctgcagcggctgcaggaaagcctgcagcagagagcactgc

SEQ ID NO: 182752 - DNA, 592 bp, Homo sapiens
  Payload ID: 16009
  Gene Symbol: SLC1A6
  Gene Name: solute carrier family 1 (high affinity aspartate/glutamate transporter), member 6
  ENST ID: ENST00000599636
  CDS Start-End: 154-592
gctttggaacttggcctaagtgcactggcatcctgactccttgagaaagagcccatctagcatccttctcgccgttgcttccagcaacatggcccttcttccagctttaggatgtcctaagcgcttccagctgtccaggtcacactctgtcgcatgtcgatagaccatgagcagccatggcaacagcctgttcctgcgggagagcggccagcggctgggccgggtgggctggctgcagcggctgcaggaaagcctgcagcagagagcactgcgcacgcgcctgcgcctgcagaccatgaccctcgagcacgtgctgcgcttcctgcgccgaaacgccttcattctgctgacggtcagcgccgtggtcattggggtcagcctggcctttgccctgcgcccatatcagctcacctaccgccagatcaagtacttctcttttcctggagagcttctgatgaggatgctgcagatgctggtgttacctctcattgtctccagcctggtcacaggtatggcatccctggacaacaaggccacggggcggatggggatgcgggcagctgtgtactacatggtgaccaccatcatcgcg

SEQ ID NO: 182753 - DNA, 3722 bp, Homo sapiens
  Payload ID: 16010
  Gene Symbol: SLC1A1
  Gene Name: solute carrier family 1 (neuronal/epithelial high affinity glutamate transporter, system Xag), member 1
  Uniprot ID: P43005
  ENST ID: ENST00000262352
  CDS Start-End: 237-1811
ggaggagccgggcgcgcctgccacgcaaaactaccgggctggcagggcggcgggcgcggtgcgcgatcccgggtggcggcggcaacggcggtggtgacggcggcgactgcagcggccggctctcacctctcccctgtgcacccgcatctcgccgcgccgccgagcagccagcagtccccgggtcgcccagcccacgcgcgcacggccgagcccagcgcacaatagcggcgacagccatggggaaaccggcgaggaaaggatgcgagtggaagcgcttcctgaagaataactgggtgttgctgtccaccgtggccgcggtggtgctaggcattaccacaggagtcttggttcgagaacacagcaacctctcaactctagagaaattctactttgcttttcctggagaaattctaatgcggatgctgaaactcatcattttgccattaattatatccagcatgattacaggtgttgctgcactggattccaacgtatccggaaaaattggtctgcgcgctgtcgtgtattatttctgtaccactctcattgctgttattctaggtattgtgctggtggtgagcatcaagcctggtgtcacccagaaagtgggtgaaattgcgaggacaggcagcacccctgaagtcagtacggtggatgccatgttagatctcatcaggaatatgttccctgagaatcttgtccaggcctgttttcagcagtacaaaactaagcgtgaagaagtgaagcctcccagcgatccagagatgaacatgacagaagagtccttcacagctgtcatgacaactgcaatttccaagaacaaaacaaaggaatacaaaattgttggcatgtattcagatggcataaacgtcctgggcttgattgtcttttgccttgtctttggacttgtcattggaaaaatgggagaaaagggacaaattctggtggatttcttcaatgctttgagtgatgcaaccatgaaaatcgttcagatcatcatgtgttatatgccactaggtattttgttcctgattgctgggaagatcatagaagttgaagactgggaaatattccgcaagctgggcctttacatggccacagtcctgactgggcttgcaatccactccattgtaattctcccgctgatatatttcatagtcgtacgaaagaaccctttccgatttgccatgggaatggcccaggctctcctgacagctctcatgatctcttccagttcagcaacactgcctgtcaccttccgctgtgctgaagaaaataaccaggtggacaagaggatcactcgattcgtgttacccgttggtgcaacaatcaacatggatgggactgcgctctatgaagcagtggcagcggtgtttattgcacagttgaatgacctggacttgggcattgggcagatcatcaccatcagtatcacggccacatctgccagcatcggagctgctggcgtgccccaggctggcctggtgaccatggtgattgtgctgagtgccgtgggcctgcccgccgaggatgtcaccctgatcattgctgtcgactggctcctggaccggttcaggaccatggtcaacgtccttggtgatgcttttgggacgggcattgtggaaaagctctccaagaaggagctggagcagatggatgtttcatctgaagtcaacattgtgaatccctttgccttggaatccacaatccttgacaacgaagactcagacaccaagaagtcttatgtcaatggaggctttgcagtagacaagtctgacaccatctcattcacccagacctcacagttctagggcccctggctgcagatgactggaaacaaggaaggacatttccgtgagagtcatctcaaacactgcttaaggaaaagagaaacactaatggccaagtgtacatttgatttgatatacagacctccagattattttctatatttggattcacagcctttgcgctctgggttttgggatttgggtgtggggtaagttgaagggaaatcaatttaaaggaaagttctattatctgggttttagaaattctataagagacaaagtttggaagtacataaagtaataactgttagaattaggtaatggatatgaaagagaaaatgctttctcatgcatagacaagtgttttgggtttttaaaaaaaatattctgtcattggttacaaatttttactcaggctttctattggcatggatttcctttgacctctcacttttttataaattataatgcatctaaaccacctgtccccagttaatgtgccaaaatgtcaatttttaacttatctccagccaatttcaaagaaaacagaccagcatagttctgcaataacagttttaagatgggcatagggtttggaagaaagggagaaggattcttttttcaatgtactgtattgggacgctggtaactgttaacccagtgttcagcatagagctatatatatatatatatgtatatatttattattttcatataatttgccagacagagatcagaattgaaccgtcaatgtgaaataaagagttctccttgtacttgaataataaccacgattccaacccaggtctgctttggggcttatcagaactcctttctaaggagcactagaatgagaaatcatgttgttcgatcgtttcacatctgtatatcagctctaaagcagagatgtattatggtgatactccaaggtggcatagccattcatttacaacttccagatttgagctgcctggagggaatccatatcagctctgcataagattatatacaaagctgtcactcacaaaaggctggatgtgctttcatccaactggaaggctttattcttccaagttcattcatactcaaagaggccagtactttgccatccttgcacttctgttatcagggcccaaataacagtggcaagctaccaactaagttgtattttaataaagattccatgggttgaacaagccacgttgcagaaaaagagcttcccctaacctgggttgttgcagagtaaatcccacgacataagctggtatcagtggttcgggggaaatagttccattctatgactcttgtctcctcctccaggaggactgttctaactagtaatcttggccctattcattacatcctctgcttgtcattctgctaatttatgaagatagtttattatagtctgtacttcagttctcatcttgtaaataatgcttaacataaacttgtacttacactgaaatccaaaatagtcatgtttctgcagtattctgtagccaacttaaacctgtgctttcatgtttaagaaatgagaaattgtgccaaagatagcagaagagtagataagtgctcagtattgacgacctacatctgaaatctacaacataatgatactgaattgttatgtaaacatcataaatagtaaataatgattcaatgtgaattttaaaatgcaaatattgctattgtttataggaaataaatctaaatataaatgaaattgaatcagtaatttatcttgggctaaatggttctaccccttactaggttgccccaattagtggcactagttggcagagctgttcatgagctgccagttatcattttggagtcagtttgaaaccagcctcttaacacactgctgttaactcataaaagagaagagtgttccatttcagtctcaataaacacttccctcattctttc

SEQ ID NO: 182754 - DNA, 726 bp, Homo sapiens
  Payload ID: 16010
  Gene Symbol: SLC1A1
  Gene Name: solute carrier family 1 (neuronal/epithelial high affinity glutamate transporter, system Xag), member 1
  ENST ID: ENST00000422398
  CDS Start-End: 1-726
tttcttcaatgctttgagtgatgcaaccatgaaaatcgttcagatcatcatgtgttatatgccactaggtattttgttcctgattgctgggaagatcatagaagttgaagactgggaaatattccgcaagctgggcctttacatggccacagtcctgactgggcttgcaatccactccattgtaattctcccgctgatatatttcatagtcgtacgaaagaaccctttccgatttgccatgggaatggcccaggctctcctgacagctctcatgatctcttccagttcagcaacactgcctgtcaccttccgctgtgctgaagaaaataaccaggtggacaagaggatcactcgattcgtgttacccgttggtgcaacaatcaacatggatgggactgcgctctatgaagcagtggcagcggtgtttattgcacagttgaatgacctggacttgggcattgggcagatcatcaccatcagggaccggttcaggaccatggtcaacgtccttggtgatgcttttgggacgggcattgtggaaaagctctccaagaaggagctggagcagatggatgtttcatctgaagtcaacattgtgaatccctttgccttggaatccacaatccttgacaacgaagactcagacaccaagaagtcttatgtcaatggaggctttgcagtagacaagtctgacaccatctcattcacccagacctcacagttcta

SEQ ID NO: 182755 - DNA, 1750 bp, Homo sapiens
  Payload ID: 16011
  Gene Symbol: SLC1A5
  Gene Name: solute carrier family 1 (neutral amino acid transporter), member 5
  Uniprot ID: Q15758
  ENST ID: ENST00000412532
  CDS Start-End: 223-1164
acgtggacaggacggggctttggggcccctggagcagagacttccctctagagtcttaggaaaactcgacaggatattgaggggaggctccagccctcgggagtaaatatcttcccttccaacctggtgtcagcagcctttcgctcatactctaccacctatgaagagaggaatatcaccggaaccagggtgaaggtgcccgtggggcaggaggtggaggggatgaacatcctgggcttggtagtgtttgccatcgtctttggtgtggcgctgcggaagctggggcctgaaggggagctgcttatccgcttcttcaactccttcaatgaggccaccatggttctggtctcctggatcatgtggtacgcccctgtgggcatcatgttcctggtggctggcaagatcgtggagatggaggatgtgggtttactctttgcccgccttggcaagtacattctgtgctgcctgctgggtcacgccatccatgggctcctggtactgcccctcatctacttcctcttcacccgcaaaaacccctaccgcttcctgtggggcatcgtgacgccgctggccactgcctttgggacctcttccagttccgccacgctgccgctgatgatgaagtgcgtggaggagaataatggcgtggccaagcacatcagccgtttcatcctgcccatcggcgccaccgtcaacatggacggtgccgcgctcttccagtgcgtggccgcagtgttcattgcacagctcagccagcagtccttggacttcgtaaagatcatcaccatcctggtcacggccacagcgtccagcgtgggggcagcgggcatccctgctggaggtgtcctcactctggccatcatcctcgaagcagtcaacctcccggtcgaccatatctccttgatcctggctgtggactggctagtcgaccggtcctgtaccgtcctcaatgtagaaggtgacgctctgggggcaggactcctccaaaattacgtggaccgtacggagtcgagaagcacagagcctgagttgatacaagtgaagagtgagctgcccctggatccgctgccagtccccactgaggaaggaaaccccctcctcaaacactatcgggggcccgcaggggatgccacggtcgcctctgagaaggaatcagtcatgtaaaccccgggagggaccttccctgccctgctgggggtgctctttggacactggattatgaggaatggataaatggatgagctagggctctgggggtctgcctgcacactctggggagccaggggccccagcaccctccaggacaggagatctgggatgcctggctgctggagtacatgtgttcacaagggttactcctcaaaacccccagttctcactcatgtccccaactcaaggctagaaaacagcaagatggagaaataatgttctgctgcgtccccaccgtgacctgcctggcctcccctgtctcagggagcaggtcacaggtcaccatggggaattctagcccccactggggggatgttacaacaccatgctggttattttggcggctgtagttgtggggggatgtgtgtgtgcacgtgtgtgtgtgtgtgtgtgtgtgtgtgtgtgtgtgtgttctgtgacctcctgtccccatggtacgtcccaccctgtccccagatcccctattccctccacaataacagaaacactcccagggactctggggagaggctgaggacaaatacctgctgtcactccagag

SEQ ID NO: 182756 - DNA, 1872 bp, Homo sapiens
  Payload ID: 16011
  Gene Symbol: SLC1A5
  Gene Name: solute carrier family 1 (neutral amino acid transporter), member 5
  Uniprot ID: Q15758
  ENST ID: ENST00000434726
  CDS Start-End: 228-1247
agcattcctcaccccgaacccacaatgcctcagggctagcacgccagcctcttggggctgaaggaggctgactccccaagtcctgcaaaggggtgcaagcctagttccaaccctgccgggctgaggcatgagtaggggctgtatttgcgtgcaggcgggcccccaaagcttccactcgctgccttaaaacgccaacccagcctctcagacaatgctgccctcccactatgtactctaccacctatgaagagaggaatatcaccggaaccagggtgaaggtgcccgtggggcaggaggtggaggggatgaacatcctgggcttggtagtgtttgccatcgtctttggtgtggcgctgcggaagctggggcctgaaggggagctgcttatccgcttcttcaactccttcaatgaggccaccatggttctggtctcctggatcatgtggtacgcccctgtgggcatcatgttcctggtggctggcaagatcgtggagatggaggatgtgggtttactctttgcccgccttggcaagtacattctgtgctgcctgctgggtcacgccatccatgggctcctggtactgcccctcatctacttcctcttcacccgcaaaaacccctaccgcttcctgtggggcatcgtgacgccgctggccactgcctttgggacctcttccagttccgccacgctgccgctgatgatgaagtgcgtggaggagaataatggcgtggccaagcacatcagccgtttcatcctgcccatcggcgccaccgtcaacatggacggtgccgcgctcttccagtgcgtggccgcagtgttcattgcacagctcagccagcagtccttggacttcgtaaagatcatcaccatcctggtcacggccacagcgtccagcgtgggggcagcgggcatccctgctggaggtgtcctcactctggccatcatcctcgaagcagtcaacctcccggtcgaccatatctccttgatcctggctgtggactggctagtcgaccggtcctgtaccgtcctcaatgtagaaggtgacgctctgggggcaggactcctccaaaattacgtggaccgtacggagtcgagaagcacagagcctgagttgatacaagtgaagagtgagctgcccctggatccgctgccagtccccactgaggaaggaaaccccctcctcaaacactatcgggggcccgcaggggatgccacggtcgcctctgagaaggaatcagtcatgtaaaccccgggagggaccttccctgccctgctgggggtgctctttggacactggattatgaggaatggataaatggatgagctagggctctgggggtctgcctgcacactctggggagccaggggccccagcaccctccaggacaggagatctgggatgcctggctgctggagtacatgtgttcacaagggttactcctcaaaacccccagttctcactcatgtccccaactcaaggctagaaaacagcaagatggagaaataatgttctgctgcgtccccaccgtgacctgcctggcctcccctgtctcagggagcaggtcacaggtcaccatggggaattctagcccccactggggggatgttacaacaccatgctggttattttggcggctgtagttgtggggggatgtgtgtgtgcacgtgtgtgtgtgtgtgtgtgtgtgtgtgtgtgtgtgtgttctgtgacctcctgtccccatggtacgtcccaccctgtccccagatcccctattccctccacaataacagaaacactcccagggactctggggagaggctgaggacaaatacctgctgtcactccagaggacattttttttagcaataaaattgagtgtcaactattt

SEQ ID NO: 182757 - DNA, 2882 bp, Homo sapiens
  Payload ID: 16011
  Gene Symbol: SLC1A5
  Gene Name: solute carrier family 1 (neutral amino acid transporter), member 5
  Uniprot ID: Q15758
  ENST ID: ENST00000542575
  CDS Start-End: 630-2255
agagccacgcggcacgcccgggaggctttctctggctggtaaccgctactcccggacaccagaccaccgccttccgtacacaggggcccgcatcccaccctcccggacctaagagcctgggtcccctgtttccggaggtccgcttcccggcccccagattctggcatcccagccctcagtgtccaagacccaggcagcccgggtccccgcctcccggatccaggcgtccgggatctgcgccaccagaacctagcctcctgcagacctccgccatctgggggcactcaacctcctggagccaagggccccacgtcccacccagagaaactctcgtattcccagctcctagggccaaggaacccgggcgctccgaactcccagctttcggacatctggcacacggggcagagcagagaagcctcagcgcccagcctggggaatttaaacactccagcttccaagagccaaggaacttcagtgctgtgaactcacaactctaaggagccctccaaagttccagtctccaggtgctgttactcaactcagtcctaggaacgtcgggtcctgggaaggagcccaagcgctcccagccagcttccaggcgctaagaaaccccggtgcttcccatcatggtggccgatcctcctcgagactccaaggggctcgcagcggcggagcccaccgccaacgggggcctggcgctggcctccatcgaggaccaaggcgcggcagcaggcggctactgcggttcccgggaccaggtgcgccgctgccttcgagccaacctgcttgtgctgctgacagtggtggccgtggtggccggcgtggcgctgggactgggggtgtcgggggccgggggtgcgctggcgttgggcccggagcgcttgagcgccttcgtcttcccgggcgagctgctgctgcgtctgctgcggatgatcatcttgccgctggtggtgtgcagcttgatcggcggcgccgccagcctggaccccggcgcgctcggccgtctgggcgcctgggcgctgctctttttcctggtcaccacgctgctggcgtcggcgctcggagtgggcttggcgctggctctgcagccgggcgccgcctccgccgccatcaacgcctccgtgggagccgcgggcagtgccgaaaatgcccccagcaaggaggtgctcgattcgttcctggatcttgcgagaaatatcttcccttccaacctggtgtcagcagcctttcgctcatactctaccacctatgaagagaggaatatcaccggaaccagggtgaaggtgcccgtggggcaggaggtggaggggatgaacatcctgggcttggtagtgtttgccatcgtctttggtgtggcgctgcggaagctggggcctgaaggggagctgcttatccgcttcttcaactccttcaatgaggccaccatggttctggtctcctggatcatgtggtacgcccctgtgggcatcatgttcctggtggctggcaagatcgtggagatggaggatgtgggtttactctttgcccgccttggcaagtacattctgtgctgcctgctgggtcacgccatccatgggctcctggtactgcccctcatctacttcctcttcacccgcaaaaacccctaccgcttcctgtggggcatcgtgacgccgctggccactgcctttgggacctcttccagttccgccacgctgccgctgatgatgaagtgcgtggaggagaataatggcgtggccaagcacatcagccgtttcatcctgcccatcggcgccaccgtcaacatggacggtgccgcgctcttccagtgcgtggccgcagtgttcattgcacagctcagccagcagtccttggacttcgtaaagatcatcaccatcctggtcacggccacagcgtccagcgtgggggcagcgggcatccctgctggaggtgtcctcactctggccatcatcctcgaagcagtcaacctcccggtcgaccatatctccttgatcctggctgtggactggctagtcgaccggtcctgtaccgtcctcaatgtagaaggtgacgctctgggggcaggactcctccaaaattacgtggaccgtacggagtcgagaagcacagagcctgagttgatacaagtgaagagtgagctgcccctggatccgctgccagtccccactgaggaaggaaaccccctcctcaaacactatcgggggcccgcaggggatgccacggtcgcctctgagaaggaatcagtcatgtaaaccccgggagggaccttccctgccctgctgggggtgctctttggacactggattatgaggaatggataaatggatgagctagggctctgggggtctgcctgcacactctggggagccaggggccccagcaccctccaggacaggagatctgggatgcctggctgctggagtacatgtgttcacaagggttactcctcaaaacccccagttctcactcatgtccccaactcaaggctagaaaacagcaagatggagaaataatgttctgctgcgtccccaccgtgacctgcctggcctcccctgtctcagggagcaggtcacaggtcaccatggggaattctagcccccactggggggatgttacaacaccatgctggttattttggcggctgtagttgtggggggatgtgtgtgtgcacgtgtgtgtgtgtgtgtgtgtgtgtgtgtgtgtgtgtgttctgtgacctcctgtccccatggtacgtcccaccctgtccccagatcccctattccctccacaataacagaaacactcccagggactctggggagaggctgaggacaaatacctgctgtcactccagaggacattttttttagcaataaaattgagtgtcaactatttaa

SEQ ID NO: 182758 - DNA, 774 bp, Homo sapiens
  Payload ID: 16011
  Gene Symbol: SLC1A5
  Gene Name: solute carrier family 1 (neutral amino acid transporter), member 5
  ENST ID: ENST00000593713
  CDS Start-End: 1-774
gcacgccagcctcttggggctgaaggaggctgactccccaagtcctgcaaaggggtgcaagcctagttccaaccctgccgggctgagaaatatcttcccttccaacctggtgtcagcagcctttcgctcatactctaccacctatgaagagaggaatatcaccggaaccagggtgaaggtgcccgtggggcaggaggtggaggggatgaacatcctgggcttggtagtgtttgccatcgtctttggtgtggcgctgcggaagctggggcctgaaggggagctgcttatccgcttcttcaactccttcaatgaggccaccatggttctggtctcctggatcatgtggtacgcccctgtgggcatcatgttcctggtggctggcaagatcgtggagatggaggatgtgggtttactctttgcccgccttggcaagtacattctgtgctgcctgctgggtcacgccatccatgggctcctggtactgcccctcatctacttcctcttcacccgcaaaaacccctaccgcttcctgtggggcatcgtgacgccgctggccactgcctttgggacctcttccagttccgccacgctgccgctgatgatgaagtgcgtggaggagaataatggcgtggccaagcacatcagccgtttcatcctgcccatcggcgccaccgtcaacatggacggtgccgcgctcttccagtgcgtggccgcagtgttcattgcacagctcagccagcagtccttggacttcgtaaagatcatcaccatcct

SEQ ID NO: 182759 - DNA, 2031 bp, Homo sapiens
  Payload ID: 16011
  Gene Symbol: SLC1A5
  Gene Name: solute carrier family 1 (neutral amino acid transporter), member 5
  ENST ID: ENST00000594991
  CDS Start-End: 309-1406
aagctgtccagggtattaagtttgctgcatggggtggagctgaggcccggggcgacctgccctggcctgccgtgggaggccagcattcctcaccccgaacccacaatgcctcagggctagcacgccagcctcttggggctgaaggaggctgactccccaagtcctgcaaaggggtgcaagcctagttccaaccctgccgggctgaggcatgagtaggggctgtatttgcgtgcaggcgggcccccaaagcttccactcgctgccttaaaacgccaacccagcctctcagacaatgctgccctcccactatggtatctaataaccctctgtgtgtctgtctctgcagaaatatcttcccttccaacctggtgtcagcagcctttcgctcatactctaccacctatgaagagaggaatatcaccggaaccagggtgaaggtgcccgtggggcaggaggtggaggggatgaacatcctgggcttggtagtgtttgccatcgtctttggtgtggcgctgcggaagctggggcctgaaggggagctgcttatccgcttcttcaactccttcaatgaggccaccatggttctggtctcctggatcatgtggtacgcccctgtgggcatcatgttcctggtggctggcaagatcgtggagatggaggatgtgggtttactctttgcccgccttggcaagtacattctgtgctgcctgctgggtcacgccatccatgggctcctggtactgcccctcatctacttcctcttcacccgcaaaaacccctaccgcttcctgtggggcatcgtgacgccgctggccactgcctttgggacctcttccagttccgccacgctgccgctgatgatgaagtgcgtggaggagaataatggcgtggccaagcacatcagccgtttcatcctgcccatcggcgccaccgtcaacatggacggtgccgcgctcttccagtgcgtggccgcagtgttcattgcacagctcagccagcagtccttggacttcgtaaagatcatcaccatcctggtcacggccacagcgtccagcgtgggggcagcgggcatccctgctggaggtgtcctcactctggccatcatcctcgaagcagtcaacctcccggtcgaccatatctccttgatcctggctgtggactggctagtcgaccggtcctgtaccgtcctcaatgtagaaggtgacgctctgggggcaggactcctccaaaattacgtggaccgtacggagtcgagaagcacagagcctgagttgatacaagtgaagagtgagctgcccctggatccgctgccagtccccactgaggaaggaaaccccctcctcaaacactatcgggggcccgcaggggatgccacggtcgcctctgagaaggaatcagtcatgtaaaccccgggagggaccttccctgccctgctgggggtgctctttggacactggattatgaggaatggataaatggatgagctagggctctgggggtctgcctgcacactctggggagccaggggccccagcaccctccaggacaggagatctgggatgcctggctgctggagtacatgtgttcacaagggttactcctcaaaacccccagttctcactcatgtccccaactcaaggctagaaaacagcaagatggagaaataatgttctgctgcgtccccaccgtgacctgcctggcctcccctgtctcagggagcaggtcacaggtcaccatggggaattctagcccccactggggggatgttacaacaccatgctggttattttggcggctgtagttgtggggggatgtgtgtgtgcacgtgtgtgtgtgtgtgtgtgtgtgtgtgtgtgtgtgtgttctgtgacctcctgtccccatggtacgtcccaccctgtccccagatcccctattccctccacaataacagaaacactcccagggactctggggagaggctgaggacaaatacctgctgtcactccagaggacattttttttagcaataaaattgagtgtcaactattt

SEQ ID NO: 182760 - DNA, 276 bp, Homo sapiens
  Payload ID: 16011
  Gene Symbol: SLC1A5
  Gene Name: solute carrier family 1 (neutral amino acid transporter), member 5
  ENST ID: ENST00000598022
  CDS Start-End: 190-276
acaatgcctcagggctagcacgccagcctcttggggctgaaggaggctgactccccaagtcctgcaaagggaaatatcttcccttccaacctggtgtcagcagcctttcgctcatactctaccacctatgaagagaggaatatcaccggaaccagggtgaaggtgcccgtggggcaggaggtggaggggatgaacatcctgggcttggtagtgtttgccatcgtctttggtgtggcgctgcggaagctggggcctgaaggggagctgcttatccgc

SEQ ID NO: 182761 - DNA, 2049 bp, Homo sapiens
  Payload ID: 16012
  Gene Symbol: SLC10A1
  Gene Name: solute carrier family 10 (sodium/bile acid cotransporter), member 1
  Uniprot ID: Q14973
  ENST ID: ENST00000216540
  CDS Start-End: 135-1184
ttctatttgcccagagcttttgtccagaaactctctgtcctgagaggtgattaaagaaggcatccagcaagaactgcacaagaaacggagtcagccggagaacaaggagtggtcttccactgcctcacaggaggatggaggcccacaacgcgtctgccccattcaacttcaccctgccacccaactttggcaagcgccccacagacctggcactgagcgtcatcctggtgttcatgttgttcttcatcatgctctcgctgggctgcaccatggagttcagcaagatcaaggctcacttatggaagcctaaagggctggccatcgccctggtggcacagtatggcatcatgcccctcacggcctttgtgctgggcaaggtcttccggctgaagaacattgaggcactggccatcttggtctgtggctgctcacctggagggaacctgtccaatgtcttcagtctggccatgaagggggacatgaacctcagcattgtgatgaccacctgctccaccttctgtgcccttggcatgatgcctctcctcctgtacatctactccagggggatctatgatggggacctgaaggacaaggtgccctataaaggcatcgtgatatcactggtcctggttctcattccttgcaccatagggatcgtcctcaaatccaaacggccacaatacatgcgctatgtcatcaagggagggatgatcatcattctcttgtgcagtgtggccgtcacagttctctctgccatcaatgtggggaagagcatcatgtttgccatgacaccactcttgattgccacctcctccctgatgccttttattggctttctgctgggttatgttctctctgctctcttctgcctcaatggacggtgcagacgcactgtcagcatggagactggatgccaaaatgtccaactctgttccaccatcctcaatgtggcctttccacctgaagtcattggaccacttttcttctttcccctcctctacatgattttccagcttggagaagggcttctcctcattgccatattttggtgctatgagaaattcaagactcccaaggataaaacaaaaatgatctacacagctgccacaactgaagaaacaattccaggagctctgggaaatggcacctacaaaggggaggactgctccccttgcacagcctagcccttcccctggtggcctggattctggtcccaaagcaattctgaaagccagtgtggtaaactagagagagcagcaaaaacaccagtcttgcctgagtctttctccagcatttccagtacatctatcagaatcatcaagtcttggccgggaacacagacagggtgtctacccaagaagcctcacctatccccaacttagaatttgctacttattttaaagacttgttcagtgactgtaaactctatgaaaccagaaaccgaatctgcctcttgctgggatctctaaaagtgtctgataagcatcttaaagtcactcaattcctgaactaatcaatatatatgtttaacccattactcaaatacccaaatcccattccaagttttgtgacccaaaagagaaataaatgctcacaagtgctgtagaattaaacttcagaagttctaacctaaaaagttcagatcctattccttcccttttgacattattgggatgatgctcccgaaaagtcaaatttgacatcaagtatgcaaaagtgaacacagtaagatgcaatcaggcaaaacaaactcaaaaaatagctaatgaaatgaaaaaactgggcgaatgcatcatgttagtagaggaggaaaacttttgacaaggaaaaaccaggaaacaaacacatacattaacacaatgttacctcactaataatctcttttttaagttcagtaggtatttggttttaacacaaggcgcccccaaaactgggtacagcaaactactgccaaaatgagtcgtttcccaattcaaagaaaaatgttcaaatacctagaattcacaaatttcaaattgtctctaataaaatttaaacattttgcatatc

SEQ ID NO: 182762 - DNA, 3779 bp, Homo sapiens
  Payload ID: 16013
  Gene Symbol: SLC10A2
  Gene Name: solute carrier family 10 (sodium/bile acid cotransporter), member 2
  Uniprot ID: Q12908
  ENST ID: ENST00000245312
  CDS Start-End: 598-1644
ttctattgaaagggaaatgggagaacaatatgtgttcctatggctcagtccctataagattctgtactattcagagttgattttaagtgtcacttaactgaaattatccaacaaaccttcatggcatgaaacattaacacagctctttttatatggcatggttcctatggctcaatccctataagattctgtactattcagagttgattttaaaagtcacttaactgaaattatccaacaaaccctcgaggacattaaacattaacgtggctctttttatatggcatggttcattatcatgccaataaatgattaatcgtaactctctgtcttgaccaataattttgctggacttttgtgattcacaacgtgctctgtgttgtaatgctacctcttgaaactgacatcctagctttattgttttttattacttccctaaggtggctttcaaaagagacaccaagtgacatatttttaggaggggtttaaaagtttgatggggtagaagtaaacgttgcttaactcaaccagcagcagagccagggcccagggaccagcgcttctgtggacttggcctttccagcagcagacccagcaatgaatgatccgaacagctgtgtggacaatgcaacagtttgctctggtgcatcctgtgtggtacctgagagcaatttcaataacatcctaagtgtggtcctaagtacggtgctgaccatcctgttggccttggtgatgttctccatgggatgcaacgtggaaatcaagaaatttctagggcacataaagcggccgtggggcatttgtgttggcttcctctgtcagtttggaatcatgcccctcacaggattcatcctgtcggtggcctttgacatcctcccgctccaggccgtagtggtgctcattataggatgctgccctggaggaactgcctccaatatcttggcctattgggtcgatggcgacatggacctgagcgtcagcatgaccacatgctccacactgcttgccctcggaatgatgccgctgtgcctccttatctataccaaaatgtgggtcgactctgggagcatcgtaattccctatgataacataggtacatctctggtttctctcgttgttcctgtttccattggaatgtttgttaatcacaaatggccccaaaaagcaaagatcatacttaaaattgggtccatcgcgggcgccatcctcattgtgctcatagctgtggttggaggaatattgtaccaaagcgcctggatcattgctcccaaactgtggattataggaacaatatttcctgtggcgggttactccctggggtttcttctggctagaattgctggtctaccctggtacaggtgccgaacggttgcttttgaaacggggatgcagaacacgcagctatgttccaccatcgttcagctctccttcactcctgaggagctcaatgtcgtattcaccttcccgctcatctacagcattttccagctcgcctttgccgcaatattcttaggattttatgtggcatacaagaaatgtcatggaaaaaacaaggcagaaattccagagagcaaagaaaatggaacggagccagagtcatcgttttataaggcaaatggaggatttcaacctgacgaaaagtagacatcaagtggacaaaacagacgagttccaaattacgttcttaaaccgtaactatatttaattatttgttttggtaggacagttggcagaaaagagttaaagtgaaaattggaatttcattggaattcatgtattggtttcagtaccaagtgactggtggcccaattctttaatgggacaaatattgtttcctatatatatgtatatgttttatatatgtatgtatactcatatagatatattgtcattgaaatattcccccaaaatattctcagactaaacctgacatagggaacaccgagaatgaaaacatctttaacaccaaaactgaattcttatgcagaatttcctagcccatagatgacaacctgactttctgtatgttaaagtagatgtaatgaattattattattacagtggtcacgattttcttcagtgtttatgattataaaaattgacatgaacatctttcactgacattttaatcattattttaaaagctttgcaacctatatatttatataactttgtaatataacatgggcaaatatctgacttctgtatttttaaaaagttgccttctccagtggcagtccaaaagcagaaatgagaggaaattattacaaaatagaattcaataaccatattggatgcaggctcttaactcagcagggatatcgtacatctattgctctacctcaggggtccagtgatacccactagatcttccaaggaaaaacataattctttcaaacggtgtgtatttggcaaagagctcttcaaatctgggagagggacttcctcaaggttttcctgtgtgcagtggatccacatagctaatatgacagctagtcagttgacagggaccacccacagtaagcaccatggtcagggaggtggcaggaggtgcaaagacagaagtattgagagaaacaccaagactctagtggaggaattaattcaatgggagatagtataaaatacatagaaaacacaagtaacagaaacctggttgaaatgcttaactagagtcaattagatgtgcaggagtaagtagtataagaagaatcaagtccgagagtgatcaggaaatgagtattaaacagtatttgaaacagagaacgtgtcccagggcccaaaagtcagaagggccccaccagccaggaaagttgtttcaatgctgtaagtaggtgtagccaagggaagccaggactatctgatatacggtagcaggggtttacggctgccaggggaaaataactcatcaagtgttggactttcaattataagatcgaatttaatttcctttccctcattctgcagcaatcagaatacacaatcttaaccactcggtccttagtggttttgttccattttgcattgggtattttcactgcctcatagagtctatttcaagtgttttggctgaaagggctttttgcatttgcatgttctgagttcagattctgctggtgcacccaagcattatgggaacaggaactcaacttagctcttccagtagaggggtgagggattctgcttttcaaattcataacattgatctttttatgcaagatttccatttacagttgaataagtacttcatatttttccatcattagacaaatacaaaatggactaaataattttaagagatagtggaggagagggggtacagacttccttcttagagagtgtcagagaatatgctcccaatggtggaaaggaagatttacagtctagcggctaagtacctcctacacatttcccatcaatcagaaaatagacaggtacactaaagggaccctgagaactcctcttgtaatttcaacacacccaaaatcaagggcctggatgccagcagctgcagcaagcaggtttttcctccctgttgagcaagacaggtgagcaagataggacttggctttcttacatgatgcggtaacttgtgacttgagtctttttccctaatttgctagtgggaagaaaaatagctgagctttctaaaatgatagctctctatttttaaatgaatttgaaaagtcgattaaattatgtattttattgcctctgagtatcatattaaatgaatattttattttaaaggcttaaataaatgaaaatgatttttgtaa

SEQ ID NO: 182763 - DNA, 1502 bp, Homo sapiens
  Payload ID: 16014
  Gene Symbol: SLC10A6
  Gene Name: solute carrier family 10 (sodium/bile acid cotransporter), member 6
  Uniprot ID: Q3KNW5
  ENST ID: ENST00000273905
  CDS Start-End: 149-1282
ttaggatgaatcaccttgctggccaacagttattggaatgattctccatgtgtgacttcgttgcactattacaaaatgtggcaggatagacctgcccagccattgttgccgatgttcatttgtaatgctgccttaaggagatgaggagatgagagccaattgttccagcagctcagcctgccctgccaacagttcagaggaggagctgccagtgggactggaggtgcatggaaacctggagctcgttttcacagtggtgtccactgtgatgatggggctgctcatgttctctttgggatgttccgtggagatccggaagctgtggtcgcacatcaggagaccctggggcattgctgtgggactgctctgccagtttgggctcatgccttttacagcttatctcctggccattagcttttctctgaagccagtccaagctattgctgttctcatcatgggctgctgcccggggggcaccatctctaacattttcaccttctgggttgatggagatatggatctcagcatcagtatgacaacctgttccaccgtggccgccctgggaatgatgccactctgcatttatctctacacctggtcctggagtcttcagcagaatctcaccattccttatcagaacataggaattacccttgtgtgcctgaccattcctgtggcctttggtgtctatgtgaattacagatggccaaaacaatccaaaatcattctcaagattggggccgttgttggtggggtcctccttctggtggtcgcagttgctggtgtggtcctggcgaaaggatcttggaattcagacatcacccttctgaccatcagtttcatctttcctttgattggccatgtcacgggttttctgctggcactttttacccaccagtcttggcaaaggtgcaggacaatttccttagaaactggagctcagaatattcagatgtgcatcaccatgctccagttatctttcactgctgagcacttggtccagatgttgagtttcccactggcctatggactcttccagctgatagatggatttcttattgttgcagcatatcagacgtacaagaggagattgaagaacaaacatggaaaaaagaactcaggttgcacagaagtctgccatacgaggaaatcgacttcttccagagagaccaatgccttcttggaggtgaatgaagaaggtgccatcactcctgggccaccagggccaatggattgccacagggctctcgagccagttggccacatcacttcatgtgaatagcagggactagctggctggactggcccccttctttttcagtggccagtaaagacagtgtgcagctgacacatgaatcttgttggtagggccagtgtgaatatttaagtgttcaatgttagaatatttatattttcatgtggattgtgaattgtgatgggatcacttttggagattcccatttcagggagtttcttctgggggttaacataacgtatcaatg

SEQ ID NO: 182764 - DNA, 2161 bp, Homo sapiens
  Payload ID: 16015
  Gene Symbol: SLC10A3
  Gene Name: solute carrier family 10, member 3
  Uniprot ID: P09131
  ENST ID: ENST00000263512
  CDS Start-End: 527-1960
gaggggcttcggtggggcggggccctgacaggccgagctcgcgggcgactgccggccaggcagacgctgcagctaagctgcgcggtggctgtggcaggtgagagcctccggaagggaggcggcctctggccccgaccctgctccgcgatcgcccactcgggcgcccggccgggcctggcagggaagggccgccgccgccgccgcgcgtttgcgaggcctggcggggccgcggggcccaggaatggcgtaaggggcccccccagactccgagacggcccgagcgggtcgccggctgtgggacggcggcgtgcccttcctttcctccctcccaggttcgcgcccgagctctgctagccacccgtccgacaacttccggactcccagggacagccctgccatcaaggaagacagcacaggactgggacccacccatgaacccttctcaggacaacccaacagcaccagtggggatgttctcctaagccgcagagggcctgggcacgccatccgtcctccaggaagagccatggtgttaatgcaggacaagggcagctctcagcagtggcctggtctggggggcgagggtggtggcacaggtcccttaagcatgctcagagctgccctgctgctcatcagcctgccatggggggcccaagggacagccagcaccagcctcagcactgctgggggtcacaccgtgccaccgactgggggccgctacttgagcattggagatggctctgtgatggagtttgagtttcctgaggacagtgagggcatcatcgtgatctccagccagtacccaggccaggccaacaggacggcgcctggccccatgctcagggtcacctccctggacacagaggtgctgaccatcaagaacgtgagtgctataacctggggaggcgggggtggctttgtggtgagcatccactcaggcctggctgggctggccccactccacatccagctcgtggacgcccatgaggccccgcccacactgattgaggagcggagagacttctgcatcaaggtctcacctgctgaagacacgcctgccaccctcagcgccgacctggcccacttctcggaaaacccaatcctctacctgctcctgcctcttatctttgtcaacaagtgttcgtttgggtgcaaagtggaactcgaggttctgaaggggctcatgcagagcccccagcccatgctgctgggcctcctgggccagtttctggtcatgcccttgtacgctttcctcatggccaaggtcttcatgctgcccaaggccctggctctgggcctcatcatcacctgctcgtcgcctggcggcggggggagctacctcttcagcctccttcttggaggggacgtcaccctggccatctccatgactttcctctctacggtggctgccactggcttcttgcctctgtcttcggccatctacagccgcctgctcagcatccatgagacgctccacgtgcccatctccaagatcctggggaccctgctgttcattgccatccccatagccgtgggcgtgctgatcaagtccaagctccccaagttctcccagctgctgctgcaggtcgtcaagcccttcagctttgtgctcctcctgggcggcctcttcctggcctatcgcatgggggtcttcatcctggcaggcatccggctacccatcgtactggtgggtatcacggtgcccctggttggcctgttggtgggctactgcctagccacgtgtctgaagctgccagtggcccagcggcggacggtcagcattgaggtaggggtgcagaacagcctgctggccttggccatgctgcagctatccctccgccgccttcaagctgactatgcctcccaggcccccttcattgtggcgctgagcggcacctccgagatgctggccttggtcattggccacttcatctacagcagcctgttcccagttccctgaggcctctgggtcaagctttcatcagccccagcccccacactccaccaaagttctcatgcactatgcactcagaaaaatccaggcttattttttttactgattttttattctccagctttcagtgccaaagaggccatgctgagttaggtaggtgggcgctgcccagaaaatatatttcaataaaagagagaagcaagcttg

SEQ ID NO: 182765 - DNA, 1763 bp, Homo sapiens
  Payload ID: 16015
  Gene Symbol: SLC10A3
  Gene Name: solute carrier family 10, member 3
  Uniprot ID: P09131
  ENST ID: ENST00000369649
  CDS Start-End: 216-1562
gctgcgcggtggctgtggcaggttcgcgcccgagctctgctagccacccgtccgacaacttccggactcccagggacagccctgccatcaaggaagacagcacaggactgggacccacccatgaacccttctcaggacaacccaacagcaccagtggggatgttctcctaagccgcagagggcctgggcacgccatccgtcctccaggaagagccatggtgttaatgcaggacaagggcagctctcagcagtggcctggtctggggggcgagggtggtggcacaggtcccttaagcatgctcagagctgccctgctgctcatcagcctgccatggggggcccaagggacagccagcaccagcctcagcactgctgggggtcacaccgtgccaccgactgggggccgctacttgagcattggagatggctctgtgatggagtttgagtttcctgaggacagtgagggcatcatcgtgatctccagccagtacccaggccaggccaacaggacggcgcctggccccatgctcagggtcacctccctggacacagaggtgctgaccatcaagaacctcgtggacgcccatgaggccccgcccacactgattgaggagcggagagacttctgcatcaaggtctcacctgctgaagacacgcctgccaccctcagcgccgacctggcccacttctcggaaaacccaatcctctacctgctcctgcctcttatctttgtcaacaagtgttcgtttgggtgcaaagtggaactcgaggttctgaaggggctcatgcagagcccccagcccatgctgctgggcctcctgggccagtttctggtcatgcccttgtacgctttcctcatggccaaggtcttcatgctgcccaaggccctggctctgggcctcatcatcacctgctcgtcgcctggcggcggggggagctacctcttcagcctccttcttggaggggacgtcaccctggccatctccatgactttcctctctacggtggctgccactggcttcttgcctctgtcttcggccatctacagccgcctgctcagcatccatgagacgctccacgtgcccatctccaagatcctggggaccctgctgttcattgccatccccatagccgtgggcgtgctgatcaagtccaagctccccaagttctcccagctgctgctgcaggtcgtcaagcccttcagctttgtgctcctcctgggcggcctcttcctggcctatcgcatgggggtcttcatcctggcaggcatccggctacccatcgtactggtgggtatcacggtgcccctggttggcctgttggtgggctactgcctagccacgtgtctgaagctgccagtggcccagcggcggacggtcagcattgaggtaggggtgcagaacagcctgctggccttggccatgctgcagctatccctccgccgccttcaagctgactatgcctcccaggcccccttcattgtggcgctgagcggcacctccgagatgctggccttggtcattggccacttcatctacagcagcctgttcccagttccctgaggcctctgggtcaagctttcatcagccccagcccccacactccaccaaagttctcatgcactatgcactcagaaaaatccaggcttattttttttactgattttttattctccagctttcagtgccaaagaggccatgctgagttaggtaggtgggcgctgcccagaaaatatatttcaataaaagagagaagcaagcttg

SEQ ID NO: 182766 - DNA, 1893 bp, Homo sapiens
  Payload ID: 16015
  Gene Symbol: SLC10A3
  Gene Name: solute carrier family 10, member 3
  ENST ID: ENST00000393586
  CDS Start-End: 99-1697
gacgctgcagctaagctgcgcggtggctgtggcagctcctgtactttgcctctcccaccccactggttttcctgcctccctcttcagaggtaagacacatggctggaccaaggcctccaggggacagccctgccatcaaggaagacagcacaggactgggacccacccatgaacccttctcaggacaacccaacagcaccagtggggatgttctcctaagccgcagagggcctgggcacgccatccgtcctccaggaagagccatggtgttaatgcaggacaagggcagctctcagcagtggcctggtctggggggcgagggtggtggcacaggtcccttaagcatgctcagagctgccctgctgctcatcagcctgccatggggggcccaagggacagccagcaccagcctcagcactgctgggggtcacaccgtgccaccgactgggggccgctacttgagcattggagatggctctgtgatggagtttgagtttcctgaggacagtgagggcatcatcgtgatctccagccagtacccaggccaggccaacaggacggcgcctggccccatgctcagggtcacctccctggacacagaggtgctgaccatcaagaacgtgagtgctataacctggggaggcgggggtggctttgtggtgagcatccactcaggcctggctgggctggccccactccacatccagctcgtggacgcccatgaggccccgcccacactgattgaggagcggagagacttctgcatcaaggtctcacctgctgaagacacgcctgccaccctcagcgccgacctggcccacttctcggaaaacccaatcctctacctgctcctgcctcttatctttgtcaacaagtgttcgtttgggtgcaaagtggaactcgaggttctgaaggggctcatgcagagcccccagcccatgctgctgggcctcctgggccagtttctggtcatgcccttgtacgctttcctcatggccaaggtcttcatgctgcccaaggccctggctctgggcctcatcatcacctgctcgtcgcctggcggcggggggagctacctcttcagcctccttcttggaggggacgtcaccctggccatctccatgactttcctctctacggtggctgccactggcttcttgcctctgtcttcggccatctacagccgcctgctcagcatccatgagacgctccacgtgcccatctccaagatcctggggaccctgctgttcattgccatccccatagccgtgggcgtgctgatcaagtccaagctccccaagttctcccagctgctgctgcaggtcgtcaagcccttcagctttgtgctcctcctgggcggcctcttcctggcctatcgcatgggggtcttcatcctggcaggcatccggctacccatcgtactggtgggtatcacggtgcccctggttggcctgttggtgggctactgcctagccacgtgtctgaagctgccagtggcccagcggcggacggtcagcattgaggtaggggtgcagaacagcctgctggccttggccatgctgcagctatccctccgccgccttcaagctgactatgcctcccaggcccccttcattgtggcgctgagcggcacctccgagatgctggccttggtcattggccacttcatctacagcagcctgttcccagttccctgaggcctctgggtcaagctttcatcagccccagcccccacactccaccaaagttctcatgcactatgcactcagaaaaatccaggcttattttttttactgattttttattctccagctttcagtgccaaagaggccatgctgagttaggtaggtgggcgctgcccagaaaatatatttcaataaaagagagaagcaa

SEQ ID NO: 182767 - DNA, 1862 bp, Homo sapiens
  Payload ID: 16015
  Gene Symbol: SLC10A3
  Gene Name: solute carrier family 10, member 3
  Uniprot ID: P09131
  ENST ID: ENST00000393587
  CDS Start-End: 265-1698
acaggccgagctcgcgggcgactgccggccaggcagacgctgcagctaagctgcgcggtggctgtggcaggttcgcgcccgagctctgctagccacccgtccgacaacttccggactcccagggacagccctgccatcaaggaagacagcacaggactgggacccacccatgaacccttctcaggacaacccaacagcaccagtggggatgttctcctaagccgcagagggcctgggcacgccatccgtcctccaggaagagccatggtgttaatgcaggacaagggcagctctcagcagtggcctggtctggggggcgagggtggtggcacaggtcccttaagcatgctcagagctgccctgctgctcatcagcctgccatggggggcccaagggacagccagcaccagcctcagcactgctgggggtcacaccgtgccaccgactgggggccgctacttgagcattggagatggctctgtgatggagtttgagtttcctgaggacagtgagggcatcatcgtgatctccagccagtacccaggccaggccaacaggacggcgcctggccccatgctcagggtcacctccctggacacagaggtgctgaccatcaagaacgtgagtgctataacctggggaggcgggggtggctttgtggtgagcatccactcaggcctggctgggctggccccactccacatccagctcgtggacgcccatgaggccccgcccacactgattgaggagcggagagacttctgcatcaaggtctcacctgctgaagacacgcctgccaccctcagcgccgacctggcccacttctcggaaaacccaatcctctacctgctcctgcctcttatctttgtcaacaagtgttcgtttgggtgcaaagtggaactcgaggttctgaaggggctcatgcagagcccccagcccatgctgctgggcctcctgggccagtttctggtcatgcccttgtacgctttcctcatggccaaggtcttcatgctgcccaaggccctggctctgggcctcatcatcacctgctcgtcgcctggcggcggggggagctacctcttcagcctccttcttggaggggacgtcaccctggccatctccatgactttcctctctacggtggctgccactggcttcttgcctctgtcttcggccatctacagccgcctgctcagcatccatgagacgctccacgtgcccatctccaagatcctggggaccctgctgttcattgccatccccatagccgtgggcgtgctgatcaagtccaagctccccaagttctcccagctgctgctgcaggtcgtcaagcccttcagctttgtgctcctcctgggcggcctcttcctggcctatcgcatgggggtcttcatcctggcaggcatccggctacccatcgtactggtgggtatcacggtgcccctggttggcctgttggtgggctactgcctagccacgtgtctgaagctgccagtggcccagcggcggacggtcagcattgaggtaggggtgcagaacagcctgctggccttggccatgctgcagctatccctccgccgccttcaagctgactatgcctcccaggcccccttcattgtggcgctgagcggcacctccgagatgctggccttggtcattggccacttcatctacagcagcctgttcccagttccctgaggcctctgggtcaagctttcatcagccccagcccccacactccaccaaagttctcatgcactatgcactcagaaaaatccaggcttattttttttactgattttttattctccagctttcagtgccaaagaggccatgctgagttaggtaggtgggcgctgccc

SEQ ID NO: 182768 - DNA, 1167 bp, Homo sapiens
  Payload ID: 16015
  Gene Symbol: SLC10A3
  Gene Name: solute carrier family 10, member 3
  ENST ID: ENST00000453912
  CDS Start-End: 514-1167
ggggcggggccctgacaggccgagctcgcgggcgactgccggccaggcagacgctgcagctaagctgcgcggtggctgtggcaggtgagagcctccggaagggaggcggcctctggccccgaccctgctccgcgatcgcccactcgggcgcccggccgggcctggcagggaagggccgccgccgccgccgcgcgtttgcgaggcctggcggggccgcggggcccaggaatggcgtaaggggcccccccagactccgagacggcccgagcgggtcgccggctgtgggacggcggcgtgcccttcctttcctccctcccaggttcgcgcccgagctctgctagccacccgtccgacaacttccggactcccagggacagccctgccatcaaggaagacagcacaggactgggacccacccatgaacccttctcaggacaacccaacagcaccagtggggatgttctcctaagccgcagagggcctgggcacgccatccgtcctccaggaagagccatggtgttaatgcaggacaagggcagctctcagcagtggcctggtctggggggcgagggtggtggcacaggtcccttaagcatgctcagagctgccctgctgctcatcagcctgccatggggggcccaagggacagccagcaccagcctcagcactgctgggggtcacaccgtgccaccgactgggggccgctacttgagcattggagatggctctgtgatggagtttgagtttcctgaggacagtgagggcatcatcgtgatctccagccagtacccaggccaggccaacaggacggcgcctggccccatgctcagggtcacctccctggacacagaggtgctgaccatcaagaacgtgagtgctataacctggggaggcgggggtggctttgtggtgagcatccactcaggcctggctgggctggccccactccacatccagctcgtggacgcccatgaggccccgcccacactgattgaggagcggagagacttctgcatcaaggtctcacctgctgaagacacgcctgccaccctcagcgccgacctggcccacttctcggaaaacccaatcctctacctgctcctgcctcttatctttgtcaacaagtgttcgtttgggtgcaaagtggaactcgaggttctgaagggg

SEQ ID NO: 182769 - DNA, 1790 bp, Homo sapiens
  Payload ID: 16016
  Gene Symbol: SLC10A4
  Gene Name: solute carrier family 10, member 4
  Uniprot ID: Q96EP9
  ENST ID: ENST00000273861
  CDS Start-End: 220-1533
acccggggggccgcgctgcgcggagtgccaggctgcgggcggctgcagacctgggagcggagaccggcccgccgcccccgacgccgccgagcacgtcagcggcgcgcagccggggctcggagaccgacgggcagaacgacgggcggcgactgcggcgaccgcgggacggcgagaggcacgcggcgggaggggaccggaatccgcagctccggccgcgccatggacggcaacgacaacgtgaccctgctcttcgcccctctgctgcgggacaactacaccctggcgcccaatgccagcagcctgggccccggcacggacctcgccctcgcccctgcctccagcgccggccccggccctgggctcagcctcgggccgggtccgagcttcggcttcagccccggccccactccgaccccggagcccacgaccagcggcctcgcgggcggcgcggcgagccacggcccttccccgttccctcggccctgggcgccccacgcgctcccgttctgggacacgccgctgaaccacgggctgaacgtgttcgtgggcgccgccctgtgcatcaccatgctgggcctgggctgcacggtggacgtgaaccacttcggggcgcacgtccgtcggcccgtgggcgcgctgctggcagcgctctgccagttcggcctcctgccgctgctggccttcctgctggccctcgccttcaagctggacgaggtggccgccgtggcggtgctcctgtgtggctgctgtcccggcggcaatctctccaatcttatgtccctgctggttgacggcgacatgaacctcagcatcatcatgaccatctcctccacgcttctggccctcgtcttgatgcccctgtgcctgtggatctacagctgggcttggatcaacacccctatcgtgcagttactacccctagggaccgtgaccctgactctctgcagcactctcatacctatcgggttgggcgtcttcattcgctacaaatacagccgggtggctgactacattgtgaaggtttccctgtggtctctgctagtgactctggtggtccttttcataatgaccggcactatgttaggacctgaactgctggcaagtatccctgcagctgtttatgtgatagcaatttttatgcctttggcaggctacgcttcaggttatggtttagctactctcttccatcttccacccaactgcaagaggactgtatgtctggaaacaggtagtcagaatgtgcagctctgtacagccattctaaaactggcctttccaccgcaattcataggaagcatgtacatgtttcctttgctgtatgcacttttccagtctgcagaagcggggatttttgttttaatctataaaatgtatggaagtgaaatgttgcacaagcgagatcctctagatgaagatgaagatacagatatttcttataaaaaactaaaagaagaggaaatggcagacacttcctatggcacagtgaaagcagaaaatataataatgatggaaaccgctcagacttctctctaaatgtggagatacacaggagcttctatcttgctgaaatattgcttcatatttatagcctgtggtagtgcacatggttaacataaaagataacactggttcacatcatacatgtaacaattctgatctttttaaggttcactggtgtattaaccaaacgttgtcacaaattacaaatcaatgctgtaatataatttgcacctggaatggctaacgtgaagcctgaattaaatgtggtttttagtttttaccatcaccaa

SEQ ID NO: 182770 - DNA, 2568 bp, Homo sapiens
  Payload ID: 16017
  Gene Symbol: SLC10A5
  Gene Name: solute carrier family 10, member 5
  Uniprot ID: Q5PT55
  ENST ID: ENST00000518568
  CDS Start-End: 1203-2519
ccttgaacacattgcatcatgattacatgaaagagctgctgaaatggtcatgtgttcagagactactacatctgtaggcttaatagtaaacgtttggttggttggttggtcggctggttggtttgctgcttagcatcaggacacccaccccttgtgtgggaaatatacaagtgtgtgagtctatgggttgaaatccaaaaagcctgatgctttttctcattcctggcaaccaagggatatgaccaaattgggtcaattgaatgcccttgcccctaactgtgaacagagagtagtgttacaaacaaggaataaaagattagaatcaatgccagtgtctttccattgccccatcgtgtcagggtccaagtgtccagtagctgtggtcccttaaccagcctgtacctttggccgtggcaccagctacctactttccctatgtccccaagttatctggtaaccattcaggaattttttttcctacttaggtatacaaaaaacagtgtcagtttttgcttgacagattaaatcatccttcagagatgcaggaaaactattagcagccaagggatgctgccaaggccagtgtctgggctctgcagttttctaacttgtgatattgggtcaccccactaagctccaggagagcagcgactgcatctggcttaatcattatgggatggccagctcccaattccatgccctaggcaaagagacattcagtgaatattgatttgacttcgacttgattgaacaaaatggtaacactgaactctaggtttcctcagtgtctgttacagatttcttgatcctgactgcttttaatttttttttttttagcaagaaataactaacgaatgatgacactaagctttaaattcaagtaaataggaggcttttttttttcgcataagcagaaatgaggaaatcaagaggaagagattagatttctgttgtgataaatcgaatctgttaaatgccatgactttttaattgtcttaatcacaagttaaaccggttgtgttgctgcttagatggctatatatttgtttaaaagtacagcagtccctcctactggactttgatcctacaaaaacaactgttatctaactcaccctcagactgtcactggaacacctgcatgaagaatgttctttcattttttaaaaacgattttgcatatatgatttatttcagctttcaaaatgattagaaaactttttattgttctacttttgttgcttgtgactatagaagaagcaaggatgtcatcgctcagttttctgaatatagagaagactgaaatactatttttcacaaagactgaagaaaccatccttgtaagttcaagctacgaaaataaacggcctaattccagccacctctttgtgaaaatagaagatcctaaaatactacaaatggtgaatgtggccaagaagatctcatcagatgctacaaactttaccataaatctggtgactgatgaagaaggagaaacaaatgtgactattcaactctgggattctgaaggtaggcaagaaagactcattgaagaaatcaagaatgtgaaagtcaaagtgctcaaacaaaaagacagtctactccaggcaccaatgcatattgatagaaatatcctaatgcttattttaccactaatactattgaataagtgtgcatttggttgtaagattgaattacagctgtttcaaacagtatggaagagacctttgccagtaattcttggggcagttacacagttttttctgatgccattttgcgggtttcttttgtctcagattgtggcattgcctgaggcgcaagcttttggagttgtaatgacctgcacgtgcccaggagggggtgggggctatctctttgctctgcttctagatggagatttcacattggccattttgatgacttgcacatcaacattattggctctgatcatgatgcctgtcaattcttatatatacagtaggatattagggttgtcaggtacattccatattcctgtttctaaaattgtgtcaacactccttttcatacttgtgccagtatcaattggaatagtcatcaagcatagaatacctgaaaaagcaagcttcttagagagaataattagacctctgagttttattttaatgttcgtaggaatttatttgactttcacagtgggattagtgttcttaaaaacagataatctagaggtgattctgttgggtctcttagttcctgctttgggtttgctgtttgggtactcctttgctaaagtttgtacgctgcctcttcctgtttgtaaaactgttgctattgaaagtgggatgttaaatagtttcttagctcttgccgttattcagctgtcttttccacagtccaaggccaatttagcttctgtggctccttttacagtagccatgtgttctggatgtgaaatgttactgatcattctagtttacaaggctaagaaaagatgtatctttttcttacaagataaaaggaaaagaaatttcctaatctaacaattaaagcattactgaattcctactctgggtagggcactgtgggaga

SEQ ID NO: 182771 - DNA, 2798 bp, Homo sapiens
  Payload ID: 16018
  Gene Symbol: SLC10A7
  Gene Name: solute carrier family 10, member 7
  Uniprot ID: Q0GE19
  ENST ID: ENST00000335472
  CDS Start-End: 217-1239
gagactttcctgtcactggctactactactcccaaccctcctcaaagccgccggagcaacccccaggtctttactttacaatcggcaatttgacttgctctgctgcatgtctggagggaccaaggaaagtgtggagacgctccaaggattaggtgatcggagcttgaaaagaaaaaaagccaaacaaataaacaaaacccacccaccctaacaaatatgaggctgctggagagaatgaggaaagactggttcatggtcggaatagtgctggcgatcgctggagctaaactggagccgtccataggggtgaatgggggaccactgaagccagaaataactgtatcctacattgctgttgcaacaatattctttaacagtggactatcattgaaaacagaggagctgaccagtgctttggtgcatctaaaactgcatctttttattcagatctttactcttgcattcttcccagcaacaatatggctttttcttcagcttttatcaatcacacccatcaacgaatggcttttaaaaggtttgcagacagtaggttgcatgcctccgcctgtgtcttctgcagtgattttaaccaaggcagttggtggaaatgaggcagctgcaatatttaattcagcctttggaagttttttgggcatcgttataacacccctgctcctgctgctttttcttggttcatcttcttctgtgcctttcacatctattttttctcagctttttatgactgttgtggttcctctcatcattggacagattgtccgaagatacatcaaggattggcttgagagaaagaagcctccttttggtgctatcagcagcagtgtactcctcatgatcatctacacaacattctgtgacacgttctctaacccaaatattgacctggataaattcagccttgttctcatactgttcataatattttctatccagctgagttttatgcttttaactttcatcttttcaacaaggaataattcgggtttcacaccagcagacacagtggctatcattttctgttctacacacaaatcccttacattgggaattccgatgctgaagatcgtgtttgcaggccatgagcatctctctttaatatctgtacccttgctcatctaccacccagctcagatccttctgggaagtgtgttggtgccaacaatcaagtcttggatggtatcaaggcagaagggagtgaagctgacaaggccgacagtataacaaaggaggtggactttctgtagcaatgtatatatgtacaggattgtacatactagcaattctgaagacttgtacttgtgaatgttgcctcaatgcatattttatttttttacacaaaaatatgagatcctgtttaagtgccttaaaatgtatttgacaagagcgttatttccaaaatatgctttgttgattactgccaggggtggtacaatatttgggggttaattttgctttcctaatgcaggaatcagtcatggtaagtgacaaaaagcaaacatgctttccctgcagcacctttgtgcaatacaaccctatagtagttactgtaatgtttgaaatgaggtcacaccatcaggaaaatgcccttctgatgacagtgaaaatttccaaagtcttattcatgcatactttgatttactgtgtgattctttttttctacgactgtgacatgcctcttccttatcaactcagcaggggtcatagatcgaatagatgctgaaaagcgtaagatatatgcattccttgacatcatttttaaagacattccttcaaatagtttccacacagaaattcctcactcccattatgagagattgtggttatatgtcttaaatttattataagctgcttcaaagaaagggtctgaatgtttgaattatgagtgaaatcatgtgaaattttgagttaaactctgtgatttgattttcagggtctttaaaatatatcttaatatcttcttcctctttattcaataatttctgtcttgcacttacacactcataacagccaaatatgaggcacaaaaatgttacaatcagtttgaaagcagcatcaattaatggtagattctattcacattccacaacccagaccaaatttttttcctattacgcagatgtgctgagcactttccagattgcccctgttggccaaaagcagcctgttacatcctggaattaagcacacttaaggtatttgagacaatttattaatgaaaatttccttggcagatttgacaaatgttggcaatatttttttagaagttaaatcatattgctttcatgaataaatgaaaatataaaggtcatggatgcaaacaaatgttacatatacacattctgtctctccagatgaaaagaacatgcaaaaccatttaataaccaaaatatcaagtaaaattagttcccaacggggcagcagctttcaaatgagtgtccaatatttgcttctgctatagctgcaagaactgtaactggacccaagtagagaatgaagccacgtatagaactacgagaacacttttctgtgtttcccccatgccgtcctgtcacatcctcttacacgtcctctcttgatttgatagacaatattggcatcctgggtctcactgaggccgtgctatgtcctcagcagctgtttttgttgtttcgttattatgcccacaacaaaaaatcattccttagaaactcaccaagtttatctactgtgtaaatttatattattgttactaccaggtctcatcttttgtcaatgtcattgaataaatttcataagagtta

SEQ ID NO: 182772 - DNA, 1730 bp, Homo sapiens
  Payload ID: 16018
  Gene Symbol: SLC10A7
  Gene Name: solute carrier family 10, member 7
  Uniprot ID: Q0GE19
  ENST ID: ENST00000394059
  CDS Start-End: 179-658
tcctcaaagccgccggagcaacccccaggtctttactttacaatcggcaatttgacttgctctgctgcatgtctggagggaccaaggaaagtgtggagacgctccaaggattaggtgatcggagcttgaaaagaaaaaaagccaaacaaataaacaaaacccacccaccctaacaaatatgaggctgctggagagaatgaggaaagactggttcatggtcggaatagtgctggcgatcgctggagctaaactggagccgtccataggggtgaatgggggaccactgaagccagaaataactgtatcctacattgctgttgcaacaatattctttaacagtggactatcattgaaaacagaggagctgaccagtgctttggtgcatctaaaactgcatctttttattcagatctttactcttgcattcttcccagcaacaatatggctttttcttcagcttttatcaatcacacccatcaacgaatggcttttaaaaggtttgcagacagtaggttgcatgcctccgcctgtgtcttctgcagtgattttaaccaaggcagttggtggaaatgaggcagctgcaatatttaattcagcctttggaagttttttggtaagtaaacatagtttaacttgtctattacaacttttgctgtgatattgtgtatatgaaagatttagtgaaagctggatttgttttactctttggttaagtataaaaattgttgaatcttttcatgtgccagtatccataccctgaagaaaagtagttaatgaataaagcaaatgttctcttacaatatattttggaggtttgggttttaaaattccatttaatgaattcaaggaatcaattaaaacactatgtgtctccttatagaggttatgtcaatatattgatcatttaatgaggtcttttagattattattattttgtatcatgggactgaggattttgaaaaggaaacatgacccagctggtcagaaagggaatgctaatttacttgttgacatgccatttattttgtacatttcactgtcaaagaagctactggcttggatgcttctgagaaatctatgtgaaaaaaaatttgaaaggaagatatgactaatgagtaatttgcaagtaaatgttgtatctatatatatatatatataaagattcaaaagtagttcagctttcataagtagaaccaatataaggacgttgttttagcatttttaatcattatttttaaataaatgatgtaacagaggcttgatttgtgttatgaaagattgagaaactaaattttctgttgatttaatttttttgtgccttaaaactttgttaaattcctgaagttaattatcatattgtattttttggggcataactcattagcagatatgtagtgcagtgatttacaaataattgagagtaaaatcagtgatgtataaactagttcatgagtctaggtaaaatatcaattacctctgtttaaaatgctctgttaattattattgtatgtatttaaatgtagttaaagcttttaaacatgttgttacatagtgttaattctacatagtgctacacagcttttagtgtcacatagccttacagagtttataatgatgtagcatctgcaaaatatatgcatagcttatatcctatttttatagagccagtaatggtttttgtgatgctgtattacttctgggttttagacaataaagtctgtttaacaaaa

SEQ ID NO: 182773 - DNA, 3747 bp, Homo sapiens
  Payload ID: 16018
  Gene Symbol: SLC10A7
  Gene Name: solute carrier family 10, member 7
  Uniprot ID: Q0GE19
  ENST ID: ENST00000432059
  CDS Start-End: 248-1231
gaggcgcgtggtagtgatggcggcgctcagtgagactttcctgtcactggctactactactcccaaccctcctcaaagccgccggagcaacccccaggtctttactttacaatcggcaatttgacttgctctgctgcatgtctggagggaccaaggaaagtgtggagacgctccaaggattaggtgatcggagcttgaaaagaaaaaaagccaaacaaataaacaaaacccacccaccctaacaaatatgaggctgctggagagaatgaggaaagactggttcatggtcggaatagtgctggcgatcgctggagctaaactggagccgtccataggggtgaatgggggaccactgaagccagaaataactgtatcctacattgctgttgcaacaatattctttaacagtggactatcattgaaaacagaggagctgaccagtgctttggtgcatctaaaactgcatctttttattcagatctttactcttgcattcttcccagcaacaatatggctttttcttcagcttttatcaatcacacccatcaacgaatggcttttaaaaggtttgcagacagtaggttgcatgcctccgcctgtgtcttctgcagtgattttaaccaaggcagttggtggaaatgagggcatcgttataacacccctgctcctgctgctttttcttggttcatcttcttctgtgcctttcacatctattttttctcagctttttatgactgttgtggttcctctcatcattggacagattgtccgaagatacatcaaggattggcttgagagaaagaagcctccttttggtgctatcagcagcagtgtactcctcatgatcatctacacaacattctgtgacacgttctctaacccaaatattgacctggataaattcagccttgttctcatactgttcataatattttctatccagctgagttttatgcttttaactttcatcttttcaacaaggaataattcgggtttcacaccagcagacacagtggctatcattttctgttctacacacaaatcccttacattgggaattccgatgctgaagatcgtgtttgcaggccatgagcatctctctttaatatctgtacccttgctcatctaccacccagctcagatccttctgggaagtgtgttggtgccaacaatcaagtcttggatggtatcaaggcagaagggagtgaagctgacaaggccgacagtataacaaaggaggtggactttctgtagcaatgtatatatgtacaggattgtacatactagcaattctgaagacttgtacttgtgaatgttgcctcaatgcatattttatttttttacacaaaaatatgagatcctgtttaagtgccttaaaatgtatttgacaagagcgttatttccaaaatatgctttgttgattactgccaggggtggtacaatatttgggggttaattttgctttcctaatgcaggaatcagtcatggtaagtgacaaaaagcaaacatgctttccctgcagcacctttgtgcaatacaaccctatagtagttactgtaatgtttgaaatgaggtcacaccatcaggaaaatgcccttctgatgacagtgaaaatttccaaagtcttattcatgcatactttgatttactgtgtgattctttttttctacgactgtgacatgcctcttccttatcaactcagcaggggtcatagatcgaatagatgctgaaaagcgtaagatatatgcattccttgacatcatttttaaagacattccttcaaatagtttccacacagaaattcctcactcccattatgagagattgtggttatatgtcttaaatttattataagctgcttcaaagaaagggtctgaatgtttgaattatgagtgaaatcatgtgaaattttgagttaaactctgtgatttgattttcagggtctttaaaatatatcttaatatcttcttcctctttattcaataatttctgtcttgcacttacacactcataacagccaaatatgaggcacaaaaatgttacaatcagtttgaaagcagcatcaattaatggtagattctattcacattccacaacccagaccaaatttttttcctattacgcagatgtgctgagcactttccagattgcccctgttggccaaaagcagcctgttacatcctggaattaagcacacttaaggtatttgagacaatttattaatgaaaatttccttggcagatttgacaaatgttggcaatatttttttagaagttaaatcatattgctttcatgaataaatgaaaatataaaggtcatggatgcaaacaaatgttacatatacacattctgtctctccagatgaaaagaacatgcaaaaccatttaataaccaaaatatcaagtaaaattagttcccaacggggcagcagctttcaaatgagtgtccaatatttgcttctgctatagctgcaagaactgtaactggacccaagtagagaatgaagccacgtatagaactacgagaacacttttctgtgtttcccccatgccgtcctgtcacatcctcttacacgtcctctcttgatttgatagacaatattggcatcctgggtctcactgaggccgtgctatgtcctcagcagctgtttttgttgtttcgttattatgcccacaacaaaaaatcattccttagaaactcaccaagtttatctactgtgtaaatttatattattgttactaccaggtctcatcttttgtcaatgtcattgaataaatttcataagagttattctcagtgtgaattttaaggctaatgccagatcctgcaaaaatctatgctaaccaggctgtagtacacactgttataaagaattttacttgtgtctaaaactacagtaattttgcttaggtaattgtgcttacctatggagcacaggaaggctcttaggttttgttcctacaagtttctttgaattttggagtaaatggaagtgtctgtctgtctgtcatctatctgccctatcataaaaatctttctccctaacattaaaatactgatccccgcccccaacttatctacctctattgtctaacacctatagtaggtgtgatcatgggataaaattcaactgaaaatgctatgataacattttatcgtttgctttaaaaatgtgctttgttttcaaataatctttacatagtgaactttggtggcgttagtgatatgtttatgcctatttcttttttttacacaaattccttggcatattttttcataaagaacaaaaaataaaatcaaaatttatttttaattcatgcttattgggatttaattattcagagcttaaaatattttgttatgtttatacactgtaaagctatctgttttatgcatttgttttgtctaaatgtatttatgaaagaaatacattagattatatttatgtttactcatttttccacctggattttttttaatggttgttacaaaattagattttttaatgggtaataatgttggtattttcatgttttttcttagtattaaaatttttgtgggttttttaaaatttttccctattctgttaaaaattaacacacctctagctaatgttcagtgtttgtgctaaataccaaattttttcaaaaggattggttaagtcataaagtggattatttatgatgactggaagatgaaaataattatatgattaaacaaagaatgtttcagaaatcacaagagaaa

SEQ ID NO: 182774 - DNA, 1134 bp, Homo sapiens
  Payload ID: 16018
  Gene Symbol: SLC10A7
  Gene Name: solute carrier family 10, member 7
  Uniprot ID: Q0GE19
  ENST ID: ENST00000507030
  CDS Start-End: 1-1077
atgaggctgctggagagaatgaggaaagactggttcatggtcggaatagtgctggcgatcgctggagctaaactggagccgtccataggggtgaatgggggaccactgaagccagaaataactgtatcctacattgctgttgcaacaatattctttaacagtggactatcattgaaaacagaggagctgaccagtgctttggtgcatctaaaactgcatctttttattcagatctttactcttgcattcttcccagcaacaatatggctttttcttcagcttttatcaatcacacccatcaacgaatggcttttaaaaggtttgcagacagtaggttgcatgcctccgcctgtgtcttctgcagtgattttaaccaaggcagttggtggaaatgaggcagctgcaatatttaattcagcctttggaagttttttgggcatcgttataacacccctgctcctgctgctttttcttggttcatcttcttctgtgcctttcacatctattttttctcagctttttatgactgttgtggttcctctcatcattggacagattgtccgaagatacatcaaggattggcttgagagaaagaagcctccttttggtgctatcagcagcagtgtactcctcatgatcatctacacaacattctgtgacacgttctctaacccaaatattgacctggataaattcagccttgttctcatactgttcataatattttctatccagctgagttttatgcttttaactttcatcttttcaacaaggaataattcgggtttcacaccagcagacacagtggctatcattttctgttctacacacaaatcccttacattgggaattccgatgctgaagatcgtgtttgcaggccatgagcatctctctttaatatctgtacccttgctcatctaccacccagctcagatccttctgggaagtgtgttggtgccaacaatcaagtcttggatggtatcaaggcagaagaaactactccaaaccagggggccactggctaacttgaataatccagaaggcttggaatatctatccatcaaatttgggcattaaaataaataccaagagtccatcctccagggagtgaagctgacaaggccgacagtataa

SEQ ID NO: 182775 - DNA, 869 bp, Homo sapiens
  Payload ID: 16018
  Gene Symbol: SLC10A7
  Gene Name: solute carrier family 10, member 7
  Uniprot ID: Q0GE19
  ENST ID: ENST00000511374
  CDS Start-End: 114-371
tgcatgtctggagggaccaaggaaagtgtggagacgctccaaggattaggtgatcggagcttgaaaagaaaaaaagccaaacaaataaacaaaacccacccaccctaacaaatatgaggctgctggagagaatgaggaaagactggttcatggtcggaatagtgctggcgatcgctggagctaaactggagccgtccataggggtgaatgggggaccactgaagccagaaataactgtatcctacattgctgttgcaacaatattctttaacagtggactatcattgaaaacagagtttgcagacagtaggttgcatgcctccgcctgtgtcttctgcagtgattttaaccaaggcagttggtggaaatgaggcagctgcaatatttaattcagcctttggaagttttttggtaagtaaacatagtttaacttgtctattacaacttttgctgtgatattgtgtatatgaaagatttagtgaaagctggatttgttttactctttggttaagtataaaaattgttgaatcttttcatgtgccagtatccataccctgaagaaaagtagttaatgaataaagcaaatgttctcttacaatatattttggaggtttgggttttaaaattccatttaatgaattcaaggaatcaattaaaacactatgtgtctccttatagaggttatgtcaatatattgatcatttaatgaggtcttttagattattattattttgtatcatgggactgaggattttgaaaaggaaacatgacccagctggtcagaaagggaatgctaatttacttgttgacatgccatttattttgtacatttcactgtcaaagaagctactggcttggatgcttctgag

SEQ ID NO: 182776 - DNA, 1638 bp, Homo sapiens
  Payload ID: 16018
  Gene Symbol: SLC10A7
  Gene Name: solute carrier family 10, member 7
  Uniprot ID: Q0GE19
  ENST ID: ENST00000502607
  CDS Start-End: 206-400
gtcactggctactactactcccaaccctcctcaaagccgccggagcaacccccaggtctttactttacaatcggcaatttgacttgctctgctgcatgtctggagggaccaaggaaagtgtggagacgctccaaggattaggtgatcggagcttgaaaagaaaaaaagccaaacaaataaacaaaacccacccaccctaacaaatatgaggctgctggagagaatgaggaaagactggttcatggtcggaatagtgctggcgatcgctggagctaaactggagccgtccataggggtgaatgggggaccactgaagccagaaataactgtatcctacattgctgttgcaacaatattctttaacagtggactatcattgaaaacagagcttcttacttaatgcgattctgcgaagcagccaactttgtgggatgcaggagttgaagaaggaagaatgccacagctgtcagcatttctctaaggactgacttcttttgtaagcacctaagaaaccttcagagtcatccagctaatttggatctaatgaaatgccgtgatctcgtgctttatcgtggtatctaagcagcaatcaaagccatttcttccatcaaaagcccttttcaaaagaatacaacattaagtcattttcaaaagccatataacttaagatgtcctagattgtatcattgtgtaatattaaaccacttctaaagcctgctaatttcatggttaacttgtaacttaggaggtagcagtcatatttgtttactagttagtaatcctaaattcatttcagtggggattacgatttatatgtcttattaggtcctaaaatagttcatttttgcatacaagagacagtgaattattattgacttgagtttatttggaagcatttgtgttggtcccattcaagtttgatttatattgaacatttcttatatgactcatacattgatttaatgacatgtattctaaaatttgttttagtaatttgttaaaattataaaggacactgtgctaatgcaatgctgagtcttcagttttatgacaacttctagttttttgaaattttgttgtattgaagtgaaatatggttacatttaaaattcatatttagttcacttcaaacctgtagtttcagaggctttgtcacttagccgactgtggcagggcgaatttgtttaaacaagtatcaattaagtgcttatggccacaaggcacggtgctggggatagaaacaaaggtgagcaggagacttaggggctgagaaaaggtcctgagtagggcagaagatgcaggcttttatttttctgtaaaaattattatcttttatcctattagcagaaaagcaaatatagcaaactctaaactttagatgtgtgctgtttgtttcaagcccagagctatgagcctgactctcagcaaatgaatgagatggtcagataaagggttacaagagaaatcggtgtctaatgaaaatatttctacgtcccaattagagccctggttttaagcaatgcttgatgctgtcaatgagactctggtataatcagtaaatgatgtggagtgtcttcttaagtttattttaatggattttgaccttattacatatgaataaacaaactatgatgcaga

SEQ ID NO: 182777 - DNA, 3852 bp, Homo sapiens
  Payload ID: 16019
  Gene Symbol: SLC11A1
  Gene Name: solute carrier family 11 (proton-coupled divalent metal ion transporter), member 1
  Uniprot ID: P49279
  ENST ID: ENST00000233202
  CDS Start-End: 341-1993
acagaacacggggtgcctggaaggggaacagatgtgttgtggggcacagggcaggctgggaggggaacaaaggtccactccatgggtaaccagacccttccgccagggctggccacttctgcctttggaaaatgtttcacaacgccccatgttgtgtgtgtgtgtgaatcggccgatgtgaaccgaatgttgatgtaagaggcagggcactcggctgcggatgggtaacagggcgtgggctggcacacttacttgcaccagtgcccagagagggggtgcaggctgaggagctgcccagagcaccgctcacactcccagagtacctgaagtcggcatttcaatgacaggtgacaagggtccccaaaggctaagcgggtccagctatggttccatctccagcccgaccagcccgaccagcccagggccacagcaagcacctcccagagagacctacctgagtgagaagatccccatcccagacacaaaaccgggcaccttcagcctgcggaagctatgggccttcacggggcctggcttcctcatgagcattgctttcctggacccaggaaacatcgagtcagatcttcaggctggcgccgtggcgggattcaaacttctctgggtgctgctctgggccaccgtgttgggcttgctctgccagcgactggctgcacgtctgggcgtggtgacaggcaaggacttgggcgaggtctgccatctctactaccctaaggtgccccgcaccgtcctctggctgaccatcgagctagccattgtgggctccgacatgcaggaagtcatcggcacggccattgcattcaatctgctctcagctggacgaatcccactctggggtggcgtcctcatcaccatcgtggacaccttcttcttcctcttcctcgataactacgggctgcggaagctggaagctttttttggactccttataaccattatggccttgacctttggctatgagtatgtggtggcgcgtcctgagcagggagcgcttcttcggggcctgttcctgccctcgtgcccgggctgcggccaccccgagctgctgcaggcggtgggcattgttggcgccatcatcatgccccacaacatctacctgcactcggccctggtcaagtctcgagagatagaccgggcccgccgagcagacatcagagaagccaacatgtacttcctgattgaggccaccatcgccctgtccgtctcctttatcatcaacctctttgtcatggctgtctttgggcaggccttctaccagaaaaccaaccaggctgcgttcaacatctgtgccaacagcagcctccacgactacgccaagatcttccccatgaacaacgccaccgtggccgtggacatttaccaggggggcgtgatcctgggctgcctgttcggccccgcggccctctacatctgggccataggtctcctggcggctgggcagagctccaccatgacgggcacctacgcgggacagttcgtgatggagggcttcctgaggctgcggtggtcacgcttcgcccgtgtcctcctcacccgctcctgcgccatcctgcccaccgtgctcgtggctgtcttccgggacctgagggacttgtcgggcctcaatgatctgctcaacgtgctgcagagcctgctgctcccgttcgccgtgctgcccatcctcacgttcaccagcatgcccaccctcatgcaggagtttgccaatggcctgctgaacaaggtcgtcacctcttccatcatggtgctagtctgcgccatcaacctctacttcgtggtcagctatctgcccagcctgccccaccctgcctacttcggccttgcagccttgctggccgcagcctacctgggcctcagcacctacctggtctggacctgttgccttgcccacggagccacctttctggcccacagctcccaccaccacttcctgtatgggctccttgaagaggaccagaaaggggagacctctggctaggcccacaccagggcctggctgggagtggcatgtatgacgtgactggcctgctggatgtggagggggcgcgtgcaggcagcaggatagagtgggacagttcctgagaccagccaacctgggggctttagggacctgctgtttcctagcgcagccatgtgattaccctctgggtctcagtgtcctcatctgtaaaatggagacaccaccacccttgccatggaggttaagcactttaacacagtgtctggcacttgggacaaaaacaaacaaacgaaaaacatttcaaaaggtatttattgagcacctgcaggcgtgacctgacagcccaagggtgggtggggtgagggcttgaggacttgggcgggacacaggctccaaactggagcttgaaatagtgtctgatgaatgttaaattatctatctatctatttatttatttatttgagacagggaaagggtctccctctgttgccaaggctggagtgcagtggcgcaatcttaactcattgcaacctccaccttctgggttcaagcgattctctttattcagccccgggagtggcgcgcgccaccacgcccagctaatttgtgtattttcagcagagacggggtttgccatgctggccaggctggtctcgaactgctggattcaagtgatccgcccatctccgtctcccaaagtgctgggaattacaggcgtgagccaccaaacccggcctgattaaagttaaataaatactagttcccttctcgtccaaaggagcagggaatgggaaccgggaaggcacgaagtctctaaagcatccagaagacccctacaccagggtctggtccgctcctattcgccgcagcctttctgttccgcctgcaacccattttccagacagtaaaacggcggcgcacttctttctccgtcaggcaccaggtcataaggaacccaagagtctgtgcctctgaggcccaaattatttgctgtttcctcaggggagccggcggccgcgactcccacgccgcgccgttaccgctccctctctgctgactgctccccctaggggcagagacggtcccgacgcccgccatcccgccccggcctcacccctccccgccaggcggaacgacgcggggaggcgggcgctcggggctcgcgccaggggccccagaatccttcggggagagtgggtgggaggaagctgtgtgggcggggagccccctctgccttagggagcggctgggcacccattcgccccattcaggggctgcactttatagacgttccctaggctgtttctaggctcccccaagtccctcctccagcctcgtcgggtccctcagaccccagcccaggacctgcggagggccgcagcgaggagaggccaacaggcctttccctagagttgaacctgggccgggtgttgcacctggaagaacccccgatttcctggggacccagcagggcaggcggcctggctccgcgctcaggtccggacgcttgtttatgagaagaatttcctctttcttaaaagggcaacgatgcgagtgggtccctcaaggagagaagagatgggaccggtctggtgcgacctgggcaagcgctgcagagggtacctgggcaagagggccgcccgcctcctctgggtttggcactggagaagatgggtccatgccagctgaaggaggagatggatgggggacgtttagcgaagaaaggcatctcccagatcctttagcctcctggaagtgcccccgttgtaccccctacacacccctcttggcattgagtgccagtcctctgccaggctctgtgttacaagttggggagggcggcaaagtcccgaattaaagatgtcagttctcaagga

SEQ ID NO: 182778 - DNA, 2136 bp, Homo sapiens
  Payload ID: 16019
  Gene Symbol: SLC11A1
  Gene Name: solute carrier family 11 (proton-coupled divalent metal ion transporter), member 1
  ENST ID: ENST00000354352
  CDS Start-End: 122-613
gatgggtaacagggcgtgggctggcacacttacttgcaccagtgcccagagagggggtgcaggctgaggagctgcccagagcaccgctcacactcccagagtacctgaagtcggcatttcaatgacaggtgacaagggtccccaaaggctaagcgggtccagctatggttccatctccagcccgaccagcccgaccagcccagggccacagcaagcacctcccagagagacctacctgagtgagaagatccccatcccagacacaaaaccgggcaccttcagcctgcggaagctatgggccttcacggggcctggcttcctcatgagcattgctttcctggacccaggaaacatcgagtcagatcttcaggctggcgccgtggcgggattcaaacttctctgggtgctgctctgggccaccgtgttgggcttgctctgccagcgactggctgcacgtctgggcgtggtgacaggcaaggacttgggcgaggtctgccatctctactaccctaagtcggagtctcgctccgtcgcccagtcaggagtgcaatggtgcgatgtcagctcactgcaacctctacctcccaggtgccccgcaccgtcctctggctgaccatcgagctagccattgtgggctccgacatgcaggaagtcatcggcacggccattgcattcaatctgctctcagctggacgaatcccactctggggtggcgtcctcatcaccatcgtggacaccttcttcttcctcttcctcgataactacgggctgcggaagctggaagctttttttggactccttataaccattatggccttgacctttggctatgagtatgtggtggcgcgtcctgagcagggagcgcttcttcggggcctgttcctgccctcgtgcccgggctgcggccaccccgagctgctgcaggcggtgggcattgttggcgccatcatcatgccccacaacatctacctgcactcggccctggtcaagtctcgagagatagaccgggcccgccgagcagacatcagagaagccaacatgtacttcctgattgaggccaccatcgccctgtccgtctcctttatcatcaacctctttgtcatggctgtctttgggcaggccttctaccagaaaaccaaccaggctgcgttcaacatctgtgccaacagcagcctccacgactacgccaagatcttccccatgaacaacgccaccgtggccgtggacatttaccaggggggcgtgatcctgggctgcctgttcggccccgcggccctctacatctgggccataggtctcctggcggctgggcagagctccaccatgacgggcacctacgcgggacagttcgtgatggagggcttcctgaggctgcggtggtcacgcttcgcccgtgtcctcctcacccgctcctgcgccatcctgcccaccgtgctcgtggctgtcttccgggacctgagggacttgtcgggcctcaatgatctgctcaacgtgctgcagagcctgctgctcccgttcgccgtgctgcccatcctcacgttcaccagcatgcccaccctcatgcaggagtttgccaatggcctgctgaacaaggtcgtcacctcttccatcatggtgctagtctgcgccatcaacctctacttcgtggtcagctatctgcccagcctgccccaccctgcctacttcggccttgcagccttgctggccgcagcctacctgggcctcagcacctacctggtctggacctgttgccttgcccacggagccacctttctggcccacagctcccaccaccacttcctgtatgggctccttgaagaggaccagaaaggggagacctctggctaggcccacaccagggcctggctgggagtggcatgtatgacgtgactggcctgctggatgtggagggggcgcgtgcaggcagcaggatagagtgggacagttcctgagaccagccaacctgggggctttagggacctgctgtttcctagcgcagccatgtgattaccctctgggtctcagtgtcctcatctgtaaaatggagacaccaccacccttgccatggaggttaagcactttaacacagtgtctggcacttgggacaaaaacaaacaaacgaaaaacatttcaaaa

SEQ ID NO: 182779 - DNA, 1765 bp, Homo sapiens
  Payload ID: 16019
  Gene Symbol: SLC11A1
  Gene Name: solute carrier family 11 (proton-coupled divalent metal ion transporter), member 1
  ENST ID: ENST00000539932
  CDS Start-End: 167-415
gatgtgaaccgaatgttgatgtaagaggcagggcactcggctgcggatgggtaacagggcgtgggctggcacacttacttgcaccagtgcccagagagggggtgcaggctgaggagctgcccagagcaccgctcacactcccagagtacctgaagtcggcatttcaatgacagggcaccttcagcctgcggaagctatgggccttcacggggcctggcttcctcatgagcattgctttcctggacccaggaaacatcgagtcagatcttcaggctggcgccgtggcgggattcaaacttctctgggtgctgctctgggccaccgtgttgggcttgctctgccagcgactggctgcacgtctgggcgtggtgacaggcaaggacttgggcgaggtctgccatctctactaccctaaggtgccccgcaccgtcctctggctgaccatcgagctagccattgtgggctccgacatgcaggaagtcatcggcacggccattgcattcaatctgctctcagctggacgaatcccactctggggtggcgtcctcatcaccatcgtggacaccttcttcttcctcttcctcgataactacgggctgcggaagctggaagctttttttggactccttataaccattatggccttgacctttggctatgagtatgtggtggcgcgtcctgagcagggagcgcttcttcggggcctgttcctgccctcgtgcccgggctgcggccaccccgagctgctgcaggcggtgggcattgttggcgccatcatcatgccccacaacatctacctgcactcggccctggtcaagtctcgagagatagaccgggcccgccgagcagacatcagagaagccaacatgtacttcctgattgaggccaccatcgccctgtccgtctcctttatcatcaacctctttgtcatggctgtctttgggcaggccttctaccagaaaaccaaccaggctgcgttcaacatctgtgccaacagcagcctccacgactacgccaagatcttccccatgaacaacgccaccgtggccgtggacatttaccaggggggcgtgatcctgggctgcctgttcggccccgcggccctctacatctgggccataggtctcctggcggctgggcagagctccaccatgacgggcacctacgcgggacagttcgtgatggaggctggagtgcaatggcgcgatctccggctcaccgcaacctccacctcctgggttcaagcaattctcctgcctcagcctcctgaccagctgggattacaggccaccacacccagctaattttgtattttcagtaaagacggggtttctccatgttggtcagggtggtctcgaactcccagcctcaggtgatctgccctcctcagcctcccaaagtgctgggattacaggcgtgagccaccgcgcccggctctttctttcttttttgagacaggatttcactctgttgctcaggctggagtgcaatggcgccatcacagctcgctgcagcctcaacttcagcctcccgagtcattgggactacaggctcatgccaccacaccaggctaatttttaaaattatttgtagagatgtggtcttcctatgtttcccaggctggtctcgaactcctgggctcaagtgatcttcccgccttggcttcccaaagtgctgggattacagacgtgagccaccccactcagctttgtttccttcatgtagcccagagggcgacactataagccccattttacagatgaga

SEQ ID NO: 182780 - DNA, 421 bp, Homo sapiens
  Payload ID: 16019
  Gene Symbol: SLC11A1
  Gene Name: solute carrier family 11 (proton-coupled divalent metal ion transporter), member 1
  ENST ID: ENST00000481524
  CDS Start-End: 97-222
acacttacttgcaccagtgcccagagagggggtgcaggctgaggagctgcccagagcaccgctcacactcccagagtacctgaagtcggcatttcaatgacagcttctctgggtgctgctctgggccaccgtgttgggcttgctctgccagcgactggctgcacgtctgggcgtggtgacaggcaaggacttgggcgaggtctgccatctctactaccctaaggtgccccgcaccgtcctctggctgaccatcgagctagccattgtgggctccgacatgcaggaagtcatcggcacggccattgcattcaatctgctctcagctggacgaatcccactctggggtggcgtcctcatcaccatcgtggacaccttcttcttcctcttcctcgataactacgggctgcggaagctggaagct

SEQ ID NO: 182781 - DNA, 624 bp, Homo sapiens
  Payload ID: 16019
  Gene Symbol: SLC11A1
  Gene Name: solute carrier family 11 (proton-coupled divalent metal ion transporter), member 1
  ENST ID: ENST00000473367
  CDS Start-End: 201-473
aacgccccatgttgtgtgtgtgtgtgaatcggccgatgtgaaccgaatgttgatgtaagaggcagggcactcggctgcggatgggtaacagggcgtgggctggcacacttacttgcaccagtgcccagagagggggtgcaggctgaggagctgcccagagcaccgctcacactcccagagtacctgaagtcggcatttcaatgacaggtgacaagggtccccaaaggctaagcgggtccagctatggttccatctccagcccgaccagcccgaccagcccagggccacagcaagcacctcccagagagacctacctgagtgagaagatccccatcccagacacaaaaccggaaacatcgagtcagatcttcaggctggcgccgtggcgggattcaaacttctctgggtgctgctctgggccaccgtgttgggcttgctctgccagcgactggctgcacgtctgggcgtggtgacaggcaaggacttgggcgaggtctgccatctctactaccctaagtcggagtctcgctccgtcgcccagtcaggagtgcaatggtgcgatgtcagctcactgcaacctctacctcccaggtgccccgcaccgtcctctggctgaccatcgag

SEQ ID NO: 182782 - DNA, 3986 bp, Homo sapiens
  Payload ID: 16020
  Gene Symbol: SLC11A2
  Gene Name: solute carrier family 11 (proton-coupled divalent metal ion transporter), member 2
  Uniprot ID: P49281
  ENST ID: ENST00000262051
  CDS Start-End: 89-1795
ggagccctgggcgcgggggcggcgtgtcaggtggttgcggagctggtaagaatcatattctaagaactcagccactcaggtatccaccatggtgctgggtcctgaacagaagatgtcagatgacagtgtttctggagatcatggggagtctgccagtcttggtaacatcaaccctgcctatagtaatccctctctttcacagtcccctggggactcagaggagtacttcgccacttactttaatgagaagatctccattcctgaggaggagtactcttgttttagctttcgtaaactctgggctttcaccggaccaggttttcttatgagcattgcctacctggatccaggaaatattgaatccgatttgcagtctggagcagtggctggatttaagttgctctggatccttctgttggccacccttgtggggctgctgctccagcggcttgcagctagactgggagtggttactgggctgcatcttgctgaagtatgtcaccgtcagtatcccaaggtcccacgagtcatcctgtggctgatggtggagttggctatcatcggctcagacatgcaagaagtcattggctcagccattgctatcaatcttctgtctgtaggaagaattcctctgtggggtggcgttctcatcaccattgcagatacttttgtatttctcttcttggacaaatatggcttgcggaagctagaagcattttttggctttctcatcactattatggccctcacatttggatatgagtatgttacagtgaaacccagccagagccaggtactcaagggcatgttcgtaccatcctgttcaggctgtcgcactccacagattgaacaggctgtgggcatcgtgggagctgtcatcatgccacacaacatgtacctgcattctgccttagtcaagtctagacaggtaaaccggaacaataagcaggaagttcgagaagccaataagtactttttcattgaatcctgcattgcactctttgtttccttcatcatcaatgtctttgttgtctcagtctttgctgaagcattttttgggaaaaccaacgagcaggtggttgaagtctgtacaaataccagcagtcctcatgctggcctctttcctaaagataactcgacactggctgtggacatctacaaagggggtgttgtgctgggatgttactttgggcctgctgcactctacatttgggcagtggggatcctggctgcaggacagagctccaccatgacaggaacctattctggccagtttgtcatggagggattcctgaacctaaagtggtcacgctttgcccgagtggttctgactcgctctattgccatcatccccactctgcttgttgctgtcttccaagatgtagagcatctaacagggatgaatgactttctgaatgttctacagagcttacagcttccctttgctctcatacccatcctcacatttacgagcttgcggccagtaatgagtgactttgccaatggactaggctggcggattgcaggaggaatcttggtccttatcatctgttccatcaatatgtactttgtagtggtttatgtccgggacctagggcatgtggcattatatgtggtggctgctgtggtcagcgtggcttatctgggctttgtgttctacttgggttggcaatgtttgattgcactgggcatgtccttcctggactgtgggcatacgtgccatctgggattgacagctcagcctgaactctatcttctgaacaccatggacgctgactcacttgtgtctagatgactgacagcctgagagactctataagaacatgtttttctaagccctttttgtgccaggtgtcccgttaacgtctctgttagttcagaggtgagttttgttcagacgttttgaacaaaaggcaaagatttcctcatgggaagggtgttcaaaactgacagctataaatgtaggtcagagacccacccacctcataacagtcatacactcccagagttaaacgattggcctctgatggccacacacccctatgggcttgtgtcttggactctgggatttaaaagatatatatgtatatatatttatgtaaacctgagcatctcagtttgggtagagttttaaggttatatgaaactgatagaacttttgtattttttttttaaatattgttttgatatatcagatatttgttttgtctggatcacaagtgagaaagaaaagagaacaatgctctttttcacaatgaactggtcaaattgactatcttgtaaagtgatactttactatgtcagtgaaatttcagtttgattttagtcaaccagattatatcctttgtatctactgatattaacacatcatattaacacatcatttcttaaaaaaacatttcttctgtttggcaatcataattaactctggttatcagcctattttgtaattattgtctttgtcgtcacttttcttgaattgttttctagtcattaaacagatatgaaggcattgccaaagagctttaatatccagtaacaagatccagaaaccacactttaaccagtgatcagttttccgtgctgcattgtaactcagctcattctggcattcaagttttaggcaaaaaaagaggaaacttctaacatttagcttgtaagtcctgacataagatagtgaagatatttatcttctttctaatatttgtatagtccgccaatgtattttcttcccactattcccattaacataccaaacactgtttctaggtccaaagtctatttctaggagtggccaatatttgtattgttgaatctcctagggaatgctaaatgtttcactttaaaatacctatttataccaagtagcatgagattagtactagagtgagatttggaatattagtccacatatcacaaactgcttgcctacatgtatagattttttttttcacccaccttcctaaccaggaatttgtttccttaaatttgttgttgttgttgttgttgtttgttgttatttttttgagaagagtcttgccctgtcgccaaggtgggaatgcattgacgtgatctcagttcactgtaacctctacctccccggtttaatcgattctcctccttcagcctcctgaatagctgggattacaggcaccacatttttagtggagatggggtttcaccatgttggccaggctggtctcaaactcttgacctcaagtgatctacctgcctcagcctcccaaagtgctgggattacaggtgtgagccactgcacccagcgttttttgttgttaagacagggtcttgctctgttgcccaggctggagtgcagtggtgtgatctcagctcactgcaacttctgccacctgggcttaagccatcctcccacttcagcatcccaaatagctgggactgcaggcacacaccaccacacccagctaatttttgtattttttgtagagacgggatttcaccatgttgcccaggctggtgttgaactcatgagctcaagtaatctgctggccttggcctcccaaagtgctgagattataggcgtgagccactgcatccagctcactcctcatttctttctagccccaaaggtgttgagtcagcaaatcctgcagcctttgtgtgactttgagcatcactttcccctttcagcattaaatatatgacctctctgccttattttagaacttactacatttcaataaaactttttaaaaaatccagacattgcctatgttcgtttataatcggcccttaaagaggcagggatttttctaaaatgacactttaaaatttcctcatttctacttcagggcctcttgaaacttcagataatgagagcagccaaccctgcaactcaggctatagagtccttctgatcttaaaactgagactgaattcacatcagttttacgcttttacttgaaaaagagactcttaagtgtttttggtttctttatacaggacaacaa

SEQ ID NO: 182783 - DNA, 4132 bp, Homo sapiens
  Payload ID: 16020
  Gene Symbol: SLC11A2
  Gene Name: solute carrier family 11 (proton-coupled divalent metal ion transporter), member 2
  Uniprot ID: P49281
  ENST ID: ENST00000262052
  CDS Start-End: 114-1799
agcgtggcgctggctcccggaatatggagccctgggcgcgggggcggcgtgtcaggtggttgcggagctggtaagaatcatattctaagaactcagccactcaggtatccaccatggtgctgggtcctgaacagaagatgtcagatgacagtgtttctggagatcatggggagtctgccagtcttggtaacatcaaccctgcctatagtaatccctctctttcacagtcccctggggactcagaggagtacttcgccacttactttaatgagaagatctccattcctgaggaggagtactcttgttttagctttcgtaaactctgggctttcaccggaccaggttttcttatgagcattgcctacctggatccaggaaatattgaatccgatttgcagtctggagcagtggctggatttaagttgctctggatccttctgttggccacccttgtggggctgctgctccagcggcttgcagctagactgggagtggttactgggctgcatcttgctgaagtatgtcaccgtcagtatcccaaggtcccacgagtcatcctgtggctgatggtggagttggctatcatcggctcagacatgcaagaagtcattggctcagccattgctatcaatcttctgtctgtaggaagaattcctctgtggggtggcgttctcatcaccattgcagatacttttgtatttctcttcttggacaaatatggcttgcggaagctagaagcattttttggctttctcatcactattatggccctcacatttggatatgagtatgttacagtgaaacccagccagagccaggtactcaagggcatgttcgtaccatcctgttcaggctgtcgcactccacagattgaacaggctgtgggcatcgtgggagctgtcatcatgccacacaacatgtacctgcattctgccttagtcaagtctagacaggtaaaccggaacaataagcaggaagttcgagaagccaataagtactttttcattgaatcctgcattgcactctttgtttccttcatcatcaatgtctttgttgtctcagtctttgctgaagcattttttgggaaaaccaacgagcaggtggttgaagtctgtacaaataccagcagtcctcatgctggcctctttcctaaagataactcgacactggctgtggacatctacaaagggggtgttgtgctgggatgttactttgggcctgctgcactctacatttgggcagtggggatcctggctgcaggacagagctccaccatgacaggaacctattctggccagtttgtcatggagggattcctgaacctaaagtggtcacgctttgcccgagtggttctgactcgctctattgccatcatccccactctgcttgttgctgtcttccaagatgtagagcatctaacagggatgaatgactttctgaatgttctacagagcttacagcttccctttgctctcatacccatcctcacatttacgagcttgcggccagtaatgagtgactttgccaatggactaggctggcggattgcaggaggaatcttggtccttatcatctgttccatcaatatgtactttgtagtggtttatgtccgggacctagggcatgtggcattatatgtggtggctgctgtggtcagcgtggcttatctgggctttgtgttctacttgggttggcaatgtttgattgcactgggcatgtccttcctggactgtgggcatacggtaagcatctctaaaggcctgctgacagaagaagccacccgtggctacgttaaataacactggattagtctgtcttctgcaggtagccatcagagccagtgtgtttctatggtttactgtgtgaacatagccaaaagtatgtgccgttgcacagactgtgtttatgactcaaccgttggttggaaaagactttgtttcatgtgtatttgaaagatggaattattttttccttcctgacctaaccttagaactggattagggtgggatctttgaaaagctgacatttgctgctatcattccaacactaaattcttaagtagttgcccaagggccagctcagtttatccttcggagagacaaggatatgcatgattcttaaccaggctatatgttaaaaaaaaattggaaaatgcaatacattttttattatacaaactacagaatgagtatgcaagttttatttatcaaaatgtaatggatttttaaaggctgagaaattttccttatacctaccttttcagttattttaattataccaaattatcaactagaatagcttcatccatatgaaatataaaatgaagagacacctagctctatcaggcttaggattctttgaacttatttccactttaatttctcagtggaagttaagaggggtgagaaaacaaagaaggggaaaaactgacaactaacaaaaccagcaccacatcgctaggtggtgcttactaattaccttctcaggattttcctcagattgaaaagcttatgaggatttcttgggagtcttaataacctgcctgttagtacagagctttcctgatgatatttactcttgagcacatgtggttgtaaaaccttaactttctttctccaggagggtggtgatagaaacagatggtagtatttatgaactgatgttctcgtgaaatgttgagggtggggagaaaagactttaagggaggagagccatctattttgttcctaaagccacctctcagcagaatcgtcatgtttttctgatgcaccgctctgcttcatgcccaagatgacttgcgaggcaatctcaggagctgtggacttaaccgttgcaaagcacactgtctttctcagcgttctctgcaagtcagtaggtgttagtatggttgcaaagttcactgtctcagcaaagttgaactgggctacctctctacagctgtttcctcagagggaaaaatcttgagaccagatggtggagctctggagtcagaggaaatgggtgtcttcagcacaaagctgctgcttttacttcagccacttctgacatttttacataccgagcctgagattgtgtgattatctcaaatcaaatcactttgatggagataaataatcaaaactgttttatagtcattgatttggtgagaacagtaatggaaaatggtgttgaaggacttctcatttttggagctttccttccagagtcctggctgattggtgttcgctgttcatctgagcccccaaaagcattattactgatacttgcacacagtcaaaagcgcagactggatggatggtcttttataaggcatttaagggtacactactgtgtttcactgaccatacatttttcttagcccctcaagtaatatagcacagagttatgaatgacaattcccctaaccattcctcttcatatctgcctcttccccttaccatcgtaattctccaaactggtcataaaggcactctgtgaagatattggggactgacatcttaagctctcacctggctgcagtaggaaaggccaaactgacgacaaaaaaaaaattctttataaagatgatatggtaacatgtatctttgccctgggtctgggtgggtccagtcagtctcagatttacaagcatttaggagcctaggtaaaagctgctagtattcttttaaaagttatatttatgacttgcaatgatagaaaactccttccaattaaatggcattttataatattatgtgtgtacttcacagtgttaaaaataccctcatacgttattgcatttgatcttcacagaaagtgcattttaaccagtactctgggtgcaataaataatatgtagaaatttaagtcctccaattccagcatatccagtgagttttgacagtgtgtttatgtggaatgtttaaggatatacaattgtactttatataaattggttcttgttcttcttaaatgtgacatgaaataattgtgctgctacattatactggaaattaacaggggaaaagggaagagctcttggctcccttgaggttctgctagtggtgttaggagtggttacaactgagcttttagtaaccatttaaccgtatgtaaacttggtttctaattaaaaaaaaatttctttttccaa

SEQ ID NO: 182784 - DNA, 4156 bp, Homo sapiens
  Payload ID: 16020
  Gene Symbol: SLC11A2
  Gene Name: solute carrier family 11 (proton-coupled divalent metal ion transporter), member 2
  Uniprot ID: P49281
  ENST ID: ENST00000394904
  CDS Start-End: 51-1823
atatatagaggcaggagctggcattgggaaagtcaaactagttctgcaccatgaggaagaagcagctgaagacggaggcagctccacactgtgaactaaaatcatattctaagaactcagccactcaggtatccaccatggtgctgggtcctgaacagaagatgtcagatgacagtgtttctggagatcatggggagtctgccagtcttggtaacatcaaccctgcctatagtaatccctctctttcacagtcccctggggactcagaggagtacttcgccacttactttaatgagaagatctccattcctgaggaggagtactcttgttttagctttcgtaaactctgggctttcaccggaccaggttttcttatgagcattgcctacctggatccaggaaatattgaatccgatttgcagtctggagcagtggctggatttaagttgctctggatccttctgttggccacccttgtggggctgctgctccagcggcttgcagctagactgggagtggttactgggctgcatcttgctgaagtatgtcaccgtcagtatcccaaggtcccacgagtcatcctgtggctgatggtggagttggctatcatcggctcagacatgcaagaagtcattggctcagccattgctatcaatcttctgtctgtaggaagaattcctctgtggggtggcgttctcatcaccattgcagatacttttgtatttctcttcttggacaaatatggcttgcggaagctagaagcattttttggctttctcatcactattatggccctcacatttggatatgagtatgttacagtgaaacccagccagagccaggtactcaagggcatgttcgtaccatcctgttcaggctgtcgcactccacagattgaacaggctgtgggcatcgtgggagctgtcatcatgccacacaacatgtacctgcattctgccttagtcaagtctagacaggtaaaccggaacaataagcaggaagttcgagaagccaataagtactttttcattgaatcctgcattgcactctttgtttccttcatcatcaatgtctttgttgtctcagtctttgctgaagcattttttgggaaaaccaacgagcaggtggttgaagtctgtacaaataccagcagtcctcatgctggcctctttcctaaagataactcgacactggctgtggacatctacaaagggggtgttgtgctgggatgttactttgggcctgctgcactctacatttgggcagtggggatcctggctgcaggacagagctccaccatgacaggaacctattctggccagtttgtcatggagggattcctgaacctaaagtggtcacgctttgcccgagtggttctgactcgctctattgccatcatccccactctgcttgttgctgtcttccaagatgtagagcatctaacagggatgaatgactttctgaatgttctacagagcttacagcttccctttgctctcatacccatcctcacatttacgagcttgcggccagtaatgagtgactttgccaatggactaggctggcggattgcaggaggaatcttggtccttatcatctgttccatcaatatgtactttgtagtggtttatgtccgggacctagggcatgtggcattatatgtggtggctgctgtggtcagcgtggcttatctgggctttgtgttctacttgggttggcaatgtttgattgcactgggcatgtccttcctggactgtgggcatacggtaagcatctctaaaggcctgctgacagaagaagccacccgtggctacgttaaataacactggattagtctgtcttctgcaggtagccatcagagccagtgtgtttctatggtttactgtgtgaacatagccaaaagtatgtgccgttgcacagactgtgtttatgactcaaccgttggttggaaaagactttgtttcatgtgtatttgaaagatggaattattttttccttcctgacctaaccttagaactggattagggtgggatctttgaaaagctgacatttgctgctatcattccaacactaaattcttaagtagttgcccaagggccagctcagtttatccttcggagagacaaggatatgcatgattcttaaccaggctatatgttaaaaaaaaattggaaaatgcaatacattttttattatacaaactacagaatgagtatgcaagttttatttatcaaaatgtaatggatttttaaaggctgagaaattttccttatacctaccttttcagttattttaattataccaaattatcaactagaatagcttcatccatatgaaatataaaatgaagagacacctagctctatcaggcttaggattctttgaacttatttccactttaatttctcagtggaagttaagaggggtgagaaaacaaagaaggggaaaaactgacaactaacaaaaccagcaccacatcgctaggtggtgcttactaattaccttctcaggattttcctcagattgaaaagcttatgaggatttcttgggagtcttaataacctgcctgttagtacagagctttcctgatgatatttactcttgagcacatgtggttgtaaaaccttaactttctttctccaggagggtggtgatagaaacagatggtagtatttatgaactgatgttctcgtgaaatgttgagggtggggagaaaagactttaagggaggagagccatctattttgttcctaaagccacctctcagcagaatcgtcatgtttttctgatgcaccgctctgcttcatgcccaagatgacttgcgaggcaatctcaggagctgtggacttaaccgttgcaaagcacactgtctttctcagcgttctctgcaagtcagtaggtgttagtatggttgcaaagttcactgtctcagcaaagttgaactgggctacctctctacagctgtttcctcagagggaaaaatcttgagaccagatggtggagctctggagtcagaggaaatgggtgtcttcagcacaaagctgctgcttttacttcagccacttctgacatttttacataccgagcctgagattgtgtgattatctcaaatcaaatcactttgatggagataaataatcaaaactgttttatagtcattgatttggtgagaacagtaatggaaaatggtgttgaaggacttctcatttttggagctttccttccagagtcctggctgattggtgttcgctgttcatctgagcccccaaaagcattattactgatacttgcacacagtcaaaagcgcagactggatggatggtcttttataaggcatttaagggtacactactgtgtttcactgaccatacatttttcttagcccctcaagtaatatagcacagagttatgaatgacaattcccctaaccattcctcttcatatctgcctcttccccttaccatcgtaattctccaaactggtcataaaggcactctgtgaagatattggggactgacatcttaagctctcacctggctgcagtaggaaaggccaaactgacgacaaaaaaaaaattctttataaagatgatatggtaacatgtatctttgccctgggtctgggtgggtccagtcagtctcagatttacaagcatttaggagcctaggtaaaagctgctagtattcttttaaaagttatatttatgacttgcaatgatagaaaactccttccaattaaatggcattttataatattatgtgtgtacttcacagtgttaaaaataccctcatacgttattgcatttgatcttcacagaaagtgcattttaaccagtactctgggtgcaataaataatatgtagaaatttaagtcctccaattccagcatatccagtgagttttgacagtgtgtttatgtggaatgtttaaggatatacaattgtactttatataaattggttcttgttcttcttaaatgtgacatgaaataattgtgctgctacattatactggaaattaacaggggaaaagggaagagctcttggctcccttgaggttctgctagtggtgttaggagtggttacaactgagcttttagtaaccatttaaccgtatgtaaacttggtttctaattaaaaaaaaatttctttttccaa

SEQ ID NO: 182785 - DNA, 1937 bp, Homo sapiens
  Payload ID: 16020
  Gene Symbol: SLC11A2
  Gene Name: solute carrier family 11 (proton-coupled divalent metal ion transporter), member 2
  Uniprot ID: P49281
  ENST ID: ENST00000545993
  CDS Start-End: 112-1785
agagtacaaagggttcctgcttggtggttttgctgcagcttcagagtttagcctgaactgtggcaggattttgtaacttgcacattttttgagaagtctgatggaggtataatgtccacggtcgattatttgaacagtgtttctggagatcatggggagtctgccagtcttggtaacatcaaccctgcctatagtaatccctctctttcacagtcccctggggactcagaggagtacttcgccacttactttaatgagaagatctccattcctgaggaggagtactcttgttttagctttcgtaaactctgggctttcaccggaccaggttttcttatgagcattgcctacctggatccaggaaatattgaatccgatttgcagtctggagcagtggctggatttaagttgctctggatccttctgttggccacccttgtggggctgctgctccagcggcttgcagctagactgggagtggttactgggctgcatcttgctgaagtatgtcaccgtcagtatcccaaggtcccacgagtcatcctgtggctgatggtggagttggctatcatcggctcagacatgcaagaagtcattggctcagccattgctatcaatcttctgtctgtaggaagaattcctctgtggggtggcgttctcatcaccattgcagatacttttgtatttctcttcttggacaaatatggcttgcggaagctagaagcattttttggctttctcatcactattatggccctcacatttggatatgagtatgttacagtgaaacccagccagagccaggtactcaagggcatgttcgtaccatcctgttcaggctgtcgcactccacagattgaacaggctgtgggcatcgtgggagctgtcatcatgccacacaacatgtacctgcattctgccttagtcaagtctagacaggtaaaccggaacaataagcaggaagttcgagaagccaataagtactttttcattgaatcctgcattgcactctttgtttccttcatcatcaatgtctttgttgtctcagtctttgctgaagcattttttgggaaaaccaacgagcaggtggttgaagtctgtacaaataccagcagtcctcatgctggcctctttcctaaagataactcgacactggctgtggacatctacaaagggggtgttgtgctgggatgttactttgggcctgctgcactctacatttgggcagtggggatcctggctgcaggacagagctccaccatgacaggaacctattctggccagtttgtcatggagggattcctgaacctaaagtggtcacgctttgcccgagtggttctgactcgctctattgccatcatccccactctgcttgttgctgtcttccaagatgtagagcatctaacagggatgaatgactttctgaatgttctacagagcttacagcttccctttgctctcatacccatcctcacatttacgagcttgcggccagtaatgagtgactttgccaatggactaggctggcggattgcaggaggaatcttggtccttatcatctgttccatcaatatgtactttgtagtggtttatgtccgggacctagggcatgtggcattatatgtggtggctgctgtggtcagcgtggcttatctgggctttgtgttctacttgggttggcaatgtttgattgcactgggcatgtccttcctggactgtgggcatacggtaagcatctctaaaggcctgctgacagaagaagccacccgtggctacgttaaataacactggattagtctgtcttctgcaggtagccatcagagccagtgtgtttctatggtttactgtgtgaacatagccaaaagtatgtgccgttgcacagactgtgtttatgactcaaccgttggttggaaaagactttgtttcatgtgtatttg

SEQ ID NO: 182786 - DNA, 2470 bp, Homo sapiens
  Payload ID: 16020
  Gene Symbol: SLC11A2
  Gene Name: solute carrier family 11 (proton-coupled divalent metal ion transporter), member 2
  Uniprot ID: P49281
  ENST ID: ENST00000541174
  CDS Start-End: 406-2091
agagtccaggactgatggagtcgcgccattcagagaaagacccaaagatgggggcagggagggaacgccggaggtcgcgggggtctcgccccttccccgccgcggcctaggacacatggcccagctcccagctgcaccggatggcgcgcccggcctgtgtcggggtgcgctgacctgcttcgacgcctcgaaagaggccgacgggcacagggcaaggtctttcgtggcctcttcgtcggcgccgcagggggccgggctgctctccggggcctcccgccgccccgcttcaacaaaagactcattataacctaaccgacttcagggagcgccttctgtgtgaatagcctgcatacgcggctcagtaattaatcatattctaagaactcagccactcaggtatccaccatggtgctgggtcctgaacagaagatgtcagatgacagtgtttctggagatcatggggagtctgccagtcttggtaacatcaaccctgcctatagtaatccctctctttcacagtcccctggggactcagaggagtacttcgccacttactttaatgagaagatctccattcctgaggaggagtactcttgttttagctttcgtaaactctgggctttcaccggaccaggttttcttatgagcattgcctacctggatccaggaaatattgaatccgatttgcagtctggagcagtggctggatttaagttgctctggatccttctgttggccacccttgtggggctgctgctccagcggcttgcagctagactgggagtggttactgggctgcatcttgctgaagtatgtcaccgtcagtatcccaaggtcccacgagtcatcctgtggctgatggtggagttggctatcatcggctcagacatgcaagaagtcattggctcagccattgctatcaatcttctgtctgtaggaagaattcctctgtggggtggcgttctcatcaccattgcagatacttttgtatttctcttcttggacaaatatggcttgcggaagctagaagcattttttggctttctcatcactattatggccctcacatttggatatgagtatgttacagtgaaacccagccagagccaggtactcaagggcatgttcgtaccatcctgttcaggctgtcgcactccacagattgaacaggctgtgggcatcgtgggagctgtcatcatgccacacaacatgtacctgcattctgccttagtcaagtctagacaggtaaaccggaacaataagcaggaagttcgagaagccaataagtactttttcattgaatcctgcattgcactctttgtttccttcatcatcaatgtctttgttgtctcagtctttgctgaagcattttttgggaaaaccaacgagcaggtggttgaagtctgtacaaataccagcagtcctcatgctggcctctttcctaaagataactcgacactggctgtggacatctacaaagggggtgttgtgctgggatgttactttgggcctgctgcactctacatttgggcagtggggatcctggctgcaggacagagctccaccatgacaggaacctattctggccagtttgtcatggagggattcctgaacctaaagtggtcacgctttgcccgagtggttctgactcgctctattgccatcatccccactctgcttgttgctgtcttccaagatgtagagcatctaacagggatgaatgactttctgaatgttctacagagcttacagcttccctttgctctcatacccatcctcacatttacgagcttgcggccagtaatgagtgactttgccaatggactaggctggcggattgcaggaggaatcttggtccttatcatctgttccatcaatatgtactttgtagtggtttatgtccgggacctagggcatgtggcattatatgtggtggctgctgtggtcagcgtggcttatctgggctttgtgttctacttgggttggcaatgtttgattgcactgggcatgtccttcctggactgtgggcatacggtaagcatctctaaaggcctgctgacagaagaagccacccgtggctacgttaaataacactggattagtctgtcttctgcaggtagccatcagagccagtgtgtttctatggtttactgtgtgaacatagccaaaagtatgtgccgttgcacagactgtgtttatgactcaaccgttggttggaaaagactttgtttcatgtgtatttgaaagatggaattattttttccttcctgacctaaccttagaactggattagggtgggatctttgaaaagctgacatttgctgctatcattccaacactaaattcttaagtagttgcccaagggccagctcagtttatccttcggagagacaaggatatgcatgattcttaaccaggctatatgttaaaaaaaaattggaaaatgcaatacattttttattatacaaac

SEQ ID NO: 182787 - DNA, 924 bp, Homo sapiens
  Payload ID: 16020
  Gene Symbol: SLC11A2
  Gene Name: solute carrier family 11 (proton-coupled divalent metal ion transporter), member 2
  ENST ID: ENST00000547510
  CDS Start-End: 123-344
gcgttagccagcgtggcgctggctcccggaatatggagccctgggcgcgggggcggcgtgtcaggtggttgcggagctggtaagaatcatattctaagaactcagccactcaggtatccaccatggtgctgggtcctgaacagaagatgtcagatgacagtgtttctggagatcatggggagtctgccagtcttggtaacatcaaccctgcctatagtaatccctctctttcacagtcccctggggactcagaggagtacttcgccacttactttaatgagaagatctccattcctgaggaggagaataagaggctgatggaacctgcagtactcttgttttagctttcgtaaactctgggctttcaccggaccaggttttcttatgagcattgcctacctggatccaggaaatattgaatccgatttgcagtctggagcagtggctggatttaagttgctctggatccttctgttggccacccttgtggggctgctgctccagcggcttgcagctagactgggagtggttactgggctgcatcttgctgaagtatgtcaccgtcagtatcccaaggtcccacgagtcatcctgtggctgatggtggagttggctatcatcggctcagacatgcaagaagtcattggctcagccattgctatcaatcttctgtctgtaggaagaattcctctgtggggtggcgttctcatcaccattgcagatacttttgtatttctcttcttggacaaatatggcttgcggaagctagaagcattttttggctttctcatcactattatggccctcacatttggatatgagtatgttacagtgaaacccagccagagccaggtactcaagggcatgttcgtaccatcctgttcaggctgtcgcactccacagattgaacaggctgtgggcatc

SEQ ID NO: 182788 - DNA, 2486 bp, Homo sapiens
  Payload ID: 16020
  Gene Symbol: SLC11A2
  Gene Name: solute carrier family 11 (proton-coupled divalent metal ion transporter), member 2
  Uniprot ID: P49281
  ENST ID: ENST00000547198
  CDS Start-End: 63-1769
gcgtgtcaggtggttgcggagctgaatcatattctaagaactcagccactcaggtatccaccatggtgctgggtcctgaacagaagatgtcagatgacagtgtttctggagatcatggggagtctgccagtcttggtaacatcaaccctgcctatagtaatccctctctttcacagtcccctggggactcagaggagtacttcgccacttactttaatgagaagatctccattcctgaggaggagtactcttgttttagctttcgtaaactctgggctttcaccggaccaggttttcttatgagcattgcctacctggatccaggaaatattgaatccgatttgcagtctggagcagtggctggatttaagttgctctggatccttctgttggccacccttgtggggctgctgctccagcggcttgcagctagactgggagtggttactgggctgcatcttgctgaagtatgtcaccgtcagtatcccaaggtcccacgagtcatcctgtggctgatggtggagttggctatcatcggctcagacatgcaagaagtcattggctcagccattgctatcaatcttctgtctgtaggaagaattcctctgtggggtggcgttctcatcaccattgcagatacttttgtatttctcttcttggacaaatatggcttgcggaagctagaagcattttttggctttctcatcactattatggccctcacatttggatatgagtatgttacagtgaaacccagccagagccaggtactcaagggcatgttcgtaccatcctgttcaggctgtcgcactccacagattgaacaggctgtgggcatcgtgggagctgtcatcatgccacacaacatgtacctgcattctgccttagtcaagtctagacaggtaaaccggaacaataagcaggaagttcgagaagccaataagtactttttcattgaatcctgcattgcactctttgtttccttcatcatcaatgtctttgttgtctcagtctttgctgaagcattttttgggaaaaccaacgagcaggtggttgaagtctgtacaaataccagcagtcctcatgctggcctctttcctaaagataactcgacactggctgtggacatctacaaagggggtgttgtgctgggatgttactttgggcctgctgcactctacatttgggcagtggggatcctggctgcaggacagagctccaccatgacaggaacctattctggccagtttgtcatggagggattcctgaacctaaagtggtcacgctttgcccgagtggttctgactcgctctattgccatcatccccactctgcttgttgctgtcttccaagatgtagagcatctaacagggatgaatgactttctgaatgttctacagagcttacagcttccctttgctctcatacccatcctcacatttacgagcttgcggccagtaatgagtgactttgccaatggactaggctggcggattgcaggaggaatcttggtccttatcatctgttccatcaatatgtactttgtagtggtttatgtccgggacctagggcatgtggcattatatgtggtggctgctgtggtcagcgtggcttatctgggctttgtgttctacttgggttggcaatgtttgattgcactgggcatgtccttcctggactgtgggcatacgtgccatctgggattgacagctcagcctgaactctatcttctgaacaccatggacgctgactcacttgtgtctagatgactgacagcctgagagactctataagaacatgtttttctaagccctttttgtgccaggtgtcccgttaacgtctctgttagttcagaggtgagttttgttcagacgttttgaacaaaaggcaaagatttcctcatgggaagggtgttcaaaactgacagctataaatgtaggtcagagacccacccacctcataacagtcatacactcccagagttaaacgattggcctctgatggccacacacccctatgggcttgtgtcttggactctgggatttaaaagatatatatgtatatatatttatgtaaacctgagcatctcagtttgggtagagttttaaggttatatgaaactgatagaacttttgtattttttttttaaatattgttttgatatatcagatatttgttttgtctggatcacaagtgagaaagaaaagagaacaatgctctttttcacaatgaactggtcaaattgactatcttgtaaagtgatactttactatgtcagtgaaatttcagtttgattttagtcaaccagattatatcctttgtatctactgatattaacacatcatattaacacatcatttcttaaaaaaacatttcttctgtttggcaatcataattaactctggttatcagcctattttgtaattattgtctttgtcgtcacttttcttgaattgttttctagtcattaaacagatatgaaggca

SEQ ID NO: 182789 - DNA, 1740 bp, Homo sapiens
  Payload ID: 16020
  Gene Symbol: SLC11A2
  Gene Name: solute carrier family 11 (proton-coupled divalent metal ion transporter), member 2
  ENST ID: ENST00000546743
  CDS Start-End: 287-1735
ggggagggcgttagccagcgtggcgctggctcccggaatatggagccctgggcgcgggggcggcgtgtcaggtggttgcggagctggtaagaatcatattctaagaactcagccactcaggtatccaccatggtgctgggtcctgaacagaagatgtcagatgtcccctggggactcagaggagtacttcgccacttactttaatgagaagatctccattcctgaggaggagtactcttgttttagctttcgtaaactctgggctttcaccggaccaggttttcttatgagcattgcctacctggatccaggaaatattgaatccgatttgcagtctggagcagtggctggatttaagttgctctggatccttctgttggccacccttgtggggctgctgctccagcggcttgcagctagactgggagtggttactgggctgcatcttgctgaagtatgtcaccgtcagtatcccaaggtcccacgagtcatcctgtggctgatggtggagttggctatcatcggctcagacatgcaagaagtcattggctcagccattgctatcaatcttctgtctgtaggaagaattcctctgtggggtggcgttctcatcaccattgcagatacttttgtatttctcttcttggacaaatatggcttgcggaagctagaagcattttttggctttctcatcactattatggccctcacatttggatatgagtatgttacagtgaaacccagccagagccaggtactcaagggcatgttcgtaccatcctgttcaggctgtcgcactccacagattgaacaggctgtgggcatcgtgggagctgtcatcatgccacacaacatgtacctgcattctgccttagtcaagtctagacaggtaaaccggaacaataagcaggaagttcgagaagccaataagtactttttcattgaatcctgcattgcactctttgtttccttcatcatcaatgtctttgttgtctcagtctttgctgaagcattttttgggaaaaccaacgagcaggtggttgaagtctgtacaaataccagcagtcctcatgctggcctctttcctaaagataactcgacactggctgtggacatctacaaagggggtgttgtgctgggatgttactttgggcctgctgcactctacatttgggcagtggggatcctggctgcaggacagagctccaccatgacaggaacctattctggccagtttgtcatggagggattcctgaacctaaagtggtcacgctttgcccgagtggttctgactcgctctattgccatcatccccactctgcttgttgctgtcttccaagatgtagagcatctaacagggatgaatgactttctgaatgttctacagagcttacagcttccctttgctctcatacccatcctcacatttacgagcttgcggccagtaatgagtgactttgccaatggactaggctggcggattgcaggaggaatcttggtccttatcatctgttccatcaatatgtactttgtagtggtttatgtccgggacctagggcatgtggcattatatgtggtggctgctgtggtcagcgtggcttatctgggctttgtgttctacttgggttggcaatgtttgattgcactgggcatgtccttcctggactgtgggcatacggtaagcatctctaaaggcctgctgacagaagaagccacccgtggctacgttaaataacactg

SEQ ID NO: 182790 - DNA, 587 bp, Homo sapiens
  Payload ID: 16020
  Gene Symbol: SLC11A2
  Gene Name: solute carrier family 11 (proton-coupled divalent metal ion transporter), member 2
  ENST ID: ENST00000550714
  CDS Start-End: 145-587
agcgtggcgctggctcccggaatatggagccctgggcgcgggggcggcgtgtcaggtggttgcggagctggtaagaatcatattctaagaactcagccactcaggtatccaccatggtgctgggtcctgaacagaagatgtcagatgacagtgtttctggagatcatggggagtctgccagtcttgtactcttgttttagctttcgtaaactctgggctttcaccggaccaggttttcttatgagcattgcctacctggatccaggaaatattgaatccgatttgcagtctggagcagtggctggatttaagttgctctggatccttctgttggccacccttgtggggctgctgctccagcggcttgcagctagactgggagtggttactgggctgcatcttgctgaagtatgtcaccgtcagtatcccaaggtcccacgagtcatcctgtggctgatggtggagttggctatcatcggctcagacatgcaagaagtcattggctcagccattgctatcaatcttctgtctgtaggaagaattcctctgtggggtggcgttctcatcaccattgcagatacttttgt

SEQ ID NO: 182791 - DNA, 546 bp, Homo sapiens
  Payload ID: 16020
  Gene Symbol: SLC11A2
  Gene Name: solute carrier family 11 (proton-coupled divalent metal ion transporter), member 2
  ENST ID: ENST00000547732
  CDS Start-End: 253-546
atatggagccctgggcgcgggggcggcgtgtcaggtggttgcggagctgacagtgtttctggagatcatggggagtctgccagtcttggtaacatcaaccctgcctatagtaatccctctctttcacagtcccctggggactcagaggagtacttcgccacttactttaatgagaagatctccattcctgaggaggagtactcttgttttagctttcgtaaactctgggctttcaccggaccaggttttcttatgagcattgcctacctggatccaggaaatattgaatccgatttgcagtctggagcagtggctggatttaagttgctctggatccttctgttggccacccttgtggggctgctgctccagcggcttgcagctagactgggagtggttactgggctgcatcttgctgaagtatgtcaccgtcagtatcccaaggtcccacgagtcatcctgtggctgatggtggagttggctatcatcggctcagacatgcaagaagtcattggctcagccattgctatcaatcttctgtctgta

SEQ ID NO: 182792 - DNA, 565 bp, Homo sapiens
  Payload ID: 16020
  Gene Symbol: SLC11A2
  Gene Name: solute carrier family 11 (proton-coupled divalent metal ion transporter), member 2
  ENST ID: ENST00000549110
  CDS Start-End: 304-565
gagcttagaattttatttttgtttgctctcctcagtgtcccaagtagttggactataggcacacaccacacagcaccacacctggcttgtttcctttttaaaatggtggctcttgtcctttttgggaagtgtttgggcacagaggtactgatactgttattctggttttagaataagaggctgatggaacctgcaggtaagggaagagctttgacttggacagagaagtggccagcttcttaataaaaatactcttgttttagctttcgtaaactctgggctttcaccggaccaggttttcttatgagcattgcctacctggatccaggaaatattgaatccgatttgcagtctggagcagtggctggatttaagttgctctggatccttctgttggccacccttgtggggctgctgctccagcggcttgcagctagactgggagtggttactgggctgcatcttgctgaagtatgtcaccgtcagtatcccaaggtcccacgagtcatcctgtggctgatggtggagttggctatcatcggctcagacatgcaagaagtcattg

SEQ ID NO: 182793 - DNA, 581 bp, Homo sapiens
  Payload ID: 16020
  Gene Symbol: SLC11A2
  Gene Name: solute carrier family 11 (proton-coupled divalent metal ion transporter), member 2
  ENST ID: ENST00000547579
  CDS Start-End: 132-581
gttagccagcgtggcgctggctcccggaatatggagccctgggcgcgggggcggcgtgtcaggtggttgcggagctgtactcttgttttagctttcgtaaactctgggctttcaccggaccaggttttcttatgagcattgcctacctggatccaggaaatattgaatccgatttgcagtctggagcagtggctggatttaagttgctctggatccttctgttggccacccttgtggggctgctgctccagcggcttgcagctagactgggagtggttactgggctgcatcttgctgaagtatgtcaccgtcagtatcccaaggtcccacgagtcatcctgtggctgatggtggagttggctatcatcggctcagacatgcaagaagtcattggctcagccattgctatcaatcttctgtctgtaggaagaattcctctgtggggtggcgttctcatcaccattgcagatacttttgtatttctcttcttggacaaatatggcttgcggaagctagaagcattttttggctttctcatcactattatggccctcacatttggatatgagtatgttacagtg

SEQ ID NO: 182794 - DNA, 530 bp, Homo sapiens
  Payload ID: 16020
  Gene Symbol: SLC11A2
  Gene Name: solute carrier family 11 (proton-coupled divalent metal ion transporter), member 2
  ENST ID: ENST00000548150
  CDS Start-End: 522-530
ggcagcacttcttgttaaggaatggggaagcttcttatgaatctaatcttactctaatgttaggaaatcagcagtggtcccttggattactctacaaagctagtaggcagctttggttcagttatgactcagtgaaggttagagaattatatctacaaagtaggatctttttctttctttctttcgttttttgatacggagtttcgctcttgttgcccaggctggaatgtaatagcgcgatctcggctcactgcaacctctgcctcccgggttcaagcgattctcctgcctcagcctcttgatgcctggcgaattttttttgtatttttagtagtgacggggtttcaccatgttggccaggctggtctggaactcctgacctcaagtgatccacctgtatcggccttccgaagtgctggggtggtgtgagccaccgcgccctgccagatctttcttgtttgactttcattgctaagaatttggaatcatattctaagaactcagccactcaggtatccaccatggtgctg

SEQ ID NO: 182795 - DNA, 585 bp, Homo sapiens
  Payload ID: 16020
  Gene Symbol: SLC11A2
  Gene Name: solute carrier family 11 (proton-coupled divalent metal ion transporter), member 2
  ENST ID: ENST00000549625
  CDS Start-End: 109-351
agcgtggcgctggctcccggaatatggagccctgggcgcgggggcggcgtgtcaggtggttgcggagctgaatcatattctaagaactcagccactcaggtatccaccatggtgctgggtcctgaacagaagatgtcagatgacagtgtttctggagatcatggggagtctgccagtcttggtaacatcaaccctgcctatagtaatccctctctttcacagtcccctggggactcagaggagtacttcgccacttactttaatgagaagatctccattcctgaggaggaggctagagtgcaatggtgcaatcctggctcaccgcaacctcctcctcccgcattcaagtgattctcctgcctcagcctcccgagtagctgggattacagaataagaggctgatggaacctgcaggtaagggaagagctttgacttggacagagaagtggccagcttcttaataaaaatactcttgttttagctttcgtaaactctgggctttcaccggaccaggttttcttatgagcattgcctacctggatccaggaaatattgaatccgatttgcagtctggagcagtggctg

SEQ ID NO: 182796 - DNA, 2125 bp, Homo sapiens
  Payload ID: 16020
  Gene Symbol: SLC11A2
  Gene Name: solute carrier family 11 (proton-coupled divalent metal ion transporter), member 2
  Uniprot ID: P49281
  ENST ID: ENST00000546636
  CDS Start-End: 93-1799
ccggaatatggagccctgggcgcgggggcggcgtgtcaggtggttgcggagctgaatcatattctaagaactcagccactcaggtatccaccatggtgctgggtcctgaacagaagatgtcagatgacagtgtttctggagatcatggggagtctgccagtcttggtaacatcaaccctgcctatagtaatccctctctttcacagtcccctggggactcagaggagtacttcgccacttactttaatgagaagatctccattcctgaggaggagtactcttgttttagctttcgtaaactctgggctttcaccggaccaggttttcttatgagcattgcctacctggatccaggaaatattgaatccgatttgcagtctggagcagtggctggatttaagttgctctggatccttctgttggccacccttgtggggctgctgctccagcggcttgcagctagactgggagtggttactgggctgcatcttgctgaagtatgtcaccgtcagtatcccaaggtcccacgagtcatcctgtggctgatggtggagttggctatcatcggctcagacatgcaagaagtcattggctcagccattgctatcaatcttctgtctgtaggaagaattcctctgtggggtggcgttctcatcaccattgcagatacttttgtatttctcttcttggacaaatatggcttgcggaagctagaagcattttttggctttctcatcactattatggccctcacatttggatatgagtatgttacagtgaaacccagccagagccaggtactcaagggcatgttcgtaccatcctgttcaggctgtcgcactccacagattgaacaggctgtgggcatcgtgggagctgtcatcatgccacacaacatgtacctgcattctgccttagtcaagtctagacaggtaaaccggaacaataagcaggaagttcgagaagccaataagtactttttcattgaatcctgcattgcactctttgtttccttcatcatcaatgtctttgttgtctcagtctttgctgaagcattttttgggaaaaccaacgagcaggtggttgaagtctgtacaaataccagcagtcctcatgctggcctctttcctaaagataactcgacactggctgtggacatctacaaagggggtgttgtgctgggatgttactttgggcctgctgcactctacatttgggcagtggggatcctggctgcaggacagagctccaccatgacaggaacctattctggccagtttgtcatggagggattcctgaacctaaagtggtcacgctttgcccgagtggttctgactcgctctattgccatcatccccactctgcttgttgctgtcttccaagatgtagagcatctaacagggatgaatgactttctgaatgttctacagagcttacagcttccctttgctctcatacccatcctcacatttacgagcttgcggccagtaatgagtgactttgccaatggactaggctggcggattgcaggaggaatcttggtccttatcatctgttccatcaatatgtactttgtagtggtttatgtccgggacctagggcatgtggcattatatgtggtggctgctgtggtcagcgtggcttatctgggctttgtgttctacttgggttggcaatgtttgattgcactgggcatgtccttcctggactgtgggcatacgtgccatctgggattgacagctcagcctgaactctatcttctgaacaccatggacgctgactcacttgtgtctagatgactgacagcctgagagactctataagaacatgtttttctaagccctttttgtgccaggtgtcccgttaacgtctctgttagttcagagagacgggatttcaccatgttgcccaggctggtgttgaactcatgagctcaagtaatctgctggccttggcctcccaaagtgctgagattataggcgtgagccactgcatccagctcactcctcatttctttctagccccaaaggtgttgagtcagcaaatcctgcagcctttgtgtgactttgagcatcactttcccctttcagcattaaatatatgacctctctgccttattttagaa

SEQ ID NO: 182797 - DNA, 2401 bp, Homo sapiens
  Payload ID: 16020
  Gene Symbol: SLC11A2
  Gene Name: solute carrier family 11 (proton-coupled divalent metal ion transporter), member 2
  Uniprot ID: P49281
  ENST ID: ENST00000547688
  CDS Start-End: 243-2015
ccctttcaaccactggcactcacaggcttgccacctactcttgctcctgccaaatggtcaaagatgaaatctgattaggctttggagggcgtggtttgcctcttgaaattccttgctcgtctttagaaagctgtgttgcttagagcacccaaaagtgccctttatctaactgagggaggcgcacttgtcttcatatatagaggcaggagctggcattgggaaagtcaaactagttctgcaccatgaggaagaagcagctgaagacggaggcagctccacactgtgaactaaaatcatattctaagaactcagccactcaggtatccaccatggtgctgggtcctgaacagaagatgtcagatgacagtgtttctggagatcatggggagtctgccagtcttggtaacatcaaccctgcctatagtaatccctctctttcacagtcccctggggactcagaggagtacttcgccacttactttaatgagaagatctccattcctgaggaggagtactcttgttttagctttcgtaaactctgggctttcaccggaccaggttttcttatgagcattgcctacctggatccaggaaatattgaatccgatttgcagtctggagcagtggctggatttaagttgctctggatccttctgttggccacccttgtggggctgctgctccagcggcttgcagctagactgggagtggttactgggctgcatcttgctgaagtatgtcaccgtcagtatcccaaggtcccacgagtcatcctgtggctgatggtggagttggctatcatcggctcagacatgcaagaagtcattggctcagccattgctatcaatcttctgtctgtaggaagaattcctctgtggggtggcgttctcatcaccattgcagatacttttgtatttctcttcttggacaaatatggcttgcggaagctagaagcattttttggctttctcatcactattatggccctcacatttggatatgagtatgttacagtgaaacccagccagagccaggtactcaagggcatgttcgtaccatcctgttcaggctgtcgcactccacagattgaacaggctgtgggcatcgtgggagctgtcatcatgccacacaacatgtacctgcattctgccttagtcaagtctagacaggtaaaccggaacaataagcaggaagttcgagaagccaataagtactttttcattgaatcctgcattgcactctttgtttccttcatcatcaatgtctttgttgtctcagtctttgctgaagcattttttgggaaaaccaacgagcaggtggttgaagtctgtacaaataccagcagtcctcatgctggcctctttcctaaagataactcgacactggctgtggacatctacaaagggggtgttgtgctgggatgttactttgggcctgctgcactctacatttgggcagtggggatcctggctgcaggacagagctccaccatgacaggaacctattctggccagtttgtcatggagggattcctgaacctaaagtggtcacgctttgcccgagtggttctgactcgctctattgccatcatccccactctgcttgttgctgtcttccaagatgtagagcatctaacagggatgaatgactttctgaatgttctacagagcttacagcttccctttgctctcatacccatcctcacatttacgagcttgcggccagtaatgagtgactttgccaatggactaggctggcggattgcaggaggaatcttggtccttatcatctgttccatcaatatgtactttgtagtggtttatgtccgggacctagggcatgtggcattatatgtggtggctgctgtggtcagcgtggcttatctgggctttgtgttctacttgggttggcaatgtttgattgcactgggcatgtccttcctggactgtgggcatacggtaagcatctctaaaggcctgctgacagaagaagccacccgtggctacgttaaataacactggattagtctgtcttctgcaggtagccatcagagccagtgtgtttctatggtttactgtgtgaacatagccaaaagtatgtgccgttgcacagactgtgtttatgactcaaccgttggttggaaaagactttgtttcatgtgtatttgaaagatggaattattttttccttcctgacctaaccttagaactggattagggtgggatctttgaaaagctgacatttgctgctatcattccaacactaaattcttaagtagttgcccaagggccagctcagtttatccttcggagagacaaggatatgcatgattcttaaccaggctatatgttaaaaaaaaattggaaaatgcaatacattttttattatacaaactacagaa

SEQ ID NO: 182798 - DNA, 576 bp, Homo sapiens
  Payload ID: 16020
  Gene Symbol: SLC11A2
  Gene Name: solute carrier family 11 (proton-coupled divalent metal ion transporter), member 2
  ENST ID: ENST00000548193
  CDS Start-End: 130-576
agcgtggcgctggctcccggaatatggagccctgggcgcgggggcggcgtgtcaggtggttgcggagctggtaaggtgaggggaaggcaagaatcatattctaagaactcagccactcaggtatccaccatggtgctgggtcctgaacagaagatgtcagatgacagtgtttctggagatcatggggagtctgccagtcttggtaacatcaaccctgcctatagtaatccctctctttcacagtcccctggggactcagaggagtacttcgccacttactttaatgagaagatctccattcctgaggaggagtactcttgttttagctttcgtaaactctgggctttcaccggaccaggttttcttatgagcattgcctacctggatccaggaaatattgaatccgatttgcagtctggagcagtggctggatttaagttgctctggatccttctgttggccacccttgtggggctgctgctccagcggcttgcagctagactgggagtggttactgggctgcatcttgctgaagtatgtcaccgtcagtatcccaaggtcccacgagtcatcctg

SEQ ID NO: 182799 - DNA, 609 bp, Homo sapiens
  Payload ID: 16020
  Gene Symbol: SLC11A2
  Gene Name: solute carrier family 11 (proton-coupled divalent metal ion transporter), member 2
  ENST ID: ENST00000551215
  CDS Start-End: 1-380
atgttctacagagcttacagcttccctttgctctcatacccatcctcacatttacgagcttgcggccagtaatgagtgactttgccaatggactaggctggcggattgcaggaggaatcttggtccttatcatctgttccatcaatatgtactttgtagtggtttatgtccgggacctagggcatgtggcattatatgtggtggctgctgtggtcagcgtggcttatctgggctttgtgttctacttgggttggcaatgtttgattgcactgggcatgtccttcctggactgtgggcatacgtgccatctgggattgacagctcagcctgaactctatcttctgaacaccatggacgctgactcacttgtgtctagatgactgacagcctgagagactctataagaacatgtttttctaagccctttttgtgccaggtgtcccgttaacgtctctgttagttcagaggacaacaactctagatgaaaccagtgtgttggattttccccgcctccctgggtggttttatttctcagttgtttcattaccagagagtgttggggaaacgaaggtaaaaaataaaaacatcctgttgtgaaactcatagaaa

SEQ ID NO: 182800 - DNA, 569 bp, Homo sapiens
  Payload ID: 16020
  Gene Symbol: SLC11A2
  Gene Name: solute carrier family 11 (proton-coupled divalent metal ion transporter), member 2
  ENST ID: ENST00000546488
  CDS Start-End: 109-569
agcgtggcgctggctcccggaatatggagccctgggcgcgggggcggcgtgtcaggtggttgcggagctgaatcatattctaagaactcagccactcaggtatccaccatggtgctgggtcctgaacagaagatgtcagatgacagtgtttctggagatcatggggagtctgccagtcttggtaacatcaaccctgcctatagtaatccctctctttcacagtcccctggggactcagaggagtacttcgccacttactttaatgagaagatctccattcctgaggaggaggtcccacgagtcatcctgtggctgatggtggagttggctatcatcggctcagacatgcaagaagtcattggctcagccattgctatcaatcttctgtctgtaggaagaattcctctgtggggtggcgttctcatcaccattgcagatacttttgtatttctcttcttggacaaatatggcttgcggaagctagaagcattttttggctttctcatcactattatggccctcacatttggatatgagtatgttacagtgaaacccagccagagccaggt

SEQ ID NO: 182801 - DNA, 4765 bp, Homo sapiens
  Payload ID: 16021
  Gene Symbol: SLC12A4
  Gene Name: solute carrier family 12 (potassium/chloride transporter), member 4
  Uniprot ID: Q9UP95
  ENST ID: ENST00000316341
  CDS Start-End: 142-3399
cccggggggcgggcggaggaagtgagcgcagcggggaggaatgcgagcgggcggggcgtgtcggcccggggcggcggggacagcggcggggacagcggcgggcggctgggacggcgggtgcggcggggccgagcccgcacgatgcctcacttcaccgtggtgccagtggacgggccgaggcgcggcgactatgacaacctcgaggggctcagttgggtggactacggggagcgcgccgagctggatgactcggacggacatggcaaccacagagagagcagcccttttctttcccccttggaggcttccagaggaattgactactatgacaggaacctggcactgtttgaggaagagctggacatccgcccaaaggtatcgtctcttctgggaaagctcgtcagctacaccaacctcacccagggcgccaaagagcatgaggaggccgagagtggggagggcacccgccggagggcagccgaggcacccagcatgggcaccctcatgggggtgtacctgccctgcctgcagaatatctttggggttatcctcttcctgcggctgacctggatggtgggcacagcaggtgtgctacaggccctcctcatcgtgcttatctgctgctgttgtaccctgctgacggccatctccatgagtgccatcgccaccaacggtgtggttccagctgggggctcctatttcatgatctctcgttcactggggccagaatttggaggtgctgtgggcctgtgcttctacctgggaacaacattcgcagcagccatgtacatcctgggggccatcgagatcttgctgacctacattgccccaccagctgccattttttacccatcgggtgctcatgacacgtcgaatgccactttgaacaatatgcgtgtgtatgggaccattttcctgaccttcatgaccctggtggtgtttgtgggggtcaagtatgtgaacaaatttgcctcgctcttcctggcctgtgtgatcatctccatcctctccatctatgctgggggcataaagtctatatttgaccctcccgtgtttccggtatgcatgctgggcaacaggaccctgtcccgggaccagtttgacatctgtgccaagacagctgtagtggacaatgagacagtggccacccagctatggagtttcttctgccacagccccaaccttacgaccgactcctgtgacccctacttcatgctcaacaatgtgaccgagatccctggcatccccggggcagctgctggtgtgctccaggaaaacctgtggagcgcctacctggagaagggtgacatcgtggagaagcatgggctgccctccgcagatgccccgagcctgaaggagagcctgcctctgtacgtggtcgctgacatcgccacatccttcaccgtgctggtcggcatcttcttcccttctgtaacaggcatcatggctggctcaaaccgctctggggaccttcgtgacgcccagaagtctatccctgtggggaccattctggccatcattacaacttccctcgtgtacttcagcagtgtggttctctttggtgcctgcattgagggtgtggttctccgggacaagtatggcgatggtgtcagcaggaacttggtggtgggcacactggcctggccttcaccctgggtcatcgtcatcggctccttcttttcaacgtgtggcgctggcctccagagcctcacaggggcaccacgcctattgcaggccattgccaaggacaacatcatccccttcctccgggtgtttggccacgggaaggtgaatggtgaacccacatgggcactcctcctgacggcactcatcgccgagctgggcatcctcatcgcctccctcgacatggtggcccccatcttatccatgttctttctgatgtgctacctgttcgtgaacctcgcctgtgcggtgcagacactcctgaggacccccaactggcggccccggttcaagtactatcactgggcgctgtccttcctgggcatgagtctctgcctggcccttatgtttgtctcctcctggtactatgccctggtggccatgctcatcgccggcatgatctacaaatacatcgagtaccaaggggctgagaaggagtggggtgacgggatccgaggcctgtccctgagcgctgcccgctacgcgctgttgcggctggaggaggggcctcctcacaccaagaactggcggccgcagctgctggtgctgctgaagctggacgaggacctccacgtgaagtacccgcggctcctcaccttcgcctcccagctcaaggctggcaagggcctgaccattgttggttctgtcatccaggggagcttcttggagagctatggcgaggctcaggccgccgagcagaccatcaagaacatgatggaaattgagaaggtgaagggcttctgccaggtggtggtggccagcaaggtgcgggaggggctggcccacctcatccagtcctgtggcctgggaggcatgcggcataactccgtggtgctgggctggccctacggctggcgacagagcgaggacccccgtgcctggaagaccttcattgacaccgtgcgctgcactacggctgcccacctggccctgctcgtgcccaagaacatcgccttctaccccagcaaccacgagcgctacctggagggccacatagacgtgtggtggatcgtgcacgatggtggcatgctcatgcttctgcccttcctgctgcgccagcataaggtctggaggaagtgccggatgcgcatcttcacagtggcccagatggatgacaacagcatccagatgaagaaggacctggctgtctttctgtaccatctgcgccttgaggccgaggtggaggtggtggagatgcataacagtgacatctctgcatacacctacgagcggacgctgatgatggagcagcggtcgcagatgctgcggcagatgagactgaccaagactgagcgggagcgagaagcccagctggtcaaggatcggcactcggccctgcggctggagagcctgtactcggacgaggaagatgagtctgcagtgggggctgacaagatccagatgacgtggaccagggacaagtacatgactgagacctgggaccccagccatgcccctgacaatttccgggagctggtgcacattaagccggaccaatccaatgtgcggcgcatgcacactgctgtgaagctcaatgaagtcattgtcacgcgctcccacgacgcccgcctggttctcctaaacatgcctggcccacccaggaacagtgagggcgacgagaactacatggagttcctcgaggtgctgaccgagggccttgagcgggtgctgttggtgcgcggtggtggccgtgaagtcatcaccatctactcctgagcccagtgtcatcttgtggcctggagtcgaggtcttggccaggacataacaagctgtggtctggggtaacagcctcttcccagcacccacctgccagccctgcttgcctggccctgtcctggacccagctttgctaggtctccttggaaaccaggcctgggcctcaaaatggagatggatcccaggtcttgtgggaccctgggatgtttggggactttactatctagcaccccagtaggcctgtcctggccagagaagactggtaggggccgagtggggtttgaaggcagccggcccggcccagcccaggagcgctatttattgcatatttattgtttggatgtcaccatcagagacgaagggaagggtagccagggagggagtccagcccagctgcctgcaggaagatctggctcagtctactatgggcagggccccccaccaagctgagccgaatggagacagctgagctgaggcctgactttttcaataaaacattgtgtagttctgggcctcctgctgccccggctctgtttcccctggcgccaagagaagaaggcggaactgaacccaggcccagagccggctccctgaggctgtgcccctttccggcaatctctggccacaacccccactggccaggccgtccctcccactggccctagggcccctcccactcccacaccagataaggacagcccagtgccgctttctctggcagtaggcaccagggctggaatggggccgcccggctccccatggcagtgggtgacgctgctgctggggctgctgctccctcctgccgcccccttctggctcctcaatgtgctcttccccccgcacaccacgcccaaggctgagctcagtaaccacacacggcccgtcatcctcggtaagcccccaccaggcccctgatgcaccacgccagaccctggggagcctgggccccagcccctggcagctgacctggccaaagcccttctgccctgcataagccccgacataagtacctgccctggtgtggggaggggccaaaagcttgtcccttagaggaatgacgtcccttctcccaccacactgtgactctcagttgtctaacccagggggggcggagtgggggacggggtgtgcctgaggtcttggctggggcatcacaagctgtggtcagtcacagccacaccagactctgggccaagccccaccactccttccttggcccccacccaccaaggacaagatgcccagcccaggatcggtgagcaggagaggcccatccatgcccggcccctattaggcccagcccccatgcccccagacctatctgttcccaccttggactttggcaataaaggagcgccagactggg

SEQ ID NO: 182802 - DNA, 4670 bp, Homo sapiens
  Payload ID: 16021
  Gene Symbol: SLC12A4
  Gene Name: solute carrier family 12 (potassium/chloride transporter), member 4
  Uniprot ID: Q9UP95
  ENST ID: ENST00000422611
  CDS Start-End: 41-3304
cccggggggcgggcggaggaagtgagcgcagcggggaggaatgcgagcgggcggggcgtgtcggcccggggcggcggggacagcggcggggacagcggcgggcggctgggacggcgggtgcggcggggccgagcccgcacgatgcctcacttcaccgtggtgccagtggacgggccgaggcgcggcgactatgacaacctcgaggggctcagttgggtggactacggggagcgcgccgagctggatgactcggacggaagagctggacatccgcccaaaggtatcgtctcttctgggaaagctcgtcagctacaccaacctcacccagggcgccaaagagcatgaggaggccgagagtggggagggcacccgccggagggcagccgaggcacccagcatgggcaccctcatgggggtgtacctgccctgcctgcagaatatctttggggttatcctcttcctgcggctgacctggatggtgggcacagcaggtgtgctacaggccctcctcatcgtgcttatctgctgctgttgtaccctgctgacggccatctccatgagtgccatcgccaccaacggtgtggttccagctgggggctcctatttcatgatctctcgttcactggggccagaatttggaggtgctgtgggcctgtgcttctacctgggaacaacattcgcagcagccatgtacatcctgggggccatcgagatcttgctgacctacattgccccaccagctgccattttttacccatcgggtgctcatgacacgtcgaatgccactttgaacaatatgcgtgtgtatgggaccattttcctgaccttcatgaccctggtggtgtttgtgggggtcaagtatgtgaacaaatttgcctcgctcttcctggcctgtgtgatcatctccatcctctccatctatgctgggggcataaagtctatatttgaccctcccgtgtttccggtatgcatgctgggcaacaggaccctgtcccgggaccagtttgacatctgtgccaagacagctgtagtggacaatgagacagtggccacccagctatggagtttcttctgccacagccccaaccttacgaccgactcctgtgacccctacttcatgctcaacaatgtgaccgagatccctggcatccccggggcagctgctggtgtgctccaggaaaacctgtggagcgcctacctggagaagggtgacatcgtggagaagcatgggctgccctccgcagatgccccgagcctgaaggagagcctgcctctgtacgtggtcgctgacatcgccacatccttcaccgtgctggtcggcatcttcttcccttctgtaacaggcatcatggctggctcaaaccgctctggggaccttcgtgacgcccagaagtctatccctgtggggaccattctggccatcattacaacttccctcgtgtacttcagcagtgtggttctctttggtgcctgcattgagggtgtggttctccgggacaagtatggcgatggtgtcagcaggaacttggtggtgggcacactggcctggccttcaccctgggtcatcgtcatcggctccttcttttcaacgtgtggcgctggcctccagagcctcacaggggcaccacgcctattgcaggccattgccaaggacaacatcatccccttcctccgggtgtttggccacgggaaggtgaatggtgaacccacatgggcactcctcctgacggcactcatcgccgagctgggcatcctcatcgcctccctcgacatggtggcccccatcttatccatgttctttctgatgtgctacctgttcgtgaacctcgcctgtgcggtgcagacactcctgaggacccccaactggcggccccggttcaagtactatcactgggcgctgtccttcctgggcatgagtctctgcctggcccttatgtttgtctcctcctggtactatgccctggtggccatgctcatcgccggcatgatctacaaatacatcgagtaccaaggggctgagaaggagtggggtgacgggatccgaggcctgtccctgagcgctgcccgctacgcgctgttgcggctggaggaggggcctcctcacaccaagaactggcggccgcagctgctggtgctgctgaagctggacgaggacctccacgtgaagtacccgcggctcctcaccttcgcctcccagctcaaggctggcaagggcctgaccattgttggttctgtcatccaggggagcttcttggagagctatggcgaggctcaggccgccgagcagaccatcaagaacatgatggaaattgagaaggtgaagggcttctgccaggtggtggtggccagcaaggtgcgggaggggctggcccacctcatccagtcctgtggcctgggaggcatgcggcataactccgtggtgctgggctggccctacggctggcgacagagcgaggacccccgtgcctggaagaccttcattgacaccgtgcgctgcactacggctgcccacctggccctgctcgtgcccaagaacatcgccttctaccccagcaaccacgagcgctacctggagggccacatagacgtgtggtggatcgtgcacgatggtggcatgctcatgcttctgcccttcctgctgcgccagcataaggtctggaggaagtgccggatgcgcatcttcacagtggcccagatggatgacaacagcatccagatgaagaaggacctggctgtctttctgtaccatctgcgccttgaggccgaggtggaggtggtggagatgcataacagtgacatctctgcatacacctacgagcggacgctgatgatggagcagcggtcgcagatgctgcggcagatgagactgaccaagactgagcgggagcgagaagcccagctggtcaaggatcggcactcggccctgcggctggagagcctgtactcggacgaggaagatgagtctgcagtgggggctgacaagatccagatgacgtggaccagggacaagtacatgactgagacctgggaccccagccatgcccctgacaatttccgggagctggtgcacattaagccggaccaatccaatgtgcggcgcatgcacactgctgtgaagctcaatgaagtcattgtcacgcgctcccacgacgcccgcctggttctcctaaacatgcctggcccacccaggaacagtgagggcgacgagaactacatggagttcctcgaggtgctgaccgagggccttgagcgggtgctgttggtgcgcggtggtggccgtgaagtcatcaccatctactcctgagcccagtgtcatcttgtggcctggagtcgaggtcttggccaggacataacaagctgtggtctggggtaacagcctcttcccagcacccacctgccagccctgcttgcctggccctgtcctggacccagctttgctaggtctccttggaaaccaggcctgggcctcaaaatggagatggatcccaggtcttgtgggaccctgggatgtttggggactttactatctagcaccccagtaggcctgtcctggccagagaagactggtaggggccgagtggggtttgaaggcagccggcccggcccagcccaggagcgctatttattgcatatttattgtttggatgtcaccatcagagacgaagggaagggtagccagggagggagtccagcccagctgcctgcaggaagatctggctcagtctactatgggcagggccccccaccaagctgagccgaatggagacagctgagctgaggcctgactttttcaataaaacattgtgtagttctgggcctcctgctgccccggctctgtttcccctggcgccaagagaagaaggcggaactgaacccaggcccagagccggctccctgaggctgtgcccctttccggcaatctctggccacaacccccactggccaggccgtccctcccactggccctagggcccctcccactcccacaccagataaggacagcccagtgccgctttctctggcagtaggcaccagggctggaatggggccgcccggctccccatggcagtgggtgacgctgctgctggggctgctgctccctcctgccgcccccttctggctcctcaatgtgctcttccccccgcacaccacgcccaaggctgagctcagtaaccacacacggcccgtcatcctcggtaagcccccaccaggcccctgatgcaccacgccagaccctggggagcctgggccccagcccctggcagctgacctggccaaagcccttctgccctgcataagccccgacataagtacctgccctggtgtggggaggggccaaaagcttgtcccttagaggaatgacgtcccttctcccaccacactgtgactctcagttgtctaacccagggggggcggagtgggggacggggtgtgcctgaggtcttggctggggcatcacaagctgtggtcagtcacagccacaccagactctgggccaagccccaccactccttccttggcccccacccaccaaggacaagatgcccagcccaggatcggtgagcaggagaggcccatccatgcccggcccctattaggcccagcccccatgcccccagacctatctgttcccaccttggactttggcaataaaggagcgccagactggg

SEQ ID NO: 182803 - DNA, 3627 bp, Homo sapiens
  Payload ID: 16021
  Gene Symbol: SLC12A4
  Gene Name: solute carrier family 12 (potassium/chloride transporter), member 4
  Uniprot ID: Q9UP95
  ENST ID: ENST00000541864
  CDS Start-End: 105-3269
gagtcctgctagatccccgcaagctaggccagctcctcccactgcctcccttcctctttctcctcctcttactcctttccagccagaccttggctgtctacaggatgggggacaccctgagccccggacatggcaaccacagagagagcagcccttttctttcccccttggaggcttccagaggaattgactactatgacaggaacctggcactgtttgaggaagagctggacatccgcccaaaggtatcgtctcttctgggaaagctcgtcagctacaccaacctcacccagggcgccaaagagcatgaggaggccgagagtggggagggcacccgccggagggcagccgaggcacccagcatgggcaccctcatgggggtgtacctgccctgcctgcagaatatctttggggttatcctcttcctgcggctgacctggatggtgggcacagcaggtgtgctacaggccctcctcatcgtgcttatctgctgctgttgtaccctgctgacggccatctccatgagtgccatcgccaccaacggtgtggttccagctgggggctcctatttcatgatctctcgttcactggggccagaatttggaggtgctgtgggcctgtgcttctacctgggaacaacattcgcagcagccatgtacatcctgggggccatcgagatcttgctgacctacattgccccaccagctgccattttttacccatcgggtgctcatgacacgtcgaatgccactttgaacaatatgcgtgtgtatgggaccattttcctgaccttcatgaccctggtggtgtttgtgggggtcaagtatgtgaacaaatttgcctcgctcttcctggcctgtgtgatcatctccatcctctccatctatgctgggggcataaagtctatatttgaccctcccgtgtttccggtatgcatgctgggcaacaggaccctgtcccgggaccagtttgacatctgtgccaagacagctgtagtggacaatgagacagtggccacccagctatggagtttcttctgccacagccccaaccttacgaccgactcctgtgacccctacttcatgctcaacaatgtgaccgagatccctggcatccccggggcagctgctggtgtgctccaggaaaacctgtggagcgcctacctggagaagggtgacatcgtggagaagcatgggctgccctccgcagatgccccgagcctgaaggagagcctgcctctgtacgtggtcgctgacatcgccacatccttcaccgtgctggtcggcatcttcttcccttctgtaacaggcatcatggctggctcaaaccgctctggggaccttcgtgacgcccagaagtctatccctgtggggaccattctggccatcattacaacttccctcgtgtacttcagcagtgtggttctctttggtgcctgcattgagggtgtggttctccgggacaagtatggcgatggtgtcagcaggaacttggtggtgggcacactggcctggccttcaccctgggtcatcgtcatcggctccttcttttcaacgtgtggcgctggcctccagagcctcacaggggcaccacgcctattgcaggccattgccaaggacaacatcatccccttcctccgggtgtttggccacgggaaggtgaatggtgaacccacatgggcactcctcctgacggcactcatcgccgagctgggcatcctcatcgcctccctcgacatggtggcccccatcttatccatgttctttctgatgtgctacctgttcgtgaacctcgcctgtgcggtgcagacactcctgaggacccccaactggcggccccggttcaagtactatcactgggcgctgtccttcctgggcatgagtctctgcctggcccttatgtttgtctcctcctggtactatgccctggtggccatgctcatcgccggcatgatctacaaatacatcgagtaccaaggggctgagaaggagtggggtgacgggatccgaggcctgtccctgagcgctgcccgctacgcgctgttgcggctggaggaggggcctcctcacaccaagaactggcggccgcagctgctggtgctgctgaagctggacgaggacctccacgtgaagtacccgcggctcctcaccttcgcctcccagctcaaggctggcaagggcctgaccattgttggttctgtcatccaggggagcttcttggagagctatggcgaggctcaggccgccgagcagaccatcaagaacatgatggaaattgagaaggtgaagggcttctgccaggtggtggtggccagcaaggtgcgggaggggctggcccacctcatccagtcctgtggcctgggaggcatgcggcataactccgtggtgctgggctggccctacggctggcgacagagcgaggacccccgtgcctggaagaccttcattgacaccgtgcgctgcactacggctgcccacctggccctgctcgtgcccaagaacatcgccttctaccccagcaaccacgagcgctacctggagggccacatagacgtgtggtggatcgtgcacgatggtggcatgctcatgcttctgcccttcctgctgcgccagcataaggtctggaggaagtgccggatgcgcatcttcacagtggcccagatggatgacaacagcatccagatgaagaaggacctggctgtctttctgtaccatctgcgccttgaggccgaggtggaggtggtggagatgcataacagtgacatctctgcatacacctacgagcggacgctgatgatggagcagcggtcgcagatgctgcggcagatgagactgaccaagactgagcgggagcgagaagcccagctggtcaaggatcggcactcggccctgcggctggagagcctgtactcggacgaggaagatgagtctgcagtgggggctgacaagatccagatgacgtggaccagggacaagtacatgactgagacctgggaccccagccatgcccctgacaatttccgggagctggtgcacattaagccggaccaatccaatgtgcggcgcatgcacactgctgtgaagctcaatgaagtcattgtcacgcgctcccacgacgcccgcctggttctcctaaacatgcctggcccacccaggaacagtgagggcgacgagaactacatggagttcctcgaggtgctgaccgagggccttgagcgggtgctgttggtgcgcggtggtggccgtgaagtcatcaccatctactcctgagcccagtgtcatcttgtggcctggagtcgaggtcttggccaggacataacaagctgtggtctggggtaacagcctcttcccagcacccacctgccagccctgcttgcctggccctgtcctggacccagctttgctaggtctccttggaaaccaggcctgggcctcaaaatggagatggatcccaggtcttgtgggaccctgggatgtttggggactttactatctagcaccccagtaggcctgtcctggccagagaagactggtaggggccgagtggggtttgaaggcagccggcccggcccagcccaggagcgctatttattgcatatttattgtttggatgtcaccatcagagacg

SEQ ID NO: 182804 - DNA, 3525 bp, Homo sapiens
  Payload ID: 16021
  Gene Symbol: SLC12A4
  Gene Name: solute carrier family 12 (potassium/chloride transporter), member 4
  Uniprot ID: Q9UP95
  ENST ID: ENST00000537830
  CDS Start-End: 39-3278
agtgcatggtggggtagccagccggccacctttgggccatggcagccgaaggtgctgtgtgcggcttcgtctatctggagggcactgcctgggcggtccctgaggacaccgaacccttggcatcctgcacattgggacatggcaaccacagagagagcagcccttttctttcccccttggaggcttccagaggaattgactactatgacaggaacctggcactgtttgaggaagagctggacatccgcccaaaggtatcgtctcttctgggaaagctcgtcagctacaccaacctcacccagggcgccaaagagcatgaggaggccgagagtggggagggcacccgccggagggcagccgaggcacccagcatgggcaccctcatgggggtgtacctgccctgcctgcagaatatctttggggttatcctcttcctgcggctgacctggatggtgggcacagcaggtgtgctacaggccctcctcatcgtgcttatctgctgctgttgtaccctgctgacggccatctccatgagtgccatcgccaccaacggtgtggttccagctgggggctcctatttcatgatctctcgttcactggggccagaatttggaggtgctgtgggcctgtgcttctacctgggaacaacattcgcagcagccatgtacatcctgggggccatcgagatcttgctgacctacattgccccaccagctgccattttttacccatcgggtgctcatgacacgtcgaatgccactttgaacaatatgcgtgtgtatgggaccattttcctgaccttcatgaccctggtggtgtttgtgggggtcaagtatgtgaacaaatttgcctcgctcttcctggcctgtgtgatcatctccatcctctccatctatgctgggggcataaagtctatatttgaccctcccgtgtttccggtatgcatgctgggcaacaggaccctgtcccgggaccagtttgacatctgtgccaagacagctgtagtggacaatgagacagtggccacccagctatggagtttcttctgccacagccccaaccttacgaccgactcctgtgacccctacttcatgctcaacaatgtgaccgagatccctggcatccccggggcagctgctggtgtgctccaggaaaacctgtggagcgcctacctggagaagggtgacatcgtggagaagcatgggctgccctccgcagatgccccgagcctgaaggagagcctgcctctgtacgtggtcgctgacatcgccacatccttcaccgtgctggtcggcatcttcttcccttctgtaacaggcatcatggctggctcaaaccgctctggggaccttcgtgacgcccagaagtctatccctgtggggaccattctggccatcattacaacttccctcgtgtacttcagcagtgtggttctctttggtgcctgcattgagggtgtggttctccgggacaagtatggcgatggtgtcagcaggaacttggtggtgggcacactggcctggccttcaccctgggtcatcgtcatcggctccttcttttcaacgtgtggcgctggcctccagagcctcacaggggcaccacgcctattgcaggccattgccaaggacaacatcatccccttcctccgggtgtttggccacgggaaggtgaatggtgaacccacatgggcactcctcctgacggcactcatcgccgagctgggcatcctcatcgcctccctcgacatggtggcccccatcttatccatgttctttctgatgtgctacctgttcgtgaacctcgcctgtgcggtgcagacactcctgaggacccccaactggcggccccggttcaagtactatcactgggcgctgtccttcctgggcatgagtctctgcctggcccttatgtttgtctcctcctggtactatgccctggtggccatgctcatcgccggcatgatctacaaatacatcgagtaccaaggggctgagaaggagtggggtgacgggatccgaggcctgtccctgagcgctgcccgctacgcgctgttgcggctggaggaggggcctcctcacaccaagaactggcggccgcagctgctggtgctgctgaagctggacgaggacctccacgtgaagtacccgcggctcctcaccttcgcctcccagctcaaggctggcaagggcctgaccattgttggttctgtcatccaggggagcttcttggagagctatggcgaggctcaggccgccgagcagaccatcaagaacatgatggaaattgagaaggtgaagggcttctgccaggtggtggtggccagcaaggtgcgggaggggctggcccacctcatccagtcctgtggcctgggaggcatgcggcataactccgtggtgctgggctggccctacggctggcgacagagcgaggacccccgtgcctggaagaccttcattgacaccgtgcgctgcactacggctgcccacctggccctgctcgtgcccaagaacatcgccttctaccccagcaaccacgagcgctacctggagggccacatagacgtgtggtggatcgtgcacgatggtggcatgctcatgcttctgcccttcctgctgcgccagcataaggtctggaggaagtgccggatgcgcatcttcacagtggcccagatggatgacaacagcatccagatgaagaaggacctggctgtctttctgtaccatctgcgccttgaggccgaggtggaggtggtggagatgcataacagtgacatctctgcatacacctacgagcggacgctgatgatggagcagcggtcgcagatgctgcggcagatgagactgaccaagactgagcgggagcgagaagcccagctggtcaaggatcggcactcggccctgcggctggagagcctgtactcggacgaggaagatgagtctgcagtgggggctgacaagatccagatgacgtggaccagggacaagtacatgactgagacctgggaccccagccatgcccctgacaatttccgggagctggtgcacattaagccggaccaatccaatgtgcggcgcatgcacactgctgtgaagctcaatgaagtcattgtcacgcgctcccacgacgcccgcctggttctcctaaacatgcctggcccacccaggaacagtgagggcgacgagaactacatggagttcctcgaggtgctgaccgagggccttgagcgggtgctgttggtgcgcggtggtggccgtgaagtcatcaccatctactcctgagcccagtgtcatcttgtggcctggagtcgaggtcttggccaggacataacaagctgtggtctggggtaacagcctcttcccagcacccacctgccagccctgcttgcctggccctgtcctggacccagctttgctaggtctccttggaaaccaggcctgggcctcaaaatggagatggatcccaggtcttgtgggaccctgggatgtttggggactttactatctagcaccccagtaggcctgtcct

SEQ ID NO: 182805 - DNA, 3768 bp, Homo sapiens
  Payload ID: 16021
  Gene Symbol: SLC12A4
  Gene Name: solute carrier family 12 (potassium/chloride transporter), member 4
  Uniprot ID: Q9UP95
  ENST ID: ENST00000576616
  CDS Start-End: 1-3207
atgcctcacttcaccgtggtgccagtggacgggccgaggcgcggcgactatgacaacctcgaggggctcagttgggtggactacggggagcgcgccgagctggatgactcggacggacatggcaaccacagagagagcagcccttttctttcccccttggaggcttccagaggaattgactactatgacaggaacctggcactgtttgaggaagagctggacatccgcccaaaggtatcgtctcttctgggaaagctcgtcagctacaccaacctcacccagggcgccaaagagcatgaggaggccgagagtggggagggcacccgccggagggcagccgaggcacccagcatgggcaccctcatgggggtgtacctgccctgcctgcagaatatctttggggttatcctcttcctgcggctgacctggatggtgggcacagcaggtgtgctacaggccctcctcatcgtgcttatctgctgctgttgtaccctgctgacggccatctccatgagtgccatcgccaccaacggtgtggttccagctgggggctcctatttcatgatctctcgttcactggggccagaatttggaggtgctgtgggcctgtgcttctacctgggaacaacattcgcagcagccatgtacatcctgggggccatcgagatcttgctgacctacattgccccaccagctgccattttttacccatcgggtgctcatgacacgtcgaatgccactttgaacaatatgcgtgtgtatgggaccattttcctgaccttcatgaccctggtggtgtttgtgggggtcaagtatgtgaacaaatttgcctcgctcttcctggcctgtgtgatcatctccatcctctccatctatgctgggggcataaagtctatatttgaccctcccgtgtttccggtatgcatgctgggcaacaggaccctgtcccgggaccagtttgacatctgtgccaagacagctgtagtggacaatgagacagtggccacccagctatggagtttcttctgccacagccccaaccttacgaccgactcctgtgacccctacttcatgctcaacaatgtgaccgagatccctggcatccccggggcagctgctggtgtgctccaggaaaacctgtggagcgcctacctggagaagggtgacatcgtggagaagcatgggctgccctccgcagatgccccgagcctgaaggagagcctgcctctgtacgtggtcgctgacatcgccacatccttcaccgtgctggtcggcatcttcttcccttctgtaacaggcatcatggctggctcaaaccgctctggggaccttcgtgacgcccagaagtctatccctgtggggaccattctggccatcattacaacttccctcgtgtacttcagcagtgtggttctctttggtgcctgcattgagggtgtggttctccgggacaagtatggcgatggtgtcagcaggaacttggtggtgggcacactggcctggccttcaccctgggtcatcgtcatcggctccttcttttcaacgtgtggcgctggcctccagagcctcacaggggcaccacgcctattgcaggccattgccaaggacaacatcatccccttcctccgggtgtttggccacgggaaggtgaatggtgaacccacatgggcactcctcctgacggcactcatcgccgagctgggcatcctcatcgcctccctcgacatggtggcccccatcttatccatgttctttctgatgtgctacctgttcgtgaacctcgcctgtgcggtgcagacactcctgaggacccccaactggcggccccggttcaagtactatcactgggcgctgtccttcctgggcatgagtctctgcctggcccttatgtttgtctcctcctggtactatgccctggtggccatgctcatcgccggcatgatctacaaatacatcgagtaccaaggggctgagaaggagtggggtgacgggatccgaggcctgtccctgagcgctgcccgctacgcgctgttgcggctggaggaggggcctcctcacaccaagaactggcggccgcagctgctggtgctgctgaagctggacgaggacctccacgtgaagtacccgcggctcctcaccttcgcctcccagctcaaggctggcaagggcctgaccattgttggttctgtcatccaggggagcttcttggagagctatggcgaggctcaggccgccgagcagaccatcaagaacatgatggaaattgagaaggtgaagggcttctgccaggtggtggtggccagcaaggtgcgggaggggctggcccacctcatccagtcctgtggcctgggaggcatgcggcataactccgtggtgctgggctggccctacggctggcgacagagcgaggacccccgtgcctggaagaccttcattgacaccgtgcgctgcactacggctgcccacctggccctgctcgtgcccaagaacatcgccttctaccccagcaaccacgagcgctacctggagggccacatagacgtgtggtggatcgtgcacgatggtggcatgctcatgcttctgcccttcctgctgcgccagcataaggtctggaggaagtgccggatgcgcatcttcacagtggcccagatggatgacaacagcatccagatgaagaaggacctggctgtctttctgtaccatctgcgccttgaggccgaggtggaggtggtggagatgcataacagtgacatctctgcatacacctacgagcggacgctgatgatggagcagcggtcgcagatgctgcggcagatgagactgaccaagactgagcgggagcgagaagcccagctggtcaaggatcggcactcggccctgcggctggagagcctgtactcggacgaggaagatgagtctgcagtgggggctgacaagatccagatgacgtggaccagggacaagtacatgactgagacctgggaccccagccatgcccctgacaatttccgggagctggtgcacattaagccggaccaatccaatgtgcggcgcatgcacactgctgtgaagctcaatgaagtcattgtcacgcgctcccacgacgcccgcctggttctcctaaacatgcctggcccacccaggaacagtgagggcgacgagaactgtatccctttgtggagaggcaggcagttgggaggtggatagcatgggaggtcaagccagcggcttctctcctgggcacccctgggtgggcatggcccaggtggcccgggttgcccgttgattctgttgttgcctccttgacttgaggccctgcagacatggagttcctcgaggtgctgaccgagggccttgagcgggtgctgttggtgcgcggtggtggccgtgaagtcatcaccatctactcctgagcccagtgtcatcttgtggcctggagtcgaggtcttggccaggacataacaagctgtggtctggggtaacagcctcttcccagcacccacctgccagccctgcttgcctggccctgtcctggacccagctttgctaggtctccttggaaaccaggcctgggcctcaaaatggagatggatcccaggtcttgtgggaccctgggatgtttggggactttactatctagcaccccagtaggcctgtcctggccagagaagactggtaggggccgagtggggtttgaaggcagccggcccggcccagcccaggagcgctatttattgcatatttattgtttggatgtcaccatcagag

SEQ ID NO: 182806 - DNA, 868 bp, Homo sapiens
  Payload ID: 16021
  Gene Symbol: SLC12A4
  Gene Name: solute carrier family 12 (potassium/chloride transporter), member 4
  ENST ID: ENST00000576377
  CDS Start-End: 64-228
gacagcggcggggacagcggcgggcggctgggacggcgggtgcggcggggccgagcccgcacgatgcctcacttcaccgtggtgccagtggacgggccgaggcgcggcgactatgacaacctcgaggggctcagttgggtggactacggggagcgcgccgagctggatgactcggacgacctacattgccccaccagctgccattttttacccatcgggtgctcatgacacgtcgaatgccactttgaacaatatgcgtgtgtatgggaccattttcctgaccttcatgaccctggtggtgtttgtgggggtcaagtatgtgaacaaatttgcctcgctcttcctggcctgtgtgatcatctccatcctctccatctatgctgggggcataaagtctatatttgaccctcccgtgtttccggtatgcatgctgggcaacaggaccctgtcccgggaccagtttgacatctgtgccaagacagctgtagtggacaatgagacagtggccacccagctatggagtttcttctgccacagccccaaccttacgaccgactcctgtgacccctacttcatgctcaacaatgtgaccgagatccctggcatccccggggcagctgctggtgtgctccaggaaaacctgtggagcgcctacctggagaagggtgacatcgtggagaagcatgggctgccctccgcagatgccccgagcctgaaggagagcctgcctctgtacgtggtcgctgacatcgccacatccttcaccgtgctggtcggcatcttcttcccttctgtaacaggcatcatggctggctcaaaccgctctggggaccttcgtgacgcccagaagtctatccctgtggggacc

SEQ ID NO: 182807 - DNA, 3620 bp, Homo sapiens
  Payload ID: 16021
  Gene Symbol: SLC12A4
  Gene Name: solute carrier family 12 (potassium/chloride transporter), member 4
  ENST ID: ENST00000572037
  CDS Start-End: 81-3194
acggcgggtgcggcggggccgagcccgcacgatgcctcacttcaccgtggtgccagtggacgggccgaggcgcggcgactatgacaacctcgaggggctcagttgggtggactacggggagcgcgccgagctggatgactcggacggaagagctggacatccgcccaaaggtatcgtctcttctgggaaagctcgtcagctacaccaacctcacccagggcgccaaagagcatgaggaggccgagagtggggagggcacccgccggagggcagccgaggcacccagcatgggcaccctcatgggggtgtacctgccctgcctgcagaatatctttggggttatcctcttcctgcggctgacctggatggtgggcacagcaggtgtgctacaggccctcctcatcgtgcttatctgctgctgttgtaccctgctgacggccatctccatgagtgccatcgccaccaacggtgtggttccagctgggggctcctatttcatgatctctcgttcactggggccagaatttggaggtgctgtgggcctgtgcttctacctgggaacaacattcgcagcagccatgtacatcctgggggccatcgagatcttgctgacctacattgccccaccagctgccattttttacccatcgggtgctcatgacacgtcgaatgccactttgaacaatatgcgtgtgtatgggaccattttcctgaccttcatgaccctggtggtgtttgtgggggtcaagtatgtgaacaaatttgcctcgctcttcctggcctgtgtgatcatctccatcctctccatctatgctgggggcataaagtctatatttgaccctcccgtgtttccggtatgcatgctgggcaacaggaccctgtcccgggaccagtttgacatctgtgccaagacagctgtagtggacaatgagacagtggccacccagctatggagtttcttctgccacagccccaaccttacgaccgactcctgtgacccctacttcatgctcaacaatgtgaccgagatccctggcatccccggggcagctgctggtgtgctccaggaaaacctgtggagcgcctacctggagaagggtgacatcgtggagaagcatgggctgccctccgcagatgccccgagcctgaaggagagcctgcctctgtacgtggtcgctgacatcgccacatccttcaccgtgctggtcggcatcttcttcccttctgtaacaggcatcatggctggctcaaaccgctctggggaccttcgtgacgcccagaagtctatccctgtggggaccattctggccatcattacaacttccctcgtgtacttcagcagtgtggttctctttggtgcctgcattgagggtgtggttctccgggacaagtatggcgatggtgtcagcaggaacttggtggtgggcacactggcctggccttcaccctgggtcatcgtcatcggctccttcttttcaacgtgtggcgctggcctccagagcctcacaggggcaccacgcctattgcaggccattgccaaggacaacatcatccccttcctccgggtgtttggccacgggaaggtgaatggtgaacccacatgggcactcctcctgacggcactcatcgccgagctgggcatcctcatcgcctccctcgacatggtggcccccatcttatccatgttctttctgatgtgctacctgttcgtgaacctcgcctgtgcggtgcagacactcctgaggacccccaactggcggccccggttcaagtactatcactgggcgctgtccttcctgggcatgagtctctgcctggcccttatgtttgtctcctcctggtactatgccctggtggccatgctcatcgccggcatgatctacaaatacatcgagtaccaaggggctgagaaggagtggggtgacgggatccgaggcctgtccctgagcgctgcccgctacgcgctgttgcggctggaggaggggcctcctcacaccaagaactggcggccgcagctgctggtgctgctgaagctggacgaggacctccacgtgaagtacccgcggctcctcaccttcgcctcccagctcaaggctggcaagggcctgaccattgttggttctgtcatccaggggagcttcttggagagctatggcgaggctcaggccgccgagcagaccatcaagaacatgatggaaattgagaaggtgaagggcttctgccaggtggtggtggccagcaaggtgcgggaggggctggcccacctcatccagtcctgtggcctgggaggcatgcggcataactccgtggtgctgggctggccctacggctggcgacagagcgaggacccccgtgcctggaagaccttcattgacaccgtgcgctgcactacggctgcccacctggccctgctcgtgcccaagaacatcgccttctaccccagcaaccacgagcgctacctggagggccacatagacgtgtggtggatcgtgcacgatggtggcatgctcatgcttctgcccttcctgctgcgccagcataaggtctggaggaagtgccggatgcgcatcttcacagtggcccagatggatgacaacagcatccagatgaagaaggacctggctgtctttctgtaccatctgcgccttgaggccgaggtggaggtggtggagatgcataacagtgacatctctgcatacacctacgagcggacgctgatgatggagcagcggtcgcagatgctgcggcagatgagactgaccaagactgagcgggagcgagaagcccagctggtcaaggatcggcactcggccctgcggctggagagcctgtactcggacgaggaagatgagtctgcagtgggggctgacaagatccagatgacgtggaccagggacaagtacatgactgagacctgggaccccagccatgcccctgacaatttccgggagctggtgcacattaagccggaccaatccaatgtgcggcgcatgcacactgctgtgaagctcaatgaagtcattgtcacgcgctcccacgacgcccgcctggttctcctaaacatgcctggcccacccaggaacagtgagggcgacgagaactacatggagttcctcgaggtgctgaccgagggccttgagcgggtgctgttggtgcgcggtggtggccgtgaagtcatcaccatctactcctgagcccagtgtcatcttgtggcctggagtcgaggtcttggccaggacataacaagctgtggtctggggtaacagcctcttcccagcacccacctgccagccctgcttgcctggccctgtcctggacccagctttgctaggtctccttggaaaccaggcctgggcctcaaaatggagatggatcccaggtcttgtgggaccctgggatgtttggggactttactatctagcaccccagtaggcctgtcctggccagagaagactggtaggggccgagtggggtttgaaggcagccggcccggcccagcccaggagcgctatttattgcatatttattgtttggatgtcaccatcagagacgaagggaagggtagccagggagggagtccagcccagctgcctgcaggaagatctggctcagtctactat

SEQ ID NO: 182808 - DNA, 406 bp, Homo sapiens
  Payload ID: 16021
  Gene Symbol: SLC12A4
  Gene Name: solute carrier family 12 (potassium/chloride transporter), member 4
  ENST ID: ENST00000570616
  CDS Start-End: 1-59
cccctgacaatttccgggagctggtgcacattaagccgatggctcatggcgacctgtgactggctacactacgtgtagggaccaatccaatgtgcggcgcatgcacactgctgtgaagctcaatgaagtcattgtcacgcgctcccacgacgcccgcctggttctcctaaacatgcctggcccacccaggaacagtgagggcgacgagaactacatggagttcctcgaggtgctgaccgagggccttgagcgggtgctgttggtgcgcggtggtggccgtgaagtcatcaccatctactcctgagcccagtgtcatcttgtggcctggagtcgaggtcttggccaggacataacaagctgtggtctggggtaacagcctcttcccagcacccacctgccagccctg

SEQ ID NO: 182809 - DNA, 891 bp, Homo sapiens
  Payload ID: 16021
  Gene Symbol: SLC12A4
  Gene Name: solute carrier family 12 (potassium/chloride transporter), member 4
  ENST ID: ENST00000571299
  CDS Start-End: 358-891
gtcttgcggggcccagcggctctgattccgtaccccccaccccaagggctggaggctggcagtaggcgtagtcagaggacgccacccgagccacgcgagggagaagagtggagatagacaagacatggcaaccacagagagagcagcccttttctttcccccttggaggcttccagaggaattgactactatgacaggaacctggcactgtttgaggaagagctggacatccgcccaaaggtatcgtctcttctgggaaagctcgtcagctacaccaacctcacccagggcgccaaagagcatgaggaggccgagagtggggagggcacccgccggagggcagccgaggcacccagcatgggcaccctcatgggggtgtacctgccctgcctgcagaatatctttggggttatcctcttcctgcggctgacctggatggtgggcacagcaggtgtgctacaggccctcctcatcgtgcttatctgctgctgttgtaccctgctgacggccatctccatgagtgccatcgccaccaacggtgtggttccagctgggggctcctatttcatgatctctcgttcactggggccagaatttggaggtgctgtgggcctgtgcttctacctgggaacaacattcgcagcagccatgtacatcctgggggccatcgagatcttgctgacctacattgccccaccagctgccattttttacccatcgggtgctcatgacacgtcgaatgccactttgaacaatatgcgtgtgtatgggaccattttcctgaccttcatgaccctggtggtgtttgtgggggtcaagtatgtgaacaaatttgcctcgctcttcctggcctgtgtgatcatctccatcctctccatctatgctgggggc

SEQ ID NO: 182810 - DNA, 588 bp, Homo sapiens
  Payload ID: 16021
  Gene Symbol: SLC12A4
  Gene Name: solute carrier family 12 (potassium/chloride transporter), member 4
  ENST ID: ENST00000575857
  CDS Start-End: 1-271
gccgcagctgctggtgctgctgaagctggacgaggacctccacgtgaagtacccgcggctcctcaccttcgcctcccagctcaaggctggcaagggcctgaccattgttggttctgtcatccaggggagcttcttggagagctatggcgaggctcaggccgccgagcagacaccgtgcgctgcactacggctgcccacctggccctgctcgtgcccaagaacatcgccttctaccccagcaaccacgagcgctacctggagggccacatagacgtgtggtggatcgtgcacgatggtggcatgctcatgcttctgcccttcctgctgcgccagcataaggtctggaggaagtgccggatgcgcatcttcacagtggcccagatggatgacaacagcatccagatgaagaaggacctggctgtctttctgtaccatctgcgccttgaggccgaggtggaggtggtggagatgcataacagtgacatctctgcatacacctacgagcggacgctgatgatggagcagcggtcgcagatgctgcggcagatgagactgaccaagactgagcgggagcgagaagcccagctg

SEQ ID NO: 182811 - DNA, 6061 bp, Homo sapiens
  Payload ID: 16022
  Gene Symbol: SLC12A5
  Gene Name: solute carrier family 12 (potassium/chloride transporter), member 5
  Uniprot ID: Q9H2X9
  ENST ID: ENST00000243964
  CDS Start-End: 164-3514
gtgtgcgagtgtgtgtgcgccgggcgggcgggcactgcagcttcttcctccgtggagcggagagcgagacagagctacagcgaacgagagagcggcgaaggcgggtagaggggcgcgggcgaggcggcgcagccatccccggaccaggggccgcgccgccaccatgctaaacaacctgacggactgcgaggacggcgatgggggagccaacccgggtgatggcaaccccaaggaaagcagtcccttcatcaacagcaccgacacagagaagggaaaggagtatgatggcaagaacatggccttgtttgaggaggagatggacaccagccctatggtgtcctccttgctcagtggcctggccaactacaccaacctgccccagggaagtagggagcatgaagaggcagaaaacaatgagggtggaaaaaagaagccggtgcaggccccacgcatgggcaccttcatgggcgtgtacctgccgtgcctgcagaacatctttggcgtcatcctcttcctgcggctcacctgggtggtgggcattgcaggcatcatggagtccttctgcatggtgttcatctgctgctcctgtacgatgctcacggccatctccatgagtgcaattgcaacgaatggtgttgtgcctgctggtggctcctactacatgatttccaggtctctgggcccagagtttgggggtgccgtgggcctctgcttctacctgggcactacctttgcaggagccatgtacatcctgggcaccatcgaaatcctgctggcttacctcttcccagccatggccatcttcaaggcagaagatgccagtggggaggcagcagccatgctgaacaacatgcgtgtttacggcacctgtgtgctcacctgcatggccactgtggtgtttgtgggtgtcaagtatgtcaacaagtttgcccttgtcttcctgggttgtgtcatcctctccatcctggccatctatgctggggtcatcaagtctgccttcgacccacccaacttcccgatctgcctcctgggtaaccgcacgctgtctcgccatggctttgatgtctgtgccaagctggcttgggaaggaaatgagacggtgaccacacggctatggggccttttctgctcctctcgcttcctcaacgccacctgtgatgaatacttcacccgaaacaatgtcacagagatccagggcatccctggtgctgccagtggcctcatcaaagagaacctctggagctcctacctgaccaagggcgtgattgtggagaggagtgggatgacctcggtgggcctggccgatggcactcctatcgacatggaccacccttatgtcttcagtgatatgacctcctacttcaccctgctggttggcatctacttcccctcagtcacagggatcatggctggttctaaccgctctggggacctgagggatgcccagaagtcaatccccactggcaccatcctggccatcgccaccacctctgctgtctacatcagctccgttgttctgtttggggcctgcattgagggggtcgtcctgcgggacaagtttggcgaagctgtgaatggcaacctcgtggtgggcactctggcctggccatctccatgggtaattgtcatcggatccttcttctccacctgtggggctgggctgcagagcctcacgggggccccacgcctgctgcaggccatctcgagggatggcattgtgcccttcctgcaggtctttggccatggcaaggccaatggagagccgacctgggccctgctcctgactgcctgcatctgcgagattggcatcctcattgcatccctcgacgaggtggcccccatcctctctatgttcttcctgatgtgctacatgtttgtgaatctggcctgtgcagtgcagacgctgctgaggacacccaactggaggccacgctttcgatattaccactggaccctctccttcctgggcatgagcctctgcctggccctcatgttcatctgctcctggtattatgcactggtagccatgctcattgctggactcatctacaagtacattgagtaccgtggggcagagaaggagtggggcgatgggatacgaggtctgtctctcagtgcggctcgctatgccctcttacgcctggaggaagggcccccacacaccaagaactggaggccacagctgctggtgctggtgcgtgtggaccaagaccagaatgtggtgcacccccagctgctctcactgacctcccagctgaaggcggggaagggcctgaccatcgtgggctctgtccttgagggcacctttctggaaaatcatccacaggcccagcgggcagaagagtctatcaggcgcctgatggaggcagagaaggtgaagggcttctgccaggtggtgatctcctccaacttgcgtgatggcgtgtcccatctgatccagtccgggggcctcggggggctgcagcacaacactgtgcttgttggctggccccgcaactggcgccagaaggaagatcatcagacgtggaggaacttcattgagctggtccgggaaaccacagctggccacttagccctgctggtcaccaagaacgtttccatgtttcctgggaaccctgagcgcttctctgagggcagcatcgacgtttggtggattgtgcacgatggaggcatgctcatgctgctgcccttcctgctgcggcaccacaaggtctggcggaagtgcaagatgcgtatcttcactgtggcccagatggatgacaatagcatccagatgaagaaggatctgaccacatttctgtatcatttacgcatcactgcggaggtcgaggtggtggagatgcatgagagcgacatctcagcttacacctatgagaagacgttggtgatggagcagcgttcccagatcctcaaacagatgcatttaaccaagaatgagcgggagcgggagatccagagtatcacagatgagtcacgaggctcaatccggagaaagaatccagccaacacgcggctccgcctgaacgtcccagaagagacggctggtgacagtgaagagaagccagaggaggaggtgcagctgatccacgatcagagtgctcccagctgccccagcagctccccgtccccaggggaggagcctgagggggaaggggagacagatccggagaaggtgcatctcacctggaccaaggacaagtcggtggcagagaagaataagggccccagtcctgtctcctctgagggcatcaaggacttcttcagcatgaagccggagtgggagaacttgaaccagtccaacgtgcggcgcatgcacacggccgtgcggctgaacgaggtcatcgtgaagaaatcccgggacgccaagcttgttttgctcaacatgcctgggcctccccgcaaccgcaatggtgatgaaaactacatggagtttctcgaggtcctcacagagcacctggaccgggtgatgctggtccgcggcggcggccgcgaggtcatcaccatctactcctgagaaccaggacctgccacccgggcccgagcgcgcccggcccgcggctccggagccctcgccgcgccccccgccgctgtcaccgtttacatacagaccctgtgcccgtgtcctggccccttaccccgctgcctgaagcccggaggccacgcctgttggggctgattcggagagggcgccccgccgcgcagagaccagagctcctcagtgccagtttggcccctgggtcttcgctgccctttttctaagcccggcctcgtctcgccggaggagacgctgcaataaaggttgggagaaggcgcggaaaggagaggagctggggccttggggacccccaggtagtccatgcggcccattcctccccttcccactcccgccgcggtcctcgctctgcgctcctccggcgctgctccctggctcccggcggcccggaggcccgcggggtgggaaggccgcgcttgccgtctccgccgccccttctcgccgagccgtggggcgcgggcggccgagcctatacatagtgtacaggagacatcgcgtgtatttttaacgtccccatatttatgtgactagaagcgcaacagacttctcgccatagtcgagctctcccgctgggggcactgcggggaggcgaggcctcgggaagctgaattttccttgacgtccaagagtttgagagcgaaagtgctttaggcccaggcgggggtcgtggcctcgttccctcgacacctccgtcctgctctcgcctcttcgccctttccgcgcgcccttggcttcccaccctcctctccagtccttttccgagatgaggtgagacaagggtccaacttttcctggattcgcctcccagcggacgtgagcttccactgcggctgcagagacgcgagcaacctcttctcatcggctcttatgcaagttggggccaggataggggaggggtgctcctcaagaggaagaaaccgagaggcccgcgccccaccgaggaagccccgccccggtgccttcgctggggagcaggcgtctctcctcagtcggcttgtcgcctgctccccgtatcccatggctcctcgccaaagactgaaattgtggagctggagggcgccccctccccggagtttcctccctgggacaagtgagggaggagggggccgattctggtttaggggccggacccactgagaggccccagagccgcccgtgatgttcctcccccgtccccatctggcagctcctgtctcgcctgagggacccagccgccttctccgtgctctggggccgggcctcgctgcttagcagcggcctctagctccgtctcccggggacctgggcctgagggagggctggagtcgcacgcgctttgtccttagcgcctgtctgctctcctctaactaggacccagggcctttggcttccccagctcatccttggcccttccgctccaccagcctggtctgaggcgtgctctgtccttagagaaggcgcggtggccgggttcccttcccctagggcacattactaagggggtcaggcactgcatgctcgttccagcaccatctgggactgggtacagtacctccagccccagggccctgacctgcgcacctagcttgacatctcacgcacctcccagagctggcgccactgagtaatccggacctcaccacctcttttcctttgagcccaaggcagagctggagctggcgccacccagacagcgtcaggtgtggctggggtaggtttggaggtctgccagttacaccaagtcccctctgagattcgatcaggggactggatagattctttcaggtactcaatcaggaagctggaggtgttagacaccagccccctgcatccttcagtagacctccctctgaacaccacagccaggtcctgccttctgggggcctgaatattccagagctgatgtgatgggctgtgcagaagggggctgtatcaacatcaattagggaaccaaagttgcactatctgggcccagattgtctggttggcaagagcaaagtttccgttgatgaaacagacatcccacaacaaaaacccaagttttctgtgctacatgtgcaatatttgttatgaatgttatcacaagtcattcatcaagttatctttataatcactgtagttagatgtttcatgtccattcaagtgacttttattctgagtgcaatatttcaatagccttgtagtgataactagtgttgcttttgttttagatgatctatgtgcagggcaatgcaatgaagttgaaaacccttgtaaataggagaggttgcaaaccaaatcaagagtatttattactattactgctattattattaggcctgcctttaattttcagtgtaagtgttcagtatgccgcatcctgcctcagtattgatcttgtgttctttgtgccaatatgaaaaggagagggttggttctttcctttattgttgaatgctcccatttaatgctttatggcttttactgtgttacttttttagactcccgtctgcacaaaatgcaataaaaataattttattatacccttca

SEQ ID NO: 182812 - DNA, 3593 bp, Homo sapiens
  Payload ID: 16022
  Gene Symbol: SLC12A5
  Gene Name: solute carrier family 12 (potassium/chloride transporter), member 5
  Uniprot ID: Q9H2X9
  ENST ID: ENST00000454036
  CDS Start-End: 77-3496
ctccctcctagagcctggttgcagccacttgtgcgatcccggaccttgccgcggccgcctggctcctttccgcgccatgagccgcaggttcacggtcacctcgctgccccccgcagggcccgccagaagccctgacccagagtcccgccggcattcggtcgcagacccccgccacctcccgggggaagacgtcaaaggtgatggcaaccccaaggaaagcagtcccttcatcaacagcaccgacacagagaagggaaaggagtatgatggcaagaacatggccttgtttgaggaggagatggacaccagccctatggtgtcctccttgctcagtggcctggccaactacaccaacctgccccagggaagtagggagcatgaagaggcagaaaacaatgagggtggaaaaaagaagccggtgcaggccccacgcatgggcaccttcatgggcgtgtacctgccgtgcctgcagaacatctttggcgtcatcctcttcctgcggctcacctgggtggtgggcattgcaggcatcatggagtccttctgcatggtgttcatctgctgctcctgtacgatgctcacggccatctccatgagtgcaattgcaacgaatggtgttgtgcctgctggtggctcctactacatgatttccaggtctctgggcccagagtttgggggtgccgtgggcctctgcttctacctgggcactacctttgcaggagccatgtacatcctgggcaccatcgaaatcctgctggcttacctcttcccagccatggccatcttcaaggcagaagatgccagtggggaggcagcagccatgctgaacaacatgcgtgtttacggcacctgtgtgctcacctgcatggccactgtggtgtttgtgggtgtcaagtatgtcaacaagtttgcccttgtcttcctgggttgtgtcatcctctccatcctggccatctatgctggggtcatcaagtctgccttcgacccacccaacttcccgatctgcctcctgggtaaccgcacgctgtctcgccatggctttgatgtctgtgccaagctggcttgggaaggaaatgagacggtgaccacacggctatggggccttttctgctcctctcgcttcctcaacgccacctgtgatgaatacttcacccgaaacaatgtcacagagatccagggcatccctggtgctgccagtggcctcatcaaagagaacctctggagctcctacctgaccaagggcgtgattgtggagaggagtgggatgacctcggtgggcctggccgatggcactcctatcgacatggaccacccttatgtcttcagtgatatgacctcctacttcaccctgctggttggcatctacttcccctcagtcacagggatcatggctggttctaaccgctctggggacctgagggatgcccagaagtcaatccccactggcaccatcctggccatcgccaccacctctgctgtctacatcagctccgttgttctgtttggggcctgcattgagggggtcgtcctgcgggacaagtttggcgaagctgtgaatggcaacctcgtggtgggcactctggcctggccatctccatgggtaattgtcatcggatccttcttctccacctgtggggctgggctgcagagcctcacgggggccccacgcctgctgcaggccatctcgagggatggcattgtgcccttcctgcaggtctttggccatggcaaggccaatggagagccgacctgggccctgctcctgactgcctgcatctgcgagattggcatcctcattgcatccctcgacgaggtggcccccatcctctctatgttcttcctgatgtgctacatgtttgtgaatctggcctgtgcagtgcagacgctgctgaggacacccaactggaggccacgctttcgatattaccactggaccctctccttcctgggcatgagcctctgcctggccctcatgttcatctgctcctggtattatgcactggtagccatgctcattgctggactcatctacaagtacattgagtaccgtggggcagagaaggagtggggcgatgggatacgaggtctgtctctcagtgcggctcgctatgccctcttacgcctggaggaagggcccccacacaccaagaactggaggccacagctgctggtgctggtgcgtgtggaccaagaccagaatgtggtgcacccccagctgctctcactgacctcccagctgaaggcggggaagggcctgaccatcgtgggctctgtccttgagggcacctttctggaaaatcatccacaggcccagcgggcagaagagtctatcaggcgcctgatggaggcagagaaggtgaagggcttctgccaggtggtgatctcctccaacttgcgtgatggcgtgtcccatctgatccagtccgggggcctcggggggctgcagcacaacactgtgcttgttggctggccccgcaactggcgccagaaggaagatcatcagacgtggaggaacttcattgagctggtccgggaaaccacagctggccacttagccctgctggtcaccaagaacgtttccatgtttcctgggaaccctgagcgcttctctgagggcagcatcgacgtttggtggattgtgcacgatggaggcatgctcatgctgctgcccttcctgctgcggcaccacaaggtctggcggaagtgcaagatgcgtatcttcactgtggcccagatggatgacaatagcatccagatgaagaaggatctgaccacatttctgtatcatttacgcatcactgcggaggtcgaggtggtggagatgcatgagagcgacatctcagcttacacctatgagaagacgttggtgatggagcagcgttcccagatcctcaaacagatgcatttaaccaagaatgagcgggagcgggagatccagagtatcacagatgagtcacgaggctcaatccggagaaagaatccagccaacacgcggctccgcctgaacgtcccagaagagacggctggtgacagtgaagagaagccagaggaggaggtgcagctgatccacgatcagagtgctcccagctgccccagcagctccccgtccccaggggaggagcctgagggggaaggggagacagatccggagaaggtgcatctcacctggaccaaggacaagtcggtggcagagaagaataagggccccagtcctgtctcctctgagggcatcaaggacttcttcagcatgaagccggagtgggagaacttgaaccagtccaacgtgcggcgcatgcacacggccgtgcggctgaacgaggtcatcgtgaagaaatcccgggacgccaagcttgttttgctcaacatgcctgggcctccccgcaaccgcaatggtgatgaaaactacatggagtttctcgaggtcctcacagagcacctggaccgggtgatgctggtccgcggcggcggccgcgaggtcatcaccatctactcctgagaaccaggacctgccacccgggcccgagcgcgcccggcccgcggctccggagccctcgccgcgccccccgccgctgtcaccgtttacatacagaccc

SEQ ID NO: 182813 - DNA, 1105 bp, Homo sapiens
  Payload ID: 16022
  Gene Symbol: SLC12A5
  Gene Name: solute carrier family 12 (potassium/chloride transporter), member 5
  ENST ID: ENST00000539566
  CDS Start-End: 122-682
tcttcctccgtggagcggagagcgagacagagctacagcgaacgagagagcggcgaaggcgggtagaggggcgcgggcgaggcggcgcagccatccccggaccaggggccgcgccgccaccatgctaaacaacctgacggactgcgaggacggcgatgggggagccaacccgggtgatggcaaccccaaggaaagcagtcccttcatcaacagcaccgacacagagaagggaaaggagtatgatggcaagaacatggccttgtttgaggaggagatggacaccagccctatggtgtcctccttgctcagtggcctggccaactacaccaacctgccccagggaagtagggagcatgaagaggcagaaaacaatgagggtggaaaaaagaagccggtgcaggccccacgcatgggcaccttcatgggcgtgtacctgccgtgcctgcagaacatctttggcgtcatcctcttcctgcggctcacctgggtggtgggcattgcaggcatcatggagtccttctgcatggtgttcatctgctgctcctgtacgatgctcacggccatctccatgagtgcaattgcaacgaatggtgttgtgcctgctggtggctcctactacatgatttccaggtctttggccatggcaaggccaatggagagccgacctgggccctgctcctgactgcctgcatctgcgagattggcatcctcattgcatccctcgacgaggtggcccccatcctctctatgttcttcctgatgtgctacatgtttgtgaatctggcctgtgcagtgcagacgctgctgaggacacccaactggaggccacgctttcgatattaccactggaccctctccttcctgggcatgagcctctgcctggccctcatgttcatctgctcctggtattatgcactggtagccatgctcattgctggactcatctacaagtacattgagtaccgtggggcagagaaggagtggggcgatgggatacgaggtctgtctctcagtgcggctcgctatgccctcttacgcctggaggaagggcccccacacaccaagaactggaggccacagctgctggtgctggtgcgtgtggacc

SEQ ID NO: 182814 - DNA, 571 bp, Homo sapiens
  Payload ID: 16022
  Gene Symbol: SLC12A5
  Gene Name: solute carrier family 12 (potassium/chloride transporter), member 5
  ENST ID: ENST00000608944
  CDS Start-End: 202-571
agtttttgtgcaagggggccactagtcgggctctgcccgcccctcatcttctcttctctctccctcccgctctccccccaaaaccccgccagtggctcacgcctcctgcatacgggatgaggtgatggcaaccccaaggaaagcagtcccttcatcaacagcaccgacacagagaagggaaaggagtatgatggcaagaacatggccttgtttgaggaggagatggacaccagccctatggtgtcctccttgctcagtggcctggccaactacaccaacctgccccagggaagtagggagcatgaagaggcagaaaacaatgagggtggaaaaaagaagccggtgcaggccccacgcatgggcaccttcatgggcgtgtacctgccgtgcctgcagaacatctttggcgtcatcctcttcctgcggctcacctgggtggtgggcattgcaggcatcatggagtccttctgcatggtgttcatctgctgctcctgtacgatgctcacggccatctccatgagtgcaattgcaacgaatggtgttgtgcctgctggtggctcctactacatga

SEQ ID NO: 182815 - DNA, 6166 bp, Homo sapiens
  Payload ID: 16022
  Gene Symbol: SLC12A5
  Gene Name: solute carrier family 12 (potassium/chloride transporter), member 5
  ENST ID: ENST00000616933
  CDS Start-End: 164-952
gtgtgcgagtgtgtgtgcgccgggcgggcgggcactgcagcttcttcctccgtggagcggagagcgagacagagctacagcgaacgagagagcggcgaaggcgggtagaggggcgcgggcgaggcggcgcagccatccccggaccaggggccgcgccgccaccatgctaaacaacctgacggactgcgaggacggcgatgggggagccaacccgggtgatggcaaccccaaggaaagcagtcccttcatcaacagcaccgacacagagaagggaaaggagtatgatggcaagaacatggccttgtttgaggaggagatggacaccagccctatggtgtcctccttgctcagtggcctggccaactacaccaacctgccccagggaagtagggagcatgaagaggcagaaaacaatgagggtggaaaaaagaagccggtgcaggccccacgcatgggcaccttcatgggcgtgtacctgccgtgcctgcagaacatctttggcgtcatcctcttcctgcggctcacctgggtggtgggcattgcaggcatcatggagtccttctgcatggtgttcatctgctgctcctgtacgatgctcacggccatctccatgagtgcaattgcaacgaatggtgttgtgcctgctggtggctcctactacatgatttccaggtctctgggcccagagtttgggggtgccgtgggcctctgcttctacctgggcactacctttgcaggagccatgtacatcctgggcaccatcgaaatcctgctgagtctcactctgttgcccaggctggagggcagtggtgcagtcactgacagcctcgacttcccaggttcaaatgatcccccccaccagttcagcctcccaagtagctggcttacctcttcccagccatggccatcttcaaggcagaagatgccagtggggaggcagcagccatgctgaacaacatgcgtgtttacggcacctgtgtgctcacctgcatggccactgtggtgtttgtgggtgtcaagtatgtcaacaagtttgcccttgtcttcctgggttgtgtcatcctctccatcctggccatctatgctggggtcatcaagtctgccttcgacccacccaacttcccgatctgcctcctgggtaaccgcacgctgtctcgccatggctttgatgtctgtgccaagctggcttgggaaggaaatgagacggtgaccacacggctatggggccttttctgctcctctcgcttcctcaacgccacctgtgatgaatacttcacccgaaacaatgtcacagagatccagggcatccctggtgctgccagtggcctcatcaaagagaacctctggagctcctacctgaccaagggcgtgattgtggagaggagtgggatgacctcggtgggcctggccgatggcactcctatcgacatggaccacccttatgtcttcagtgatatgacctcctacttcaccctgctggttggcatctacttcccctcagtcacagggatcatggctggttctaaccgctctggggacctgagggatgcccagaagtcaatccccactggcaccatcctggccatcgccaccacctctgctgtctacatcagctccgttgttctgtttggggcctgcattgagggggtcgtcctgcgggacaagtttggcgaagctgtgaatggcaacctcgtggtgggcactctggcctggccatctccatgggtaattgtcatcggatccttcttctccacctgtggggctgggctgcagagcctcacgggggccccacgcctgctgcaggccatctcgagggatggcattgtgcccttcctgcaggtctttggccatggcaaggccaatggagagccgacctgggccctgctcctgactgcctgcatctgcgagattggcatcctcattgcatccctcgacgaggtggcccccatcctctctatgttcttcctgatgtgctacatgtttgtgaatctggcctgtgcagtgcagacgctgctgaggacacccaactggaggccacgctttcgatattaccactggaccctctccttcctgggcatgagcctctgcctggccctcatgttcatctgctcctggtattatgcactggtagccatgctcattgctggactcatctacaagtacattgagtaccgtggggcagagaaggagtggggcgatgggatacgaggtctgtctctcagtgcggctcgctatgccctcttacgcctggaggaagggcccccacacaccaagaactggaggccacagctgctggtgctggtgcgtgtggaccaagaccagaatgtggtgcacccccagctgctctcactgacctcccagctgaaggcggggaagggcctgaccatcgtgggctctgtccttgagggcacctttctggaaaatcatccacaggcccagcgggcagaagagtctatcaggcgcctgatggaggcagagaaggtgaagggcttctgccaggtggtgatctcctccaacttgcgtgatggcgtgtcccatctgatccagtccgggggcctcggggggctgcagcacaacactgtgcttgttggctggccccgcaactggcgccagaaggaagatcatcagacgtggaggaacttcattgagctggtccgggaaaccacagctggccacttagccctgctggtcaccaagaacgtttccatgtttcctgggaaccctgagcgcttctctgagggcagcatcgacgtttggtggattgtgcacgatggaggcatgctcatgctgctgcccttcctgctgcggcaccacaaggtctggcggaagtgcaagatgcgtatcttcactgtggcccagatggatgacaatagcatccagatgaagaaggatctgaccacatttctgtatcatttacgcatcactgcggaggtcgaggtggtggagatgcatgagagcgacatctcagcttacacctatgagaagacgttggtgatggagcagcgttcccagatcctcaaacagatgcatttaaccaagaatgagcgggagcgggagatccagagtatcacagatgagtcacgaggctcaatccggagaaagaatccagccaacacgcggctccgcctgaacgtcccagaagagacggctggtgacagtgaagagaagccagaggaggaggtgcagctgatccacgatcagagtgctcccagctgccccagcagctccccgtccccaggggaggagcctgagggggaaggggagacagatccggagaaggtgcatctcacctggaccaaggacaagtcggtggcagagaagaataagggccccagtcctgtctcctctgagggcatcaaggacttcttcagcatgaagccggagtgggagaacttgaaccagtccaacgtgcggcgcatgcacacggccgtgcggctgaacgaggtcatcgtgaagaaatcccgggacgccaagcttgttttgctcaacatgcctgggcctccccgcaaccgcaatggtgatgaaaactacatggagtttctcgaggtcctcacagagcacctggaccgggtgatgctggtccgcggcggcggccgcgaggtcatcaccatctactcctgagaaccaggacctgccacccgggcccgagcgcgcccggcccgcggctccggagccctcgccgcgccccccgccgctgtcaccgtttacatacagaccctgtgcccgtgtcctggccccttaccccgctgcctgaagcccggaggccacgcctgttggggctgattcggagagggcgccccgccgcgcagagaccagagctcctcagtgccagtttggcccctgggtcttcgctgccctttttctaagcccggcctcgtctcgccggaggagacgctgcaataaaggttgggagaaggcgcggaaaggagaggagctggggccttggggacccccaggtagtccatgcggcccattcctccccttcccactcccgccgcggtcctcgctctgcgctcctccggcgctgctccctggctcccggcggcccggaggcccgcggggtgggaaggccgcgcttgccgtctccgccgccccttctcgccgagccgtggggcgcgggcggccgagcctatacatagtgtacaggagacatcgcgtgtatttttaacgtccccatatttatgtgactagaagcgcaacagacttctcgccatagtcgagctctcccgctgggggcactgcggggaggcgaggcctcgggaagctgaattttccttgacgtccaagagtttgagagcgaaagtgctttaggcccaggcgggggtcgtggcctcgttccctcgacacctccgtcctgctctcgcctcttcgccctttccgcgcgcccttggcttcccaccctcctctccagtccttttccgagatgaggtgagacaagggtccaacttttcctggattcgcctcccagcggacgtgagcttccactgcggctgcagagacgcgagcaacctcttctcatcggctcttatgcaagttggggccaggataggggaggggtgctcctcaagaggaagaaaccgagaggcccgcgccccaccgaggaagccccgccccggtgccttcgctggggagcaggcgtctctcctcagtcggcttgtcgcctgctccccgtatcccatggctcctcgccaaagactgaaattgtggagctggagggcgccccctccccggagtttcctccctgggacaagtgagggaggagggggccgattctggtttaggggccggacccactgagaggccccagagccgcccgtgatgttcctcccccgtccccatctggcagctcctgtctcgcctgagggacccagccgccttctccgtgctctggggccgggcctcgctgcttagcagcggcctctagctccgtctcccggggacctgggcctgagggagggctggagtcgcacgcgctttgtccttagcgcctgtctgctctcctctaactaggacccagggcctttggcttccccagctcatccttggcccttccgctccaccagcctggtctgaggcgtgctctgtccttagagaaggcgcggtggccgggttcccttcccctagggcacattactaagggggtcaggcactgcatgctcgttccagcaccatctgggactgggtacagtacctccagccccagggccctgacctgcgcacctagcttgacatctcacgcacctcccagagctggcgccactgagtaatccggacctcaccacctcttttcctttgagcccaaggcagagctggagctggcgccacccagacagcgtcaggtgtggctggggtaggtttggaggtctgccagttacaccaagtcccctctgagattcgatcaggggactggatagattctttcaggtactcaatcaggaagctggaggtgttagacaccagccccctgcatccttcagtagacctccctctgaacaccacagccaggtcctgccttctgggggcctgaatattccagagctgatgtgatgggctgtgcagaagggggctgtatcaacatcaattagggaaccaaagttgcactatctgggcccagattgtctggttggcaagagcaaagtttccgttgatgaaacagacatcccacaacaaaaacccaagttttctgtgctacatgtgcaatatttgttatgaatgttatcacaagtcattcatcaagttatctttataatcactgtagttagatgtttcatgtccattcaagtgacttttattctgagtgcaatatttcaatagccttgtagtgataactagtgttgcttttgttttagatgatctatgtgcagggcaatgcaatgaagttgaaaacccttgtaaataggagaggttgcaaaccaaatcaagagtatttattactattactgctattattattaggcctgcctttaattttcagtgtaagtgttcagtatgccgcatcctgcctcagtattgatcttgtgttctttgtgccaatatgaaaaggagagggttggttctttcctttattgttgaatgctcccatttaatgctttatggcttttactgtgttacttttttagactcccgtctgcacaaaatgcaataaaaataattttattataccctt

SEQ ID NO: 182816 - DNA, 2445 bp, Homo sapiens
  Payload ID: 16022
  Gene Symbol: SLC12A5
  Gene Name: solute carrier family 12 (potassium/chloride transporter), member 5
  ENST ID: ENST00000616202
  CDS Start-End: 164-1033
gtgtgcgagtgtgtgtgcgccgggcgggcgggcactgcagcttcttcctccgtggagcggagagcgagacagagctacagcgaacgagagagcggcgaaggcgggtagaggggcgcgggcgaggcggcgcagccatccccggaccaggggccgcgccgccaccatgctaaacaacctgacggactgcgaggacggcgatgggggagccaacccgggtgatggcaaccccaaggaaagcagtcccttcatcaacagcaccgacacagagaagggaaaggagtatgatggcaagaacatggccttgtttgaggaggagatggacaccagccctatggtgtcctccttgctcagtggcctggccaactacaccaacctgccccagggaagtagggagcatgaagaggcagaaaacaatgagggtggaaaaaagaagccggtgcaggccccacgcatgggcaccttcatgggcgtgtacctgccgtgcctgcagaacatctttggcgtcatcctcttcctgcggctcacctgggtggtgggcattgcaggcatcatggagtccttctgcatggtgttcatctgctgctcctgtacgatgctcacggccatctccatgagtgcaattgcaacgaatggtgttgtgcctgctggtggctcctactacatgatttccaggtctctgggcccagagtttgggggtgccgtgggcctctgcttctacctgggcactacctttgcaggagccatgtacatcctgggcaccatcgaaatcctgctgagacgcgagcaacctcttctcatcggctcttatgcaagttggggccaggataggggaggggtgctcctcaagaggaagaaaccgagaggcccgcgccccaccgaggaagccccgccccggtgccttcgctggggagcaggcgtctctcctcagtcggcttgtcgcctgctccccgtatcccatggctcctcgccaaagactgaaattgtggagctggagggcgccccctccccggagtttcctccctgggacaagtgagggaggagggggccgattctggtttaggggccggacccactgagaggccccagagccgcccgtgatgttcctcccccgtccccatctggcagctcctgtctcgcctgagggacccagccgccttctccgtgctctggggccgggcctcgctgcttagcagcggcctctagctccgtctcccggggacctgggcctgagggagggctggagtcgcacgcgctttgtccttagcgcctgtctgctctcctctaactaggacccagggcctttggcttccccagctcatccttggcccttccgctccaccagcctggtctgaggcgtgctctgtccttagagaaggcgcggtggccgggttcccttcccctagggcacattactaagggggtcaggcactgcatgctcgttccagcaccatctgggactgggtacagtacctccagccccagggccctgacctgcgcacctagcttgacatctcacgcacctcccagagctggcgccactgagtaatccggacctcaccacctcttttcctttgagcccaaggcagagctggagctggcgccacccagacagcgtcaggtgtggctggggtaggtttggaggtctgccagttacaccaagtcccctctgagattcgatcaggggactggatagattctttcaggtactcaatcaggaagctggaggtgttagacaccagccccctgcatccttcagtagacctccctctgaacaccacagccaggtcctgccttctgggggcctgaatattccagagctgatgtgatgggctgtgcagaagggggctgtatcaacatcaattagggaaccaaagttgcactatctgggcccagattgtctggttggcaagagcaaagtttccgttgatgaaacagacatcccacaacaaaaacccaagttttctgtgctacatgtgcaatatttgttatgaatgttatcacaagtcattcatcaagttatctttataatcactgtagttagatgtttcatgtccattcaagtgacttttattctgagtgcaatatttcaatagccttgtagtgataactagtgttgcttttgttttagatgatctatgtgcagggcaatgcaatgaagttgaaaacccttgtaaataggagaggttgcaaaccaaatcaagagtatttattactattactgctattattattaggcctgcctttaattttcagtgtaagtgttcagtatgccgcatcctgcctcagtattgatcttgtgttctttgtgccaatatgaaaaggagagggttggttctttcctttattgttgaatgctcccatttaatgctttatggcttttactgtgttacttttttagactcccgtctgcacaaaatgcaataaaaataattttattataccctt

SEQ ID NO: 182817 - DNA, 2955 bp, Homo sapiens
  Payload ID: 16022
  Gene Symbol: SLC12A5
  Gene Name: solute carrier family 12 (potassium/chloride transporter), member 5
  ENST ID: ENST00000616201
  CDS Start-End: 164-1543
gtgtgcgagtgtgtgtgcgccgggcgggcgggcactgcagcttcttcctccgtggagcggagagcgagacagagctacagcgaacgagagagcggcgaaggcgggtagaggggcgcgggcgaggcggcgcagccatccccggaccaggggccgcgccgccaccatgctaaacaacctgacggactgcgaggacggcgatgggggagccaacccgggtgatggcaaccccaaggaaagcagtcccttcatcaacagcaccgacacagagaagggaaaggagtatgatggcaagaacatggccttgtttgaggaggagatggacaccagccctatggtgtcctccttgctcagtggcctggccaactacaccaacctgccccagggaagtagggagcatgaagaggcagaaaacaatgagggtggaaaaaagaagccggtgcaggccccacgcatgggcaccttcatgggcgtgtacctgccgtgcctgcagaacatctttggcgtcatcctcttcctgcggctcacctgggtggtgggcattgcaggcatcatggagtccttctgcatggtgttcatctgctgctcctgtacgatgctcacggccatctccatgagtgcaattgcaacgaatggtgttgtgcctgctggtggctcctactacatgatttccaggtctctgggcccagagtttgggggtgccgtgggcctctgcttctacctgggcactacctttgcaggagccatgtacatcctgggcaccatcgaaatcctgctggcttacctcttcccagccatggccatcttcaaggcagaagatgccagtggggaggcagcagccatgctgaacaacatgcgtgtttacggcacctgtgtgctcacctgcatggccactgtggtgtttgtgggtgtcaagtatgtcaacaagtttgcccttgtcttcctgggttgtgtcatcctctccatcctggccatctatgctggggtcatcaagtctgccttcgacccacccaacttcccgatctgcctcctgggtaaccgcacgctgtctcgccatggctttgatgtctgtgccaagctggcttgggaaggaaatgagacggtgaccacacggctatggggccttttctgctcctctcgcttcctcaacgccacctgtgatgaatacttcacccgaaacaatgtcacagagatccagggcatccctggtgctgccagtggcctcatcaaagagaacctctggagctcctacctgaccaagggcgtgattgtggagaggagtgggatgacctcggtgggcctggccgatggcactcctatcgacatggaccacccttatgtcttcagtgatatgacctcctacttcaccctgctggttggcatctacttcccctcagtcacagggatcatggctggttctaaccgctctggggacctgagggatgcccagaagtcaatccccatatcccatggctcctcgccaaagactgaaattgtggagctggagggcgccccctccccggagtttcctccctgggacaagtgagggaggagggggccgattctggtttaggggccggacccactgagaggccccagagccgcccgtgatgttcctcccccgtccccatctggcagctcctgtctcgcctgagggacccagccgccttctccgtgctctggggccgggcctcgctgcttagcagcggcctctagctccgtctcccggggacctgggcctgagggagggctggagtcgcacgcgctttgtccttagcgcctgtctgctctcctctaactaggacccagggcctttggcttccccagctcatccttggcccttccgctccaccagcctggtctgaggcgtgctctgtccttagagaaggcgcggtggccgggttcccttcccctagggcacattactaagggggtcaggcactgcatgctcgttccagcaccatctgggactgggtacagtacctccagccccagggccctgacctgcgcacctagcttgacatctcacgcacctcccagagctggcgccactgagtaatccggacctcaccacctcttttcctttgagcccaaggcagagctggagctggcgccacccagacagcgtcaggtgtggctggggtaggtttggaggtctgccagttacaccaagtcccctctgagattcgatcaggggactggatagattctttcaggtactcaatcaggaagctggaggtgttagacaccagccccctgcatccttcagtagacctccctctgaacaccacagccaggtcctgccttctgggggcctgaatattccagagctgatgtgatgggctgtgcagaagggggctgtatcaacatcaattagggaaccaaagttgcactatctgggcccagattgtctggttggcaagagcaaagtttccgttgatgaaacagacatcccacaacaaaaacccaagttttctgtgctacatgtgcaatatttgttatgaatgttatcacaagtcattcatcaagttatctttataatcactgtagttagatgtttcatgtccattcaagtgacttttattctgagtgcaatatttcaatagccttgtagtgataactagtgttgcttttgttttagatgatctatgtgcagggcaatgcaatgaagttgaaaacccttgtaaataggagaggttgcaaaccaaatcaagagtatttattactattactgctattattattaggcctgcctttaattttcagtgtaagtgttcagtatgccgcatcctgcctcagtattgatcttgtgttctttgtgccaatatgaaaaggagagggttggttctttcctttattgttgaatgctcccatttaatgctttatggcttttactgtgttacttttttagactcccgtctgcacaaaatgcaataaaaataattttattataccctt

SEQ ID NO: 182818 - DNA, 1224 bp, Homo sapiens
  Payload ID: 16022
  Gene Symbol: SLC12A5
  Gene Name: solute carrier family 12 (potassium/chloride transporter), member 5
  ENST ID: ENST00000626937
  CDS Start-End: 164-706
gtgtgcgagtgtgtgtgcgccgggcgggcgggcactgcagcttcttcctccgtggagcggagagcgagacagagctacagcgaacgagagagcggcgaaggcgggtagaggggcgcgggcgaggcggcgcagccatccccggaccaggggccgcgccgccaccatgctaaacaacctgacggactgcgaggacggcgatgggggagccaacccgggtgatggcaaccccaaggaaagcagtcccttcatcaacagcaccgacacagagaagggaaaggagtatgatggcaagaacatggccttgtttgaggaggagatggacaccagccctatggtgtcctccttgctcagtggcctggccaactacaccaacctgccccagggaagtagggagcatgaagaggcagaaaacaatgagggtggaaaaaagaagccggtgcaggccccacgcatgggcaccttcatgggcgtgtacctgccgtgcctgcagaacatctttggcgtcatcctcttcctgcggctcacctgggtggtgggcattgcaggcatcatggagtccttctgcatggtgttcatctgctgctcctgtacgatgctcacggccatctccatgagtgcaattgcaacgaatggtgttgtgcctgctggtggctcctactacatgatttccagattgtctggttggcaagagcaaagtttccgttgatgaaacagacatcccacaacaaaaacccaagttttctgtgctacatgtgcaatatttgttatgaatgttatcacaagtcattcatcaagttatctttataatcactgtagttagatgtttcatgtccattcaagtgacttttattctgagtgcaatatttcaatagccttgtagtgataactagtgttgcttttgttttagatgatctatgtgcagggcaatgcaatgaagttgaaaacccttgtaaataggagaggttgcaaaccaaatcaagagtatttattactattactgctattattattaggcctgcctttaattttcagtgtaagtgttcagtatgccgcatcctgcctcagtattgatcttgtgttctttgtgccaatatgaaaaggagagggttggttctttcctttattgttgaatgctcccatttaatgctttatggcttttactgtgttacttttttagactcccgtctgcacaaaatgcaataaaaataattttattataccctt

SEQ ID NO: 182819 - DNA, 401 bp, Homo sapiens
  Payload ID: 16022
  Gene Symbol: SLC12A5
  Gene Name: solute carrier family 12 (potassium/chloride transporter), member 5
  ENST ID: ENST00000628272
  CDS Start-End: 68-229
agagcctggttgcagccacttgtgcgatcccggaccttgccgcggccgcctggctcctttccgcgccatgagccgcaggttcacggtcacctcgctgccccccgcagggcccgccagaagccctgacccagagtcccgccggcattcggtcgcagacccccgccacctcccgggggaagacgtcaaagcaaatccaactgatccccacgtcttggccattcacctctgaaacttatcctgaatctggcagcatcggtcccccctctgtcatcatcgccctgctccaagcctcacatggccacgaccacatcctctccactggcctccctgcctccagtccttccctagccctcctccacagaagccccccatcacttgcaaaataaaggccaaagccttaa

SEQ ID NO: 182820 - DNA, 411 bp, Homo sapiens
  Payload ID: 16022
  Gene Symbol: SLC12A5
  Gene Name: solute carrier family 12 (potassium/chloride transporter), member 5
  ENST ID: ENST00000413737
  CDS Start-End: 1-203
ggcattcggtcgcagacccccgccacctcccgggggaagacgtcaaagtggccccagcgaggggaggaggaggaggaggaggaggaggaggaggaagaggaggaggaggaagaggaggaggaagaggaggaggaggagaaggaggaggagaagcctccccagaccgccaggggtcgctgccgagccgcagcaaatccaactgatccccacgtcttggccattcacctctgaaacttatcctgaatctggcagcatcggtcccccctctgtcatcatcgccctgctccaagcctcacatggccacgaccacatcctctccactggcctccctgcctccagtccttccctagccctcctccacagaagccccccatcacttgcaaaataaaggccaaagccttaagtctgtca

SEQ ID NO: 182821 - DNA, 617 bp, Homo sapiens
  Payload ID: 16022
  Gene Symbol: SLC12A5
  Gene Name: solute carrier family 12 (potassium/chloride transporter), member 5
  ENST ID: ENST00000626701
  CDS Start-End: 55-417
agccacttgtgcgatcccggaccttgccgcggccgcctggctcctttccgcgccatgagccgcaggttcacggtcacctcgctgccccccgcagggcccgccagaagccctgacccagagtcccgccggcattcggtcgcagacccccgccacctcccgggggaagacgtcaaagtctcccctcagggggcactcatcaggggtcctctccctggctctgaggccctcgggtctggaaggaacaaggcgaatcggcttgtagtggccccagcgaggggaggaggaggaggaggaggaggaggaggaggaagaggaggaggaggaagaggaggaggaagaggaggaggaggagaaggaggaggagaagcctccccagaccgccaggggtcgctgccgagccgcagcaaatccaactgatccccacgtcttggccattcacctctgaaacttatcctgaatctggcagcatcggtcccccctctgtcatcatcgccctgctccaagcctcacatggccacgaccacatcctctccactggcctccctgcctccagtccttccctagccctcctccacagaagccccccatcacttgcaaaataaaggccaaagccttaa

SEQ ID NO: 182822 - DNA, 583 bp, Homo sapiens
  Payload ID: 16022
  Gene Symbol: SLC12A5
  Gene Name: solute carrier family 12 (potassium/chloride transporter), member 5
  ENST ID: ENST00000627290
  CDS Start-End: 162-338
gtgcgagtgtgtgtgcgccgggcgggcgggcactgcagcttcttcctccgtggagcggagagcgagacagagctacagcgaacgagagagcggcgaaggcgggtagaggggcgcgggcgaggcggcgcagccatccccggaccaggggccgcgccgccaccatgctaaacaacctgacggactgcgaggacggcgatgggggagccaacccgggtgatggcaaccccaaggaaagcagtcccttcatcaacagcaccgacacagagaagggaaaggagtatgatggcaagaacatggccttgtttgagcctcctagcactgacaccctccctccataggaggagatggacaccagccctatggtgtcctccttgctcagtggcctggccaactacaccaacctgccccagggaagtagggagcatgaagaggcagaaaacaatgagggtggaaaaaagaagccggtgcaggccccacgcatgggcaccttcatgggcgtgtacctgccgtgcctgcagaacatctttggcgtcatcctcttcctgcggctcacctgggtggtgggcattgcaggcatcatgga

SEQ ID NO: 182823 - DNA, 7286 bp, Homo sapiens
  Payload ID: 16023
  Gene Symbol: SLC12A6
  Gene Name: solute carrier family 12 (potassium/chloride transporter), member 6
  Uniprot ID: Q9UHW9
  ENST ID: ENST00000290209
  CDS Start-End: 102-3401
ggatcacagtctgaaacgacagcaaggaagaggtaggcagggaaaactaactggaaggaagtttaaatacagaaagagcaaagtattatctaactataacaatgccacattttactgtgactaaggtagaggacccagaggagggggcagcggcttcgatctctcaagagcctagtttagcagacataaaagcccggattcaggattcagatgaaccagacctgagtcagaactccatcacaggggaacacagccaactgttagacgacggacataagaaagctcgaaatgcttatctcaataattccaattatgaagaaggagatgaatattttgataaaaatttggcactctttgaggaagaaatggacaccagaccgaaggtgtcttccctcctcaaccgcatggccaattacactaatctgactcaaggagcaaaggaacatgaagaggcagaaaacatcactgaagggaaaaagaagcccaccaagaccccccaaatgggtaccttcatgggtgtctacctcccatgtctacaaaatatttttggagtgatcctttttttacgccttacatgggtggtgggcacagctggagttcttcaggcttttgcaattgtccttatctgctgctgctgtacaatgttgactgctatctccatgagtgccattgccactaatggagtggtgccagctgggggctcatactttatgatttcccgggcactgggcccagagtttggtggggctgttggcctctgcttttatcttggtaccacatttgcagcagccatgtacatccttggtgccattgaaatctttctggtctatatcgtcccccgagctgccatctttcacagtgatgacgcactcaaggaatcagcagccatgctaaataacatgcgtgtctacggcacagctttcttggtccttatggtattagtggtatttatcggcgtacgctatgtgaacaagtttgcctcacttttcctggcctgtgtcattgtgtccatcttggccatctatgctggagccatcaagtcttcttttgctcctccacacttcccggtctgcatgctgggtaaccgcaccctttcatcaagacacattgacgtttgctctaagaccaaggaaattaacaacatgacagtcccatcaaagttatggggattcttctgtaactcgagtcaatttttcaatgccacctgtgatgaatactttgttcacaataacgtcacttcaatccagggcattcctggattggctagtggtataattacagagaatctttggagtaattacctacccaagggagagatcatcgaaaagccttcagccaaatcttctgatgtcttaggcagcttaaaccatgaatatgttcttgttgacatcaccacctccttcacgcttctggtgggaatcttctttccctctgttacaggtatcatggctggatcaaacagatctggagatctgaaagatgctcagaagtctattccgattggtactatccttgccatcctgaccacctcctttgtttatttaagcaatgttgtcctttttggtgcatgtattgaaggggttgttctcagagacaagttcggtgatgctgtgaaaggtaatttggtggtaggcaccttatcttggccatccccatgggtgattgttattggctccttcttttcaacatgtggggctggacttcagagcctcacaggtgcaccgaggctgctacaagctattgccaaggataacatcataccgtttctgagggtttttggccacagcaaagccaatggggaacctacctgggctttacttctaactgctgccattgcagagcttggaatactcattgcctccctggatcttgtggccccaattctttccatgttttttctcatgtgttacctctttgtaaacttggcatgtgccttgcaaacattacttcgaacacccaactggagaccccgattccgctactaccattgggccctttctttcatgggaatgagtatctgtctggctctgatgttcatttcttcctggtattatgccattgtagccatggtaatagctggtatgatctacaagtacattgaataccaaggagctgagaaagaatggggtgatggtatccgtgggctgtccctcagtgcagcccggtttgctttgcttcgattggaggaaggacctccacacactaaaaactggaggcctcagttgcttgtattactgaaactagatgaagacttacatgtcaagcatcctcgcctcctcacctttgcctcacagctcaaagcaggaaaaggtctcactattgtgggctctgtcatcgtggggaacttcctagagaactacggtgaagctttagctgctgagcagaccataaagcacctaatggaggcagagaaggtaaaaggattctgccagctggtggtggccgccaagctgagagagggcatttcccacctcatccagtcatgtggccttgggggcatgaagcacaacacggtggtgatgggctggcctaatggctggcgtcaaagcgaagatgcccgcgcttggaagacttttattggcacagttcgagtgacaactgctgcccatcttgcactgctggtggctaaaaacatctccttctttcccagcaatgtggagcaattttctgagggcaacattgatgtgtggtggattgtgcatgatggggggatgcttatgctactaccattcctactgaaacagcacaaggtgtggcgaaagtgcagcatacggatcttcacagtagcccaattagaagacaacagtatccaaatgaagaaggacctagccaccttcctatatcacttacgcattgaggcggaggtagaagtggtggagatgcatgacagtgatatatcagcatatacttacgagcgcactttgatgatggaacaaaggtcccagatgctccggcacatgcggctatccaaaacagagcgagacagagaggcacaattggtgaaagaccgaaactcaatgctacgattgaccagcattggctctgatgaggacgaagagacagaaacctatcaggagaaggtgcacatgacttggacaaaagacaagtacatggcatcccggggacaaaaagcgaagtcaatggaaggattccaggacctgcttaacatgcgtccggaccagtccaatgtgaggcggatgcatacagcagtgaaactcaacgaggttatagttaacaagtcccatgaagcaaagctggttttattgaatatgccagggccaccccgaaaccctgagggtgatgaaaactacatggagttcctagaggtgcttaccgagggactagagcgagtcctacttgtccggggtggtggcagtgaagtgatcaccatttattcataacctactctgaatgaccgtgcttgacctgttttcttaaaaggcctacgtcctccatggaagtgccagctcattactaccactcccactcaactagaagcctgtgttctgtacacatcatactgaactcttgatgagctgagcctcaagtacctgtgtaaaagagctcccatctgatctgcagtcattacagaaaaagcaaatattccctcaacatcagaacaatgctcaagtctttcaagccacgtctgagcagtcaaaggcaaattagaattaacaagctgagccaataaatgaattggtaaaagggatgctagaaattcaactgaagaaaaaaagcaagtcaagtacgtattcagcattaaagatgaatctcagaagtcatggttcaatgttgacactgtgaggataacaactagagacagcttcatcttactaaagaatttatggtcaagtatatttggacctattatcctcggcaagccaagatgcaaacattttttagctatatttctttagtatacccactgctgtaattttatattaggatactaacttgaaacatggctgcagcctctacttcttcaaaaacatccccccaaaataccagatttaaatatccaaatactgtgtcagtgtatacttcaactgttttgtttctcttaactcaaaacccattctgtcattgtaacacaggcagtgttaccatggaaattgtttttggtaaggtaaaaattatttctttcaggttcctttcaaatggccgaactaagagaactccaaaaggaagctattaacatttactgaaatagtctgtggttctctatacaacatggacaaaacatacaagctgttgtctaagaaatgcaggtcatggtgcacattaatcaacaggttcttctccccccgcccccacccccgcgcctttttttatgccctcttattaagcacaggtcaaaaaatcttaaggaacaaatactaggaaaactggctaaacatccttccctgaaagcactggaccatcttttaaagggcacatctagcaatggaattggaagttctagagccacactctttctttagtgccaacgttactgagcggctactctccttacctactttactaaaatggcatacagattggcattgacctgttgaagaaattttaccactaagaaatcttttgcctcatctacaaagccatagttaagacttgaggcattcaacttaatgccaagtataagcatttccccctttttctttcaattttattcttcattctgactacagaaacttggccctgaactacgagattagccaagccaacagtcttctaatttgttttcagaaacttcaggccgggtgccgtggctcacacctgtaatcccagcactttgggaggccaaggcaggtgaatcacttgaggtcaggagttcgagaccatcctggccaacatggtgaaaacctgtctatactaaaaatacaaaaattagctgggcatggtggtgcatgcctgtgatcccagcaacacggaaggctaaggcaggaggatcatttgaacccaggaggcggaggttgcagtgagccaggattgcacctctgcactccagcctgggtaacagagtgatatgtttcaaaaagaaagttcagtgtgccaaggaaatacttgtgtaagctcagctttttatttactaatatactgatcaaacatctggcttacaagcatagggaaactacttatgtggctggctgagcagtaatttcaagtatgtgaaatcttcatttcttttacagaatagttatttagagaaacttttcttgcctgtattcatggctgtttttgaatttcaatttattagtcataaatagtgccactcttctttgattactaaataggacatggagcaagctgacctaggtgtcacaaattattcatttgacctgtaaggacagagaaaacccttcaatatagcttaagaaattgagtaattttgggccgggtgcagtgactcacgcctgtaatcccagcactttgggaggccgaggcaggcggatcacgaggtcaggagatttgagaccatcctggctaacacggtgaaaccctgtctctacaaaaatacaaaaaaattagtcgggcatggtggcgggcgcctgtagtcccagctacttgggaggctgaggcgggagaatggcgtgaacccgggaggtggaacttgcagtgaaccgagattgcaccactgcactccagcctgggcgacagagggagactccatctcaaaaaaaaaaaaaaagaaagaaagaaagaaattgagtaattttgatttgttccctttgcttgcttcaacctccaggcccactgaggatggcaaagcggataggatcttaagtctttttttctgttacttcctacagatggtagaagcattatttacaactcccactgcaacactccattgcttagttgagtttaacagtagtgagtcatgtcctgcaggatccagtatcttttttttttttttccgagacgtagtttcgctcttgttgcccaggctggagtgaaatggcacaatcttggctcaccgcaacctctgcctcctgggttcaagcgattctcctgcctcagcctcccgagtagctggaattacaagcatgtgccaccacacccagctaattttgtattttcagtagagacggggtttctctactgaaactgatgttggtcaggctggtctcgaactcccaacctcaggtgatccgcccgccttggcctcccaaagtgctgggattacaggcgtgagccactgtgcccaaccaggatccagtatcttaaaggcccatactgtaaaggtcagcctgcctaggaattctgccacatttacacacacccctggccaaagtaatattttttttttccatgtagaacaaattatgggcagaaagtaaagttagttttagaagtgctgtttgtggttggagaattgtaaaaatcttttaaagggataagggaattagtggcttttaatataaccactgcttcagcccgaaacacaaaatcactgttacatggaaaactggttattaggccagatttatattcatgtctgtctagagtatttcatgtgtgtatgtgttgcttacgttgtctgtctccaaagtctctcatctcttttaatcactgcaaataaagcaatactgaaaacttgagagaatgcaccttaggggaaggggctatttcaagacagaaaacaaaggaaatacctgccttttgaataagatcccgcttttgagtcttacctatgactttaccagggtagattagaaatacacatcctcctgctgaccctctgccttcaatagctatctatcttaaaagctgaagtttgaactgcagcatctgcttgacaggtgccaggttccttcggcagggggacgatcactctatatatcttccgttgcctcagattcctgtggcccaaggatcccaccaatcctcgttccccctaaacatgctaacaaaaatcccttatcgtgggtattaaaataataacagttacactgtatgcatatttatgtgctccttttgtctggtttttcttttcatcatgtataagctgaattcagcattagtttctcacatcttcccccaggtatccccaacagaatttttatgtcccagcttgtattaaatagaagtgaaatattaaggaaaataaggaacttgtgcaactttttttatgcattgttctcaaccatttaatttattgaaaggagatgctgcaacagttcttgatttagcagcagttattctcttgtttacatagttatgtttttttgttgttgttttgctctgtactggaaacaaaaataaagttttctacattattttca

SEQ ID NO: 182824 - DNA, 4568 bp, Homo sapiens
  Payload ID: 16023
  Gene Symbol: SLC12A6
  Gene Name: solute carrier family 12 (potassium/chloride transporter), member 6
  Uniprot ID: Q9UHW9
  ENST ID: ENST00000354181
  CDS Start-End: 494-3946
gcgcacccgcatcagctggcgccgggatactgcacctgcgacctccttctccctcaccctgctgcccagtcaggccagcctgcgtggccgtctcctcctctactgggaccctgaggaagaacgacgagggggtgacctgcgccggggcgggggtaggggagaacgcgcctccggcaaagggggtggctcgtcctgtcacacgcaggagaaacctagcgagcggaccgtggctcagtggactagctacgacttgccacgactctgagctgcagtccgaggtgtcttgatccgctaacctcctcccagaccccgaggacctttctgctaggagaagagcgggcgcgccacccccaccgacctctcggagacaggaatccgctctgcccctgcatcctcctctgctcacccttctctcagtagttcaaaagtagctagcgtaagaggaagattttgcgaggttccccccactttttttgttcttaaaaagaacaaaatgcatcctccagaaaccaccaccaagatggcttcagttcggttcatggtgacaccgacaaagatcgatgacattccaggtttgtcagacaccagtccggacctcagctctcgatctagttcccgagtaagatttagctcccgggaaagcgtgcctgaaacaagccggagtgagcctatgagtgagatgtctggggccaccacttcgctggcaactgttgcactggatccacccagtgaccggacttctcacccccaggatgtcatcgaggacctgagtcagaactccatcacaggggaacacagccaactgttagacgacggacataagaaagctcgaaatgcttatctcaataattccaattatgaagaaggagatgaatattttgataaaaatttggcactctttgaggaagaaatggacaccagaccgaaggtgtcttccctcctcaaccgcatggccaattacactaatctgactcaaggagcaaaggaacatgaagaggcagaaaacatcactgaagggaaaaagaagcccaccaagaccccccaaatgggtaccttcatgggtgtctacctcccatgtctacaaaatatttttggagtgatcctttttttacgccttacatgggtggtgggcacagctggagttcttcaggcttttgcaattgtccttatctgctgctgctgtacaatgttgactgctatctccatgagtgccattgccactaatggagtggtgccagctgggggctcatactttatgatttcccgggcactgggcccagagtttggtggggctgttggcctctgcttttatcttggtaccacatttgcagcagccatgtacatccttggtgccattgaaatctttctggtctatatcgtcccccgagctgccatctttcacagtgatgacgcactcaaggaatcagcagccatgctaaataacatgcgtgtctacggcacagctttcttggtccttatggtattagtggtatttatcggcgtacgctatgtgaacaagtttgcctcacttttcctggcctgtgtcattgtgtccatcttggccatctatgctggagccatcaagtcttcttttgctcctccacacttcccggtctgcatgctgggtaaccgcaccctttcatcaagacacattgacgtttgctctaagaccaaggaaattaacaacatgacagtcccatcaaagttatggggattcttctgtaactcgagtcaatttttcaatgccacctgtgatgaatactttgttcacaataacgtcacttcaatccagggcattcctggattggctagtggtataattacagagaatctttggagtaattacctacccaagggagagatcatcgaaaagccttcagccaaatcttctgatgtcttaggcagcttaaaccatgaatatgttcttgttgacatcaccacctccttcacgcttctggtgggaatcttctttccctctgttacaggtatcatggctggatcaaacagatctggagatctgaaagatgctcagaagtctattccgattggtactatccttgccatcctgaccacctcctttgtttatttaagcaatgttgtcctttttggtgcatgtattgaaggggttgttctcagagacaagttcggtgatgctgtgaaaggtaatttggtggtaggcaccttatcttggccatccccatgggtgattgttattggctccttcttttcaacatgtggggctggacttcagagcctcacaggtgcaccgaggctgctacaagctattgccaaggataacatcataccgtttctgagggtttttggccacagcaaagccaatggggaacctacctgggctttacttctaactgctgccattgcagagcttggaatactcattgcctccctggatcttgtggccccaattctttccatgttttttctcatgtgttacctctttgtaaacttggcatgtgccttgcaaacattacttcgaacacccaactggagaccccgattccgctactaccattgggccctttctttcatgggaatgagtatctgtctggctctgatgttcatttcttcctggtattatgccattgtagccatggtaatagctggtatgatctacaagtacattgaataccaaggagctgagaaagaatggggtgatggtatccgtgggctgtccctcagtgcagcccggtttgctttgcttcgattggaggaaggacctccacacactaaaaactggaggcctcagttgcttgtattactgaaactagatgaagacttacatgtcaagcatcctcgcctcctcacctttgcctcacagctcaaagcaggaaaaggtctcactattgtgggctctgtcatcgtggggaacttcctagagaactacggtgaagctttagctgctgagcagaccataaagcacctaatggaggcagagaaggtaaaaggattctgccagctggtggtggccgccaagctgagagagggcatttcccacctcatccagtcatgtggccttgggggcatgaagcacaacacggtggtgatgggctggcctaatggctggcgtcaaagcgaagatgcccgcgcttggaagacttttattggcacagttcgagtgacaactgctgcccatcttgcactgctggtggctaaaaacatctccttctttcccagcaatgtggagcaattttctgagggcaacattgatgtgtggtggattgtgcatgatggggggatgcttatgctactaccattcctactgaaacagcacaaggtgtggcgaaagtgcagcatacggatcttcacagtagcccaattagaagacaacagtatccaaatgaagaaggacctagccaccttcctatatcacttacgcattgaggcggaggtagaagtggtggagatgcatgacagtgatatatcagcatatacttacgagcgcactttgatgatggaacaaaggtcccagatgctccggcacatgcggctatccaaaacagagcgagacagagaggcacaattggtgaaagaccgaaactcaatgctacgattgaccagcattggctctgatgaggacgaagagacagaaacctatcaggagaaggtgcacatgacttggacaaaagacaagtacatggcatcccggggacaaaaagcgaagtcaatggaaggattccaggacctgcttaacatgcgtccggaccagtccaatgtgaggcggatgcatacagcagtgaaactcaacgaggttatagttaacaagtcccatgaagcaaagctggttttattgaatatgccagggccaccccgaaaccctgagggtgatgaaaactacatggagttcctagaggtgcttaccgagggactagagcgagtcctacttgtccggggtggtggcagtgaagtgatcaccatttattcataacctactctgaatgaccgtgcttgacctgttttcttaaaaggcctacgtcctccatggaagtgccagctcattactaccactcccactcaactagaagcctgtgttctgtacacatcatactgaactcttgatgagctgagcctcaagtacctgtgtaaaagagctcccatctgatctgcagtcattacagaaaaagcaaatattccctcaacatcagaacaatgctcaagtctttcaagccacgtctgagcagtcaaaggcaaattagaattaacaagctgagccaataaatgaattggtaaaagggatgctagaaattcaactgaagaaaaaaagcaagtcaagtacgtattcagcattaaagatgaatctcagaagtcatggttcaatgttgacactgtgaggataacaactagagacagcttcatcttactaaagaatttatggtcaagtatatttggacctattatcctcggcaagccaagatgcaaacattttttagctatatttctttagtatacccactgctgtaattttatattaggatactaacttgaaacatggctgcagcctctacttcttcaaaaacatccccccaaaataccagatttaaatatccaaa

SEQ ID NO: 182825 - DNA, 4096 bp, Homo sapiens
  Payload ID: 16023
  Gene Symbol: SLC12A6
  Gene Name: solute carrier family 12 (potassium/chloride transporter), member 6
  Uniprot ID: Q9UHW9
  ENST ID: ENST00000397702
  CDS Start-End: 199-3474
tgcactcggtcaccgcgggctgcggcggctgggcggggctttcgggcgcccgcgggacggttccgccctctcactgcacccccgggcttctcttcgcaaggtttgtcagacaccagtccggacctcagctctcgatctagttcccgagtaagatttagctcccgggaaagcgtgcctgaaacaagccggagtgagcctatgagtgagatgtctggggccaccacttcgctggcaactgttgcactggatccacccagtgaccggacttctcacccccaggatgtcatcgaggacctgagtcagaactccatcacaggggaacacagccaactgttagacgacggacataagaaagctcgaaatgcttatctcaataattccaattatgaagaaggagatgaatattttgataaaaatttggcactctttgaggaagaaatggacaccagaccgaaggtgtcttccctcctcaaccgcatggccaattacactaatctgactcaaggagcaaaggaacatgaagaggcagaaaacatcactgaagggaaaaagaagcccaccaagaccccccaaatgggtaccttcatgggtgtctacctcccatgtctacaaaatatttttggagtgatcctttttttacgccttacatgggtggtgggcacagctggagttcttcaggcttttgcaattgtccttatctgctgctgctgtacaatgttgactgctatctccatgagtgccattgccactaatggagtggtgccagctgggggctcatactttatgatttcccgggcactgggcccagagtttggtggggctgttggcctctgcttttatcttggtaccacatttgcagcagccatgtacatccttggtgccattgaaatctttctggtctatatcgtcccccgagctgccatctttcacagtgatgacgcactcaaggaatcagcagccatgctaaataacatgcgtgtctacggcacagctttcttggtccttatggtattagtggtatttatcggcgtacgctatgtgaacaagtttgcctcacttttcctggcctgtgtcattgtgtccatcttggccatctatgctggagccatcaagtcttcttttgctcctccacacttcccggtctgcatgctgggtaaccgcaccctttcatcaagacacattgacgtttgctctaagaccaaggaaattaacaacatgacagtcccatcaaagttatggggattcttctgtaactcgagtcaatttttcaatgccacctgtgatgaatactttgttcacaataacgtcacttcaatccagggcattcctggattggctagtggtataattacagagaatctttggagtaattacctacccaagggagagatcatcgaaaagccttcagccaaatcttctgatgtcttaggcagcttaaaccatgaatatgttcttgttgacatcaccacctccttcacgcttctggtgggaatcttctttccctctgttacaggtatcatggctggatcaaacagatctggagatctgaaagatgctcagaagtctattccgattggtactatccttgccatcctgaccacctcctttgtttatttaagcaatgttgtcctttttggtgcatgtattgaaggggttgttctcagagacaagttcggtgatgctgtgaaaggtaatttggtggtaggcaccttatcttggccatccccatgggtgattgttattggctccttcttttcaacatgtggggctggacttcagagcctcacaggtgcaccgaggctgctacaagctattgccaaggataacatcataccgtttctgagggtttttggccacagcaaagccaatggggaacctacctgggctttacttctaactgctgccattgcagagcttggaatactcattgcctccctggatcttgtggccccaattctttccatgttttttctcatgtgttacctctttgtaaacttggcatgtgccttgcaaacattacttcgaacacccaactggagaccccgattccgctactaccattgggccctttctttcatgggaatgagtatctgtctggctctgatgttcatttcttcctggtattatgccattgtagccatggtaatagctggtatgatctacaagtacattgaataccaaggagctgagaaagaatggggtgatggtatccgtgggctgtccctcagtgcagcccggtttgctttgcttcgattggaggaaggacctccacacactaaaaactggaggcctcagttgcttgtattactgaaactagatgaagacttacatgtcaagcatcctcgcctcctcacctttgcctcacagctcaaagcaggaaaaggtctcactattgtgggctctgtcatcgtggggaacttcctagagaactacggtgaagctttagctgctgagcagaccataaagcacctaatggaggcagagaaggtaaaaggattctgccagctggtggtggccgccaagctgagagagggcatttcccacctcatccagtcatgtggccttgggggcatgaagcacaacacggtggtgatgggctggcctaatggctggcgtcaaagcgaagatgcccgcgcttggaagacttttattggcacagttcgagtgacaactgctgcccatcttgcactgctggtggctaaaaacatctccttctttcccagcaatgtggagcaattttctgagggcaacattgatgtgtggtggattgtgcatgatggggggatgcttatgctactaccattcctactgaaacagcacaaggtgtggcgaaagtgcagcatacggatcttcacagtagcccaattagaagacaacagtatccaaatgaagaaggacctagccaccttcctatatcacttacgcattgaggcggaggtagaagtggtggagatgcatgacagtgatatatcagcatatacttacgagcgcactttgatgatggaacaaaggtcccagatgctccggcacatgcggctatccaaaacagagcgagacagagaggcacaattggtgaaagaccgaaactcaatgctacgattgaccagcattggctctgatgaggacgaagagacagaaacctatcaggagaaggtgcacatgacttggacaaaagacaagtacatggcatcccggggacaaaaagcgaagtcaatggaaggattccaggacctgcttaacatgcgtccggaccagtccaatgtgaggcggatgcatacagcagtgaaactcaacgaggttatagttaacaagtcccatgaagcaaagctggttttattgaatatgccagggccaccccgaaaccctgagggtgatgaaaactacatggagttcctagaggtgcttaccgagggactagagcgagtcctacttgtccggggtggtggcagtgaagtgatcaccatttattcataacctactctgaatgaccgtgcttgacctgttttcttaaaaggcctacgtcctccatggaagtgccagctcattactaccactcccactcaactagaagcctgtgttctgtacacatcatactgaactcttgatgagctgagcctcaagtacctgtgtaaaagagctcccatctgatctgcagtcattacagaaaaagcaaatattccctcaacatcagaacaatgctcaagtctttcaagccacgtctgagcagtcaaaggcaaattagaattaacaagctgagccaataaatgaattggtaaaagggatgctagaaattcaactgaagaaaaaaagcaagtcaagtacgtattcagcattaaagatgaatctcagaagtcatggttcaatgttgacactgtgaggataacaactagagacagcttcatcttactaaagaatttatggtcaagtatatttggacctattatcctcggcaagccaagatgcaaacattttttagctatatttctttagtatacccactgctgtaattttatattaggatactaacttgaaacatggctgcagcctctacttcttcaaaaacatccccccaaaataccagatttaaatatccaaa

SEQ ID NO: 182826 - DNA, 4194 bp, Homo sapiens
  Payload ID: 16023
  Gene Symbol: SLC12A6
  Gene Name: solute carrier family 12 (potassium/chloride transporter), member 6
  Uniprot ID: Q9UHW9
  ENST ID: ENST00000397707
  CDS Start-End: 165-3572
tgagtagaagtattcttagttggggctttttgtgtggtgtgaatcaaggttattgaaatgtgttatttttcaagttatcttttgtattgcagtcaaaagtagctagcgtaagaggaagattttgcgaggttccccccactttttttgttcttaaaaagaacaaaatgcatcctccagaaaccaccaccaagatggcttcagttcggttcatggtgacaccgacaaagatcgatgacattccaggtttgtcagacaccagtccggacctcagctctcgatctagttcccgagtaagatttagctcccgggaaagcgtgcctgaaacaagccggagtgagcctatgagtgagatgtctggggccaccacttcgctggcaactgttgcactggatccacccagtgaccggacttctcacccccaggatgtcatcgaggacgacggacataagaaagctcgaaatgcttatctcaataattccaattatgaagaaggagatgaatattttgataaaaatttggcactctttgaggaagaaatggacaccagaccgaaggtgtcttccctcctcaaccgcatggccaattacactaatctgactcaaggagcaaaggaacatgaagaggcagaaaacatcactgaagggaaaaagaagcccaccaagaccccccaaatgggtaccttcatgggtgtctacctcccatgtctacaaaatatttttggagtgatcctttttttacgccttacatgggtggtgggcacagctggagttcttcaggcttttgcaattgtccttatctgctgctgctgtacaatgttgactgctatctccatgagtgccattgccactaatggagtggtgccagctgggggctcatactttatgatttcccgggcactgggcccagagtttggtggggctgttggcctctgcttttatcttggtaccacatttgcagcagccatgtacatccttggtgccattgaaatctttctggtctatatcgtcccccgagctgccatctttcacagtgatgacgcactcaaggaatcagcagccatgctaaataacatgcgtgtctacggcacagctttcttggtccttatggtattagtggtatttatcggcgtacgctatgtgaacaagtttgcctcacttttcctggcctgtgtcattgtgtccatcttggccatctatgctggagccatcaagtcttcttttgctcctccacacttcccggtctgcatgctgggtaaccgcaccctttcatcaagacacattgacgtttgctctaagaccaaggaaattaacaacatgacagtcccatcaaagttatggggattcttctgtaactcgagtcaatttttcaatgccacctgtgatgaatactttgttcacaataacgtcacttcaatccagggcattcctggattggctagtggtataattacagagaatctttggagtaattacctacccaagggagagatcatcgaaaagccttcagccaaatcttctgatgtcttaggcagcttaaaccatgaatatgttcttgttgacatcaccacctccttcacgcttctggtgggaatcttctttccctctgttacaggtatcatggctggatcaaacagatctggagatctgaaagatgctcagaagtctattccgattggtactatccttgccatcctgaccacctcctttgtttatttaagcaatgttgtcctttttggtgcatgtattgaaggggttgttctcagagacaagttcggtgatgctgtgaaaggtaatttggtggtaggcaccttatcttggccatccccatgggtgattgttattggctccttcttttcaacatgtggggctggacttcagagcctcacaggtgcaccgaggctgctacaagctattgccaaggataacatcataccgtttctgagggtttttggccacagcaaagccaatggggaacctacctgggctttacttctaactgctgccattgcagagcttggaatactcattgcctccctggatcttgtggccccaattctttccatgttttttctcatgtgttacctctttgtaaacttggcatgtgccttgcaaacattacttcgaacacccaactggagaccccgattccgctactaccattgggccctttctttcatgggaatgagtatctgtctggctctgatgttcatttcttcctggtattatgccattgtagccatggtaatagctggtatgatctacaagtacattgaataccaaggagctgagaaagaatggggtgatggtatccgtgggctgtccctcagtgcagcccggtttgctttgcttcgattggaggaaggacctccacacactaaaaactggaggcctcagttgcttgtattactgaaactagatgaagacttacatgtcaagcatcctcgcctcctcacctttgcctcacagctcaaagcaggaaaaggtctcactattgtgggctctgtcatcgtggggaacttcctagagaactacggtgaagctttagctgctgagcagaccataaagcacctaatggaggcagagaaggtaaaaggattctgccagctggtggtggccgccaagctgagagagggcatttcccacctcatccagtcatgtggccttgggggcatgaagcacaacacggtggtgatgggctggcctaatggctggcgtcaaagcgaagatgcccgcgcttggaagacttttattggcacagttcgagtgacaactgctgcccatcttgcactgctggtggctaaaaacatctccttctttcccagcaatgtggagcaattttctgagggcaacattgatgtgtggtggattgtgcatgatggggggatgcttatgctactaccattcctactgaaacagcacaaggtgtggcgaaagtgcagcatacggatcttcacagtagcccaattagaagacaacagtatccaaatgaagaaggacctagccaccttcctatatcacttacgcattgaggcggaggtagaagtggtggagatgcatgacagtgatatatcagcatatacttacgagcgcactttgatgatggaacaaaggtcccagatgctccggcacatgcggctatccaaaacagagcgagacagagaggcacaattggtgaaagaccgaaactcaatgctacgattgaccagcattggctctgatgaggacgaagagacagaaacctatcaggagaaggtgcacatgacttggacaaaagacaagtacatggcatcccggggacaaaaagcgaagtcaatggaaggattccaggacctgcttaacatgcgtccggaccagtccaatgtgaggcggatgcatacagcagtgaaactcaacgaggttatagttaacaagtcccatgaagcaaagctggttttattgaatatgccagggccaccccgaaaccctgagggtgatgaaaactacatggagttcctagaggtgcttaccgagggactagagcgagtcctacttgtccggggtggtggcagtgaagtgatcaccatttattcataacctactctgaatgaccgtgcttgacctgttttcttaaaaggcctacgtcctccatggaagtgccagctcattactaccactcccactcaactagaagcctgtgttctgtacacatcatactgaactcttgatgagctgagcctcaagtacctgtgtaaaagagctcccatctgatctgcagtcattacagaaaaagcaaatattccctcaacatcagaacaatgctcaagtctttcaagccacgtctgagcagtcaaaggcaaattagaattaacaagctgagccaataaatgaattggtaaaagggatgctagaaattcaactgaagaaaaaaagcaagtcaagtacgtattcagcattaaagatgaatctcagaagtcatggttcaatgttgacactgtgaggataacaactagagacagcttcatcttactaaagaatttatggtcaagtatatttggacctattatcctcggcaagccaagatgcaaacattttttagctatatttctttagtatacccactgctgtaattttatattaggatactaacttgaaacatggctgcagcctctacttcttcaaaaacatccccccaaaataccagatttaaatatccaaa

SEQ ID NO: 182827 - DNA, 4425 bp, Homo sapiens
  Payload ID: 16023
  Gene Symbol: SLC12A6
  Gene Name: solute carrier family 12 (potassium/chloride transporter), member 6
  Uniprot ID: Q9UHW9
  ENST ID: ENST00000458406
  CDS Start-End: 528-3803
agctgcgcgcgcacccgcatcagctggcgccgggatactgcacctgcgacctccttctccctcaccctgctgcccagtcaggccagcctgcgtggccgtctcctcctctactgggaccctgaggaagaacgacgagggggtgacctgcgccggggcgggggtaggggagaacgcgcctccggcaaagggggtggctcgtcctgtcacacgcaggagaaacctagcgagcggaccgtggctcagtggactagctacgacttgccacgactctgagctgcagtccgaggtgtcttgatccgctaacctcctcccagaccccgaggacctttctgctaggagaagagcgggcgcgccacccccaccgacctctcggagacaggaatccgctctgcccctgcatcctcctctgctcacccttctctcagtagtgtttgtcagacaccagtccggacctcagctctcgatctagttcccgagtaagatttagctcccgggaaagcgtgcctgaaacaagccggagtgagcctatgagtgagatgtctggggccaccacttcgctggcaactgttgcactggatccacccagtgaccggacttctcacccccaggatgtcatcgaggacctgagtcagaactccatcacaggggaacacagccaactgttagacgacggacataagaaagctcgaaatgcttatctcaataattccaattatgaagaaggagatgaatattttgataaaaatttggcactctttgaggaagaaatggacaccagaccgaaggtgtcttccctcctcaaccgcatggccaattacactaatctgactcaaggagcaaaggaacatgaagaggcagaaaacatcactgaagggaaaaagaagcccaccaagaccccccaaatgggtaccttcatgggtgtctacctcccatgtctacaaaatatttttggagtgatcctttttttacgccttacatgggtggtgggcacagctggagttcttcaggcttttgcaattgtccttatctgctgctgctgtacaatgttgactgctatctccatgagtgccattgccactaatggagtggtgccagctgggggctcatactttatgatttcccgggcactgggcccagagtttggtggggctgttggcctctgcttttatcttggtaccacatttgcagcagccatgtacatccttggtgccattgaaatctttctggtctatatcgtcccccgagctgccatctttcacagtgatgacgcactcaaggaatcagcagccatgctaaataacatgcgtgtctacggcacagctttcttggtccttatggtattagtggtatttatcggcgtacgctatgtgaacaagtttgcctcacttttcctggcctgtgtcattgtgtccatcttggccatctatgctggagccatcaagtcttcttttgctcctccacacttcccggtctgcatgctgggtaaccgcaccctttcatcaagacacattgacgtttgctctaagaccaaggaaattaacaacatgacagtcccatcaaagttatggggattcttctgtaactcgagtcaatttttcaatgccacctgtgatgaatactttgttcacaataacgtcacttcaatccagggcattcctggattggctagtggtataattacagagaatctttggagtaattacctacccaagggagagatcatcgaaaagccttcagccaaatcttctgatgtcttaggcagcttaaaccatgaatatgttcttgttgacatcaccacctccttcacgcttctggtgggaatcttctttccctctgttacaggtatcatggctggatcaaacagatctggagatctgaaagatgctcagaagtctattccgattggtactatccttgccatcctgaccacctcctttgtttatttaagcaatgttgtcctttttggtgcatgtattgaaggggttgttctcagagacaagttcggtgatgctgtgaaaggtaatttggtggtaggcaccttatcttggccatccccatgggtgattgttattggctccttcttttcaacatgtggggctggacttcagagcctcacaggtgcaccgaggctgctacaagctattgccaaggataacatcataccgtttctgagggtttttggccacagcaaagccaatggggaacctacctgggctttacttctaactgctgccattgcagagcttggaatactcattgcctccctggatcttgtggccccaattctttccatgttttttctcatgtgttacctctttgtaaacttggcatgtgccttgcaaacattacttcgaacacccaactggagaccccgattccgctactaccattgggccctttctttcatgggaatgagtatctgtctggctctgatgttcatttcttcctggtattatgccattgtagccatggtaatagctggtatgatctacaagtacattgaataccaaggagctgagaaagaatggggtgatggtatccgtgggctgtccctcagtgcagcccggtttgctttgcttcgattggaggaaggacctccacacactaaaaactggaggcctcagttgcttgtattactgaaactagatgaagacttacatgtcaagcatcctcgcctcctcacctttgcctcacagctcaaagcaggaaaaggtctcactattgtgggctctgtcatcgtggggaacttcctagagaactacggtgaagctttagctgctgagcagaccataaagcacctaatggaggcagagaaggtaaaaggattctgccagctggtggtggccgccaagctgagagagggcatttcccacctcatccagtcatgtggccttgggggcatgaagcacaacacggtggtgatgggctggcctaatggctggcgtcaaagcgaagatgcccgcgcttggaagacttttattggcacagttcgagtgacaactgctgcccatcttgcactgctggtggctaaaaacatctccttctttcccagcaatgtggagcaattttctgagggcaacattgatgtgtggtggattgtgcatgatggggggatgcttatgctactaccattcctactgaaacagcacaaggtgtggcgaaagtgcagcatacggatcttcacagtagcccaattagaagacaacagtatccaaatgaagaaggacctagccaccttcctatatcacttacgcattgaggcggaggtagaagtggtggagatgcatgacagtgatatatcagcatatacttacgagcgcactttgatgatggaacaaaggtcccagatgctccggcacatgcggctatccaaaacagagcgagacagagaggcacaattggtgaaagaccgaaactcaatgctacgattgaccagcattggctctgatgaggacgaagagacagaaacctatcaggagaaggtgcacatgacttggacaaaagacaagtacatggcatcccggggacaaaaagcgaagtcaatggaaggattccaggacctgcttaacatgcgtccggaccagtccaatgtgaggcggatgcatacagcagtgaaactcaacgaggttatagttaacaagtcccatgaagcaaagctggttttattgaatatgccagggccaccccgaaaccctgagggtgatgaaaactacatggagttcctagaggtgcttaccgagggactagagcgagtcctacttgtccggggtggtggcagtgaagtgatcaccatttattcataacctactctgaatgaccgtgcttgacctgttttcttaaaaggcctacgtcctccatggaagtgccagctcattactaccactcccactcaactagaagcctgtgttctgtacacatcatactgaactcttgatgagctgagcctcaagtacctgtgtaaaagagctcccatctgatctgcagtcattacagaaaaagcaaatattccctcaacatcagaacaatgctcaagtctttcaagccacgtctgagcagtcaaaggcaaattagaattaacaagctgagccaataaatgaattggtaaaagggatgctagaaattcaactgaagaaaaaaagcaagtcaagtacgtattcagcattaaagatgaatctcagaagtcatggttcaatgttgacactgtgaggataacaactagagacagcttcatcttactaaagaatttatggtcaagtatatttggacctattatcctcggcaagccaagatgcaaacattttttagctatatttctttagtatacccactgctgtaattttatattaggatactaacttgaaacatggctgcagcctctacttcttcaaaaacatccccccaaaataccagatttaaatatccaaa

SEQ ID NO: 182828 - DNA, 3744 bp, Homo sapiens
  Payload ID: 16023
  Gene Symbol: SLC12A6
  Gene Name: solute carrier family 12 (potassium/chloride transporter), member 6
  ENST ID: ENST00000560164
  CDS Start-End: 237-3125
agttacctagcaaacaatcttcatgttaagactgagctcaaataccacttcttccttaatggtccctgtgatcactccaggaaatgtaatacctgagtcagaactccatcacaggggaacacagccaactgttagacgacggacataagaaagctcgaaatgcttatctcaataattccaattatgaagaaggagatgaatattttgataaaaatttggcactctttgaggaagaaatggacaccagaccgaaggtgtcttccctcctcaaccgcatggccaattacactaatctgactcaaggagcaaaggaacatgaagaggcagaaaacatcactgaagggaaaaagaagcccaccaagacaatgttgactgctatctccatgagtgccattgccactaatggagtggtgccagctgggggctcatactttatgatttcccgggcactgggcccagagtttggtggggctgttggcctctgcttttatcttggtaccacatttgcagcagccatgtacatccttggtgccattgaaatctttctggtctatatcgtcccccgagctgccatctttcacagtgatgacgcactcaaggaatcagcagccatgctaaataacatgcgtgtctacggcacagctttcttggtccttatggtattagtggtatttatcggcgtacgctatgtgaacaagtttgcctcacttttcctggcctgtgtcattgtgtccatcttggccatctatgctggagccatcaagtcttcttttgctcctccacacttcccggtctgcatgctgggtaaccgcaccctttcatcaagacacattgacgtttgctctaagaccaaggaaattaacaacatgacagtcccatcaaagttatggggattcttctgtaactcgagtcaatttttcaatgccacctgtgatgaatactttgttcacaataacgtcacttcaatccagggcattcctggattggctagtggtataattacagagaatctttggagtaattacctacccaagggagagatcatcgaaaagccttcagccaaatcttctgatgtcttaggcagcttaaaccatgaatatgttcttgttgacatcaccacctccttcacgcttctggtgggaatcttctttccctctgttacaggtatcatggctggatcaaacagatctggagatctgaaagatgctcagaagtctattccgattggtactatccttgccatcctgaccacctcctttgtttatttaagcaatgttgtcctttttggtgcatgtattgaaggggttgttctcagagacaagttcggtgatgctgtgaaaggtaatttggtggtaggcaccttatcttggccatccccatgggtgattgttattggctccttcttttcaacatgtggggctggacttcagagcctcacaggtgcaccgaggctgctacaagctattgccaaggataacatcataccgtttctgagggtttttggccacagcaaagccaatggggaacctacctgggctttacttctaactgctgccattgcagagcttggaatactcattgcctccctggatcttgtggccccaattctttccatgttttttctcatgtgttacctctttgtaaacttggcatgtgccttgcaaacattacttcgaacacccaactggagaccccgattccgctactaccattgggccctttctttcatgggaatgagtatctgtctggctctgatgttcatttcttcctggtattatgccattgtagccatggtaatagctggtatgatctacaagtacattgaataccaaggagctgagaaagaatggggtgatggtatccgtgggctgtccctcagtgcagcccggtttgctttgcttcgattggaggaaggacctccacacactaaaaactggaggcctcagttgcttgtattactgaaactagatgaagacttacatgtcaagcatcctcgcctcctcacctttgcctcacagctcaaagcaggaaaaggtctcactattgtgggctctgtcatcgtggggaacttcctagagaactacggtgaagctttagctgctgagcagaccataaagcacctaatggaggcagagaaggtaaaaggattctgccagctggtggtggccgccaagctgagagagggcatttcccacctcatccagtcatgtggccttgggggcatgaagcacaacacggtggtgatgggctggcctaatggctggcgtcaaagcgaagatgcccgcgcttggaagacttttattggcacagttcgagtgacaactgctgcccatcttgcactgctggtggctaaaaacatctccttctttcccagcaatgtggagcaattttctgagggcaacattgatgtgtggtggattgtgcatgatggggggatgcttatgctactaccattcctactgaaacagcacaaggtgtggcgaaagtgcagcatacggatcttcacagtagcccaattagaagacaacagtatccaaatgaagaaggacctagccaccttcctatatcacttacgcattgaggcggaggtagaagtggtggagatgcatgacagtgatatatcagcatatacttacgagcgcactttgatgatggaacaaaggtcccagatgctccggcacatgcggctatccaaaacagagcgagacagagaggcacaattggtgaaagaccgaaactcaatgctacgattgaccagcattggctctgatgaggacgaagagacagaaacctatcaggagaaggtgcacatgacttggacaaaagacaagtacatggcatcccggggacaaaaagcgaagtcaatggaaggattccaggacctgcttaacatgcgtccggaccagtccaatgtgaggcggatgcatacagcagtgaaactcaacgaggttatagttaacaagtcccatgaagcaaagctggttttattgaatatgccagggccaccccgaaaccctgagggtgatgaaaactacatggagttcctagaggtgcttaccgagggactagagcgagtcctacttgtccggggtggtggcagtgaagtgatcaccatttattcataacctactctgaatgaccgtgcttgacctgttttcttaaaaggcctacgtcctccatggaagtgccagctcattactaccactcccactcaactagaagcctgtgttctgtacacatcatactgaactcttgatgagctgagcctcaagtacctgtgtaaaagagctcccatctgatctgcagtcattacagaaaaagcaaatattccctcaacatcagaacaatgctcaagtctttcaagccacgtctgagcagtcaaaggcaaattagaattaacaagctgagccaataaatgaattggtaaaagggatgctagaaattcaactgaagaaaaaaagcaagtcaagtacgtattcagcattaaagatgaatctcagaagtcatggttcaatgttgacactgtgaggataacaactagagacagcttcatcttactaaagaatttatggtcaagtatatttggacctattatcctcggcaagccaagatgcaaacattttttagctatatttctttagtatacccactgctgtaattttatattaggatactaacttgaaacatggctgcagcctctacttcttcaaaaacatccccccaaaataccagatttaaatatcc

SEQ ID NO: 182829 - DNA, 567 bp, Homo sapiens
  Payload ID: 16023
  Gene Symbol: SLC12A6
  Gene Name: solute carrier family 12 (potassium/chloride transporter), member 6
  ENST ID: ENST00000561120
  CDS Start-End: 112-567
actcggtcaccgcgggctgcggcggctgggcggggctttcgggcgcccgcgggacggttccgccctctcactgcacccccgggcttctcttcgcaagaaaccaccaccaagatggcttcagttcggttcatggtgacaccgacaaagatcgatgacattccaggtttgtcagacaccagtccggacctcagctctcgatctagttcccgagtaagatttagctcccgggaaagcgtgcctgaaacaagccggagtgagcctatgagtgagatgtctggggccaccacttcgctggcaactgttgcactggatccacccagtgaccggacttctcacccccaggatgtcatcgaggacctgagtcagaactccatcacaggggaacacagccaactgttagacgacggacataagaaagctcgaaatgcttatctcaataattccaattatgaagaaggagatgaatattttgataaaaatttggcactctttgaggaagaaatggacaccagaccgaaggtgtcttccctcctcaaccgcatggccaattacactaatctgactcaa

SEQ ID NO: 182830 - DNA, 3866 bp, Homo sapiens
  Payload ID: 16023
  Gene Symbol: SLC12A6
  Gene Name: solute carrier family 12 (potassium/chloride transporter), member 6
  Uniprot ID: Q9UHW9
  ENST ID: ENST00000558589
  CDS Start-End: 441-3866
tgcgcgcgcacccgcatcagctggcgccgggatactgcacctgcgacctccttctccctcaccctgctgcccagtcaggccagcctgcgtggccgtctcctcctctactgggaccctgaggaagaacgacgagggggtgacctgcgccggggcgggggtaggggagaacgcgcctccggcaaagggggtggctcgtcctgtcacacgcaggagaaacctagcgagcggaccgtggctcagtggactagctacgacttgccacgactctgagctgcagtccgaggtgtcttgatccgctaacctcctcccagaccccgaggacctttctgctaggagaagagcgggcgcgccacccccaccgacctctcggagacaggaatccgctctgcccctgcatcctcctctgctcacccttctctcagtagtaaaccaccaccaagatggcttcagttcggttcatggtgacaccgacaaagatcgatgacattccaggtttgtcagacaccagtccggacctcagctctcgatctagttcccgagtaagatttagctcccgggaaagcgtgcctgaaacaagccggagtgagcctatgagtgagatgtctggggccaccacttcgctggcaactgttgcactggatccacccagtgaccggacttctcacccccaggatgtcatcgaggacctgagtcagaactccatcacaggggaacacagccaactgttagacgacggacataagaaagctcgaaatgcttatctcaataattccaattatgaagaaggagatgaatattttgataaaaatttggcactctttgaggaagaaatggacaccagaccgaaggtgtcttccctcctcaaccgcatggccaattacactaatctgactcaaggagcaaaggaacatgaagaggcagaaaacatcactgaagggaaaaagaagcccaccaagaccccccaaatgggtaccttcatgggtgtctacctcccatgtctacaaaatatttttggagtgatcctttttttacgccttacatgggtggtgggcacagctggagttcttcaggcttttgcaattgtccttatctgctgctgctgtacaatgttgactgctatctccatgagtgccattgccactaatggagtggtgccagctgggggctcatactttatgatttcccgggcactgggcccagagtttggtggggctgttggcctctgcttttatcttggtaccacatttgcagcagccatgtacatccttggtgccattgaaatctttctggtctatatcgtcccccgagctgccatctttcacagtgatgacgcactcaaggaatcagcagccatgctaaataacatgcgtgtctacggcacagctttcttggtccttatggtattagtggtatttatcggcgtacgctatgtgaacaagtttgcctcacttttcctggcctgtgtcattgtgtccatcttggccatctatgctggagccatcaagtcttcttttgctcctccacacttcccggtctgcatgctgggtaaccgcaccctttcatcaagacacattgacgtttgctctaagaccaaggaaattaacaacatgacagtcccatcaaagttatggggattcttctgtaactcgagtcaatttttcaatgccacctgtgatgaatactttgttcacaataacgtcacttcaatccagggcattcctggattggctagtggtataattacagagaatctttggagtaattacctacccaagggagagatcatcgaaaagccttcagccaaatcttctgatgtcttaggcagcttaaaccatgaatatgttcttgttgacatcaccacctccttcacgcttctggtgggaatcttctttccctctgttacaggtatcatggctggatcaaacagatctggagatctgaaagatgctcagaagtctattccgattggtactatccttgccatcctgaccacctcctttgtttatttaagcaatgttgtcctttttggtgcatgtattgaaggggttgttctcagagacaagttcggtgatgctgtgaaaggtaatttggtggtaggcaccttatcttggccatccccatgggtgattgttattggctccttcttttcaacatgtggggctggacttcagagcctcacaggtgcaccgaggctgctacaagctattgccaaggataacatcataccgtttctgagggtttttggccacagcaaagccaatggggaacctacctgggctttacttctaactgctgccattgcagagcttggaatactcattgcctccctggatcttgtggccccaattctttccatgttttttctcatgtgttacctctttgtaaacttggcatgtgccttgcaaacattacttcgaacacccaactggagaccccgattccgctactaccattgggccctttctttcatgggaatgagtatctgtctggctctgatgttcatttcttcctggtattatgccattgtagccatggtaatagctggtatgatctacaagtacattgaataccaaggagctgagaaagaatggggtgatggtatccgtgggctgtccctcagtgcagcccggtttgctttgcttcgattggaggaaggacctccacacactaaaaactggaggcctcagttgcttgtattactgaaactagatgaagacttacatgtcaagcatcctcgcctcctcacctttgcctcacagctcaaagcaggaaaaggtctcactattgtgggctctgtcatcgtggggaacttcctagagaactacggtgaagctttagctgctgagcagaccataaagcacctaatggaggcagagaaggtaaaaggattctgccagctggtggtggccgccaagctgagagagggcatttcccacctcatccagtcatgtggccttgggggcatgaagcacaacacggtggtgatgggctggcctaatggctggcgtcaaagcgaagatgcccgcgcttggaagacttttattggcacagttcgagtgacaactgctgcccatcttgcactgctggtggctaaaaacatctccttctttcccagcaatgtggagcaattttctgagggcaacattgatgtgtggtggattgtgcatgatggggggatgcttatgctactaccattcctactgaaacagcacaaggtgtggcgaaagtgcagcatacggatcttcacagtagcccaattagaagacaacagtatccaaatgaagaaggacctagccaccttcctatatcacttacgcattgaggcggaggtagaagtggtggagatgcatgacagtgatatatcagcatatacttacgagcgcactttgatgatggaacaaaggtcccagatgctccggcacatgcggctatccaaaacagagcgagacagagaggcacaattggtgaaagaccgaaactcaatgctacgattgaccagcattggctctgatgaggacgaagagacagaaacctatcaggagaaggtgcacatgacttggacaaaagacaagtacatggcatcccggggacaaaaagcgaagtcaatggaaggattccaggacctgcttaacatgcgtccggaccagtccaatgtgaggcggatgcatacagcagtgaaactcaacgaggttatagttaacaagtcccatgaagcaaagctggttttattgaatatgccagggccaccccgaaaccctgagggtgatgaaaactacatggagttcctagaggtgcttaccgagggactagagcgagtcctacttgtccggggtggtggcagtgaagtgatcaccatttattcataa

SEQ ID NO: 182831 - DNA, 576 bp, Homo sapiens
  Payload ID: 16023
  Gene Symbol: SLC12A6
  Gene Name: solute carrier family 12 (potassium/chloride transporter), member 6
  ENST ID: ENST00000559236
  CDS Start-End: 170-576
actcggtcaccgcgggctgcggcggctgggcggggctttcgggcgcccgcgggacggttccgccctctcactgcacccccgggcttctcttcgcaagtcaaaagtagctagcgtaagaggaagattttgcgaggttccccccactttttttgttcttaaaaagaacaaaatgcatcctccagaaaccaccaccaagatggcttcagttcggttcatggtgacaccgacaaagatcgatgacattccaggtttgtcagacaccagtccggacctcagctctcgatctagttcccgagtaagatttagctcccgggaaagcgtgcctgaaacaagccggagtgagcctatgagtgagatgtctggggccaccacttcgctggcaactgttgcactggatccacccagtgaccggacttctcacccccaggatgtcatcgaggacctgagtcagaactccatcacaggggaacacagccaactgttagacgacggacataagaaagctcgaaatgcttatctcaataattccaattatgaagaaggagatgaatattttgataaaaatttggcactctt

SEQ ID NO: 182832 - DNA, 548 bp, Homo sapiens
  Payload ID: 16023
  Gene Symbol: SLC12A6
  Gene Name: solute carrier family 12 (potassium/chloride transporter), member 6
  ENST ID: ENST00000559484
  CDS Start-End: 367-548
atcagctggcgccgggatactgcacctgcgacctccttctccctcaccctgctgcccagtcaggccagcctgcgtggccgtctcctcctctactgggaccctgaggaagaacgacgagggggtgacctgcgccggggcgggggtaggggagaacgcgcctccggcaaagggggtggctcgtcctgtcacacgcaggagaaacctagcgagcggaccgtggctcagtggactagctacgacttgccacgactctgagctgcagtccgaggtttgtcagacaccagtccggacctcagctctcgatctagttcccgagtaagatttagctcccgggaaagcgtgcctgaaacaagccggagtgagcctatgagtgagatgtctggggccaccacttcgctggcaactgttgcactggatccacccagtgaccggacttctcacccccaggatgtcatcgaggacctgagtcagaactccatcacaggggaacacagccaactgttagacgacggacataagaaagctcgaaatgcttatctcaataattc

SEQ ID NO: 182833 - DNA, 4454 bp, Homo sapiens
  Payload ID: 16023
  Gene Symbol: SLC12A6
  Gene Name: solute carrier family 12 (potassium/chloride transporter), member 6
  ENST ID: ENST00000559523
  CDS Start-End: 528-3356
agctgcgcgcgcacccgcatcagctggcgccgggatactgcacctgcgacctccttctccctcaccctgctgcccagtcaggccagcctgcgtggccgtctcctcctctactgggaccctgaggaagaacgacgagggggtgacctgcgccggggcgggggtaggggagaacgcgcctccggcaaagggggtggctcgtcctgtcacacgcaggagaaacctagcgagcggaccgtggctcagtggactagctacgacttgccacgactctgagctgcagtccgaggtgtcttgatccgctaacctcctcccagaccccgaggacctttctgctaggagaagagcgggcgcgccacccccaccgacctctcggagacaggaatccgctctgcccctgcatcctcctctgctcacccttctctcagtagtgtttgtcagacaccagtccggacctcagctctcgatctagttcccgagtaagatttagctcccgggaaagcgtgcctgaaacaagccggagtgagcctatgagtgagatgtctggggccaccacttcgctggcaactgttgcactggatccacccagtgaccggacttctcacccccaggatgtcatcgaggacctgagtcagaactccatcacaggggaacacagccaactgttagacgacggacataagaaagctcgaaatgcttatctcaataattccaattatgaagaaggagatgaatattttgataaaaatttggcactctttgaggaagaaatggacaccagaccgaaggtgtcttccctcctcaaccgcatggccaattacactaatctgactcaaggagcaaaggaacatgaagaggcagaaaacatcactgaagggaaaaagaagcccaccaagaccccccaaatgggtaccttcatgggtgtctacctcccatgtctacaaaatatttttggagtgatcctttttttacgccttacatgggtggtgggcacagctggagttcttcaggcttttgcaattgtccttatctgctgctgctgtacaatgttgactgctatctccatgagtgccattgccactaatggagtggtgccagctgggggctcatactttatgatttcccgggcactgggcccagagtttggtggggctgttggcctctgcttttatcttggtaccacatttgcagcagccatgtacatccttggtgccattgaaatctttctggtctatatcgtcccccgagctgccatctttcacagtgatgacgcactcaaggaatcagcagccatgctaaataacatgcgtgtctacggcacagctttcttggtccttatggtattagtggtatttatcggcgtacgctatgtgaacaagtttgcctcacttttcctggcctgtgtcattgtgtccatcttggccatctatgctggagccatcaagtcttcttttgctcctccacacttcccggtctgcatgctgggtaaccgcaccctttcatcaagacacattgacgtttgctctaagaccaaggaaattaacaacatgacagtcccatcaaagttatggggattcttctgtaactcgagtcaatttttcaatgccacctgtgatgaatactttgttcacaataacgtcacttcaatccagggcattcctggattggctagtggtataattacagagaatctttggagtaattacctacccaagggagagatcatcgaaaagccttcagccaaatcttctgatgtcttaggcagcttaaaccatgaatatgttcttgttgacatcaccacctccttcacgcttctggtgggaatcttctttccctctgttacaggtatcatggctggatcaaacagatctggagatctgaaagatgctcagaagtctattccgattggtactatccttgccatcctgaccacctcctttgtttatttaagcaatgttgtcctttttggtgcatgtattgaaggggttgttctcagagacaagttcggtgatgctgtgaaaggtaatttggtggtaggcaccttatcttggccatccccatgggtgattgttattggctccttcttttcaacatgtggggctggacttcagagcctcacaggtgcaccgaggctgctacaagctattgccaaggataacatcataccgtttctgagggtttttggccacagcaaagccaatggggaacctacctgggctttacttctaactgctgccattgcagagcttggaatactcattgcctccctggatcttgtggccccaattctttccatgttttttctcatgtgttacctctttgtaaacttggcatgtgccttgcaaacattacttcgaacacccaactggagaccccgattccgctactaccattgggccctttctttcatgggaatgagtatctgtctggctctgatgttcatttcttcctggtattatgccattgtagccatggtaatagctggtatgatctacaagtacattgaataccaaggagctgagaaagaatggggtgatggtatccgtgggctgtccctcagtgcagcccggtttgctttgcttcgattggaggaaggacctccacacactaaaaactggaggcctcagttgcttgtattactgaaactagatgaagacttacatgtcaagcatcctcgcctcctcacctttgcctcacagctcaaagcaggaaaaggtctcactattgtgggctctgtcatcgtggggaacttcctagagaactacggtgaagctttagctgctgagcagaccataaagcacctaatggaggcagagaaggtaaaaggattctgccagctggtggtggccgccaagctgagagagggcatttcccacctcatccagtcatgtggccttgggggcatgaagcacaacacggtggtgatgggctggcctaatggctggcgtcaaagcgaagatgcccgcgcttggaagacttttattggcacagttcgagtgacaactgctgcccatcttgcactgctggtggctaaaaacatctccttctttcccagcaatgtggagcaattttctgagggcaacattgatgtgtggtggattgtgcatgatggggggatgcttatgctactaccattcctactgaaacagcacaaggtgtggcgaaagtgcagcatacggatcttcacagtagcccaattagaagacaacagtatccaaatgaagaaggacctagccaccttcctatatcacttacgcattgaggcggaggtagaagtggtggagatggtgagaaagctgagtttgagatacaagagcatgacagtgatatatcagcatatacttacgagcgcactttgatgatggaacaaaggtcccagatgctccggcacatgcggctatccaaaacagagcgagacagagaggcacaattggtgaaagaccgaaactcaatgctacgattgaccagcattggctctgatgaggacgaagagacagaaacctatcaggagaaggtgcacatgacttggacaaaagacaagtacatggcatcccggggacaaaaagcgaagtcaatggaaggattccaggacctgcttaacatgcgtccggaccagtccaatgtgaggcggatgcatacagcagtgaaactcaacgaggttatagttaacaagtcccatgaagcaaagctggttttattgaatatgccagggccaccccgaaaccctgagggtgatgaaaactacatggagttcctagaggtgcttaccgagggactagagcgagtcctacttgtccggggtggtggcagtgaagtgatcaccatttattcataacctactctgaatgaccgtgcttgacctgttttcttaaaaggcctacgtcctccatggaagtgccagctcattactaccactcccactcaactagaagcctgtgttctgtacacatcatactgaactcttgatgagctgagcctcaagtacctgtgtaaaagagctcccatctgatctgcagtcattacagaaaaagcaaatattccctcaacatcagaacaatgctcaagtctttcaagccacgtctgagcagtcaaaggcaaattagaattaacaagctgagccaataaatgaattggtaaaagggatgctagaaattcaactgaagaaaaaaagcaagtcaagtacgtattcagcattaaagatgaatctcagaagtcatggttcaatgttgacactgtgaggataacaactagagacagcttcatcttactaaagaatttatggtcaagtatatttggacctattatcctcggcaagccaagatgcaaacattttttagctatatttctttagtatacccactgctgtaattttatattaggatactaacttgaaacatggctgcagcctctacttcttcaaaaacatccccccaaaataccagatttaaatatccaaa

SEQ ID NO: 182834 - DNA, 3725 bp, Homo sapiens
  Payload ID: 16023
  Gene Symbol: SLC12A6
  Gene Name: solute carrier family 12 (potassium/chloride transporter), member 6
  Uniprot ID: Q9UHW9
  ENST ID: ENST00000558667
  CDS Start-End: 104-3556
actcggtcaccgcgggctgcggcggctgggcggggctttcgggcgcccgcgggacggttccgccctctcactgcacccccgggcttctcttcgcaagaacaaaatgcatcctccagaaaccaccaccaagatggcttcagttcggttcatggtgacaccgacaaagatcgatgacattccaggtttgtcagacaccagtccggacctcagctctcgatctagttcccgagtaagatttagctcccgggaaagcgtgcctgaaacaagccggagtgagcctatgagtgagatgtctggggccaccacttcgctggcaactgttgcactggatccacccagtgaccggacttctcacccccaggatgtcatcgaggacctgagtcagaactccatcacaggggaacacagccaactgttagacgacggacataagaaagctcgaaatgcttatctcaataattccaattatgaagaaggagatgaatattttgataaaaatttggcactctttgaggaagaaatggacaccagaccgaaggtgtcttccctcctcaaccgcatggccaattacactaatctgactcaaggagcaaaggaacatgaagaggcagaaaacatcactgaagggaaaaagaagcccaccaagaccccccaaatgggtaccttcatgggtgtctacctcccatgtctacaaaatatttttggagtgatcctttttttacgccttacatgggtggtgggcacagctggagttcttcaggcttttgcaattgtccttatctgctgctgctgtacaatgttgactgctatctccatgagtgccattgccactaatggagtggtgccagctgggggctcatactttatgatttcccgggcactgggcccagagtttggtggggctgttggcctctgcttttatcttggtaccacatttgcagcagccatgtacatccttggtgccattgaaatctttctggtctatatcgtcccccgagctgccatctttcacagtgatgacgcactcaaggaatcagcagccatgctaaataacatgcgtgtctacggcacagctttcttggtccttatggtattagtggtatttatcggcgtacgctatgtgaacaagtttgcctcacttttcctggcctgtgtcattgtgtccatcttggccatctatgctggagccatcaagtcttcttttgctcctccacacttcccggtctgcatgctgggtaaccgcaccctttcatcaagacacattgacgtttgctctaagaccaaggaaattaacaacatgacagtcccatcaaagttatggggattcttctgtaactcgagtcaatttttcaatgccacctgtgatgaatactttgttcacaataacgtcacttcaatccagggcattcctggattggctagtggtataattacagagaatctttggagtaattacctacccaagggagagatcatcgaaaagccttcagccaaatcttctgatgtcttaggcagcttaaaccatgaatatgttcttgttgacatcaccacctccttcacgcttctggtgggaatcttctttccctctgttacaggtatcatggctggatcaaacagatctggagatctgaaagatgctcagaagtctattccgattggtactatccttgccatcctgaccacctcctttgtttatttaagcaatgttgtcctttttggtgcatgtattgaaggggttgttctcagagacaagttcggtgatgctgtgaaaggtaatttggtggtaggcaccttatcttggccatccccatgggtgattgttattggctccttcttttcaacatgtggggctggacttcagagcctcacaggtgcaccgaggctgctacaagctattgccaaggataacatcataccgtttctgagggtttttggccacagcaaagccaatggggaacctacctgggctttacttctaactgctgccattgcagagcttggaatactcattgcctccctggatcttgtggccccaattctttccatgttttttctcatgtgttacctctttgtaaacttggcatgtgccttgcaaacattacttcgaacacccaactggagaccccgattccgctactaccattgggccctttctttcatgggaatgagtatctgtctggctctgatgttcatttcttcctggtattatgccattgtagccatggtaatagctggtatgatctacaagtacattgaataccaaggagctgagaaagaatggggtgatggtatccgtgggctgtccctcagtgcagcccggtttgctttgcttcgattggaggaaggacctccacacactaaaaactggaggcctcagttgcttgtattactgaaactagatgaagacttacatgtcaagcatcctcgcctcctcacctttgcctcacagctcaaagcaggaaaaggtctcactattgtgggctctgtcatcgtggggaacttcctagagaactacggtgaagctttagctgctgagcagaccataaagcacctaatggaggcagagaaggtaaaaggattctgccagctggtggtggccgccaagctgagagagggcatttcccacctcatccagtcatgtggccttgggggcatgaagcacaacacggtggtgatgggctggcctaatggctggcgtcaaagcgaagatgcccgcgcttggaagacttttattggcacagttcgagtgacaactgctgcccatcttgcactgctggtggctaaaaacatctccttctttcccagcaatgtggagcaattttctgagggcaacattgatgtgtggtggattgtgcatgatggggggatgcttatgctactaccattcctactgaaacagcacaaggtgtggcgaaagtgcagcatacggatcttcacagtagcccaattagaagacaacagtatccaaatgaagaaggacctagccaccttcctatatcacttacgcattgaggcggaggtagaagtggtggagatgcatgacagtgatatatcagcatatacttacgagcgcactttgatgatggaacaaaggtcccagatgctccggcacatgcggctatccaaaacagagcgagacagagaggcacaattggtgaaagaccgaaactcaatgctacgattgaccagcattggctctgatgaggacgaagagacagaaacctatcaggagaaggtgcacatgacttggacaaaagacaagtacatggcatcccggggacaaaaagcgaagtcaatggaaggattccaggacctgcttaacatgcgtccggaccagtccaatgtgaggcggatgcatacagcagtgaaactcaacgaggttatagttaacaagtcccatgaagcaaagctggttttattgaatatgccagggccaccccgaaaccctgagggtgatgaaaactacatggagttcctagaggtgcttaccgagggactagagcgagtcctacttgtccggggtggtggcagtgaagtgatcaccatttattcataacctactctgaatgaccgtgcttgacctgttttcttaaaaggcctacgtcctccatggaagtgccagctcattactaccactcccactcaactagaagcctgtgttctgtacacatcatactgaactcttgatgagctgagcctcaagtacctgtgtaaaagagctccca

SEQ ID NO: 182835 - DNA, 5111 bp, Homo sapiens
  Payload ID: 16023
  Gene Symbol: SLC12A6
  Gene Name: solute carrier family 12 (potassium/chloride transporter), member 6
  ENST ID: ENST00000559664
  CDS Start-End: 1107-3827
gaaacagttaccggctagtaaacaacagctgcgcgcgcacccgcatcagctggcgccgggatactgcacctgcgacctccttctccctcaccctgctgcccagtcaggccagcctgcgtggccgtctcctcctctactgggaccctgaggaagaacgacgagggggtgacctgcgccggggcgggggtaggggagaacgcgcctccggcaaagggggtggctcgtcctgtcacacgcaggagaaacctagcgagcggaccgtggctcagtggactagctacgacttgccacgactctgagctgcagtccgaggtgtcttgatccgctaacctcctcccagaccccgaggacctttctgctaggagaagagcgggcgcgccacccccaccgacctctcggagacaggaatccgctctgcccctgcatcctcctctgctcacccttctctcagtagtgtgggttatttttcccgttatgcatgtgcacctttcccaccagacccaagtggattgtcgacatcaaaaacaccgggtggctttgcatacacctccccccagccagacctgtggggtattcacctgatacacaacaggtggccgggtgtacaccttttagcaatctgatccacgctatagtcgcctgataaaggtttgcctgcacgcacttcgcccaactagaaccgtgggacactcaccagataaaggactacctcgacaggaaactgggggctgaggggagggaggcttcatctgctgccctgagaccatggcactgagccttcagccccggaccagaggggttagctaggtagctcttcattctgaaggaaagaagtcacacaagattggcattgttttgtctttttgttttttgtttttttctctcttaaaaaatatattcacctattggtgatgcactttctaggacagtcggcttgaattctgagtagaagtattcttagttggggctttttgtgtggtgtgaatcaaggttattgaaatgtgttatttttcaagttatcttttgtattgcagtcaaaagtagctagcgtaagaggaagattttgcgaggttccccccactttttttgttcttaaaaagaacaaaatgcatcctccagaaaccaccaccaagatggcttcagttcggttcatggtgacaccgacaaagatcgatgacattccaggtttgtcagacaccagtccggacctcagctctcgatctagttcccgagtaagatttagctcccgggaaagcgtgcctgaaacaagccggagtgagcctatgagtgagatgtctggggccaccacttcgctggcaactgttgcactggatccacccagtgaccggacttctcacccccaggatgtcatcgaggacctgagtcagaactccatcacaggggaacacagccaactgttagacgacggacataagaaagctcgaaatgcttatctcaataattccaattatgaagaaggagatgaatattttgataaaaatttggcactctttgaggaagaaatggacaccagaccgaaggtgtcttccctcctcaaccgcatggccaattacactaatctgactcaaggagcaaaggaacatgaagaggcagaaaacatcactgaagggaaaaagaagcccaccaagaccccccaaatgggtaccttcatgggtgtctacctcccatgtctacaaaatatttttggagtgatcctttttttacgccttacatgggtggtgggcacagctggagttcttcaggcttttgcaattgtccttatctgctgctgctgtacaatgttgactgctatctccatgagtgccattgccactaatggagtggtgccagctgggggctcatactttatgatttcccgggcactgggcccagagtttggtggggctgttggcctctgcttttatcttggtaccacatttgcagcagccatgtacatccttggtgccattgaaatctttctggtctatatcgtcccccgagctgccatctttcacagtgatgacgcactcaaggaatcagcagccatgctaaataacatgcgtgtctacggcacagctttcttggtccttatggtattagtggtatttatcggcgtacgctatgtgaacaagtttgcctcacttttcctggcctgtgtcattgtgtccatcttggccatctatgctggagccatcaagtcttcttttgctcctccacacttcccggtctgcatgctgggtaaccgcaccctttcatcaagacacattgacgtttgctctaagaccaaggaaattaacaacatgacagtcccatcaaagttatggggattcttctgtaactcgagtcaatttttcaatgccacctgtgatgaatactttgttcacaataacgtcacttcaatccagggcattcctggattggctagtggtataattacagagaatctttggagtaattacctacccaagggagagatcatcgaaaagccttcagccaaatcttctgatgtcttaggcagcttaaaccatgaatatgttcttgttgacatcaccacctccttcacgcttctggtgggaatcttctttccctctgttacaggtatcatggctggatcaaacagatctggagatctgaaagatgctcagaagtctattccgattggtactatccttgccatcctgaccacctcctttgtttatttaagcaatgttgtcctttttggtgcatgtattgaaggggttgttctcagagacaagttcggtgatgctgtgaaaggtaatttggtggtaggcaccttatcttggccatccccatgggtgattgttattggctccttcttttcaacatgtggggctggacttcagagcctcacaggtgcaccgaggctgctacaagctattgccaaggataacatcataccgtttctgagggtttttggccacagcaaagccaatggggaacctacctgggctttacttctaactgctgccattgcagagcttggaatactcattgcctccctggatcttgtggccccaattctttccatgttttttctcatgtgttacctctttgtaaacttggcatgtgccttgcaaacattacttcgaacacccaactggagaccccgattccgctactaccattgggccctttctttcatgggaatgagtatctgtctggctctgatgttcatttcttcctggtattatgccattgtagccatggtaatagctggtatgatctacaagtacattgaataccaaggagctgagaaagaatggggtgatggtatccgtgggctgtccctcagtgcagcccggtttgctttgcttcgattggaggaaggacctccacacactaaaaactggaggcctcagttgcttgtattactgaaactagatgaagacttacatgtcaagcatcctcgcctcctcacctttgcctcacagctcaaagcaggaaaaggtctcactattgtgggctctgtcatcgtggggaacttcctagagaactacggtgaagctttagctgctgagcagaccataaagcacctaatggaggcagagaaggtaaaaggattctgccagctggtggtggccgccaagctgagagagggcatttcccacctcatccagtcatgtggccttgggggcatgaagcacaacacggtggtgatgggctggcctaatggctggcgtcaaagcgaagatgcccgcgcttggaagacttttattgcaatgtggagcaattttctgagggcaacattgatgtgtggtggattgtgcatgatggggggatgcttatgctactaccattcctactgaaacagcacaaggtgtggcgaaagtgcagcatacggatcttcacagtagcccaattagaagacaacagtatccaaatgaagaaggacctagccaccttcctatatcacttacgcattgaggcggaggtagaagtggtggagatgcatgacagtgatatatcagcatatacttacgagcgcactttgatgatggaacaaaggtcccagatgctccggcacatgcggctatccaaaacagagcgagacagagaggcacaattggtgaaagaccgaaactcaatgctacgattgaccagcattggctctgatgaggacgaagagacagaaacctatcaggagaaggtgcacatgacttggacaaaagacaagtacatggcatcccggggacaaaaagcgaagtcaatggaaggattccaggacctgcttaacatgcgtccggaccagtccaatgtgaggcggatgcatacagcagtgaaactcaacgaggttatagttaacaagtcccatgaagcaaagctggttttattgaatatgccagggccaccccgaaaccctgagggtgatgaaaactacatggagttcctagaggtgcttaccgagggactagagcgagtcctacttgtccggggtggtggcagtgaagtgatcaccatttattcataacctactctgaatgaccgtgcttgacctgttttcttaaaaggcctacgtcctccatggaagtgccagctcattactaccactcccactcaactagaagcctgtgttctgtacacatcatactgaactcttgatgagctgagcctcaagtacctgtgtaaaagagctcccatctgatctgcagtcattacagaaaaagcaaatattccctcaacatcagaacaatgctcaagtctttcaagccacgtctgagcagtcaaaggcaaattagaattaacaagctgagccaataaatgaattggtaaaagggatgctagaaattcaactgaagaaaaaaagcaagtcaagtacgtattcagcattaaagatgaatctcagaagtcatggttcaatgttgacactgtgaggataacaactagagacagcttcatcttactaaagaatttatggtcaagtatatttggacctattatcctcggcaagccaagatgcaaacattttttagctatatttctttagtatacccactgctgtaattttatattaggatactaacttgaaacatggctgcagcctctacttcttcaaaaacatccccccaaaataccagatttaaatatccaaa

SEQ ID NO: 182836 - DNA, 490 bp, Homo sapiens
  Payload ID: 16023
  Gene Symbol: SLC12A6
  Gene Name: solute carrier family 12 (potassium/chloride transporter), member 6
  ENST ID: ENST00000560332
  CDS Start-End: 170-490
atgttaagactgagctcaaataccacttcttccttaatggtccctgtgatcactccaggaaatgtaatacgacggacataagaaagctcgaaatgcttatctcaataattccaattatgaagaaggagatgaatattttgataaaaatttggcactctttgaggaagaaatggacaccagaccgaaggtgtcttccctcctcaaccgcatggccaattacactaatctgactcaaggagcaaaggaacatgaagaggcagaaaacatcactgaagggaaaaagaagcccaccaagaccccccaaatgggtaccttcatgggtgtctacctcccatgtctacaaaatatttttggagtgatcctttttttacgccttacatgggtggtgggcacagctggagttcttcaggcttttgcaattgtccttatctgctgctgctgtacaatgttgactgctatctccatgagtgccattgccactaatggagtg

SEQ ID NO: 182837 - DNA, 5407 bp, Homo sapiens
  Payload ID: 16023
  Gene Symbol: SLC12A6
  Gene Name: solute carrier family 12 (potassium/chloride transporter), member 6
  ENST ID: ENST00000561080
  CDS Start-End: 1378-4098
actcggtcaccgcgggctgcggcggctgggcggggctttcgggcgcccgcgggacggttccgccctctcactgcacccccgggcttctcttcgcaaggttcacctcgaatgaggaacaagcggggagggaagggaagggctgcggcggcgcgggcgcaccccgtcgggcccggggctgggggaggccaggtcacgtaactgctgctctggcgtcgggccggggagggggcgccagccccggcagcgcgaaccctgcgcgcgccgcggctctgaaacagttaccggctagtaaacaacagctgcgcgcgcacccgcatcagctggcgccgggatactgcacctgcgacctccttctccctcaccctgctgcccagtcaggccagcctgcgtggccgtctcctcctctactgggaccctgaggaagaacgacgagggggtgacctgcgccggggcgggggtaggggagaacgcgcctccggcaaagggggtggctcgtcctgtcacacgcaggagaaacctagcgagcggaccgtggctcagtggactagctacgacttgccacgactctgagctgcagtccgaggtgtcttgatccgctaacctcctcccagaccccgaggacctttctgctaggagaagagcgggcgcgccacccccaccgacctctcggagacaggaatccgctctgcccctgcatcctcctctgctcacccttctctcagtagtgtgggttatttttcccgttatgcatgtgcacctttcccaccagacccaagtggattgtcgacatcaaaaacaccgggtggctttgcatacacctccccccagccagacctgtggggtattcacctgatacacaacaggtggccgggtgtacaccttttagcaatctgatccacgctatagtcgcctgataaaggtttgcctgcacgcacttcgcccaactagaaccgtgggacactcaccagataaaggactacctcgacaggaaactgggggctgaggggagggaggcttcatctgctgccctgagaccatggcactgagccttcagccccggaccagaggggttagctaggtagctcttcattctgaaggaaagaagtcacacaagattggcattgttttgtctttttgttttttgtttttttctctcttaaaaaatatattcacctattggtgatgcactttctaggacagtcggcttgaattctgagtagaagtattcttagttggggctttttgtgtggtgtgaatcaaggttattgaaatgtgttatttttcaagttatcttttgtattgcagtcaaaagtagctagcgtaagaggaagattttgcgaggttccccccactttttttgttcttaaaaagaacaaaatgcatcctccagaaaccaccaccaagatggcttcagttcggttcatggtgacaccgacaaagatcgatgacattccaggtttgtcagacaccagtccggacctcagctctcgatctagttcccgagtaagatttagctcccgggaaagcgtgcctgaaacaagccggagtgagcctatgagtgagatgtctggggccaccacttcgctggcaactgttgcactggatccacccagtgaccggacttctcacccccaggatgtcatcgaggacctgagtcagaactccatcacaggggaacacagccaactgttagacgacggacataagaaagctcgaaatgcttatctcaataattccaattatgaagaaggagatgaatattttgataaaaatttggcactctttgaggaagaaatggacaccagaccgaaggtgtcttccctcctcaaccgcatggccaattacactaatctgactcaaggagcaaaggaacatgaagaggcagaaaacatcactgaagggaaaaagaagcccaccaagaccccccaaatgggtaccttcatgggtgtctacctcccatgtctacaaaatatttttggagtgatcctttttttacgccttacatgggtggtgggcacagctggagttcttcaggcttttgcaattgtccttatctgctgctgctgtacaatgttgactgctatctccatgagtgccattgccactaatggagtggtgccagctgggggctcatactttatgatttcccgggcactgggcccagagtttggtggggctgttggcctctgcttttatcttggtaccacatttgcagcagccatgtacatccttggtgccattgaaatctttctggtctatatcgtcccccgagctgccatctttcacagtgatgacgcactcaaggaatcagcagccatgctaaataacatgcgtgtctacggcacagctttcttggtccttatggtattagtggtatttatcggcgtacgctatgtgaacaagtttgcctcacttttcctggcctgtgtcattgtgtccatcttggccatctatgctggagccatcaagtcttcttttgctcctccacacttcccggtctgcatgctgggtaaccgcaccctttcatcaagacacattgacgtttgctctaagaccaaggaaattaacaacatgacagtcccatcaaagttatggggattcttctgtaactcgagtcaatttttcaatgccacctgtgatgaatactttgttcacaataacgtcacttcaatccagggcattcctggattggctagtggtataattacagagaatctttggagtaattacctacccaagggagagatcatcgaaaagccttcagccaaatcttctgatgtcttaggcagcttaaaccatgaatatgttcttgttgacatcaccacctccttcacgcttctggtgggaatcttctttccctctgttacaggtatcatggctggatcaaacagatctggagatctgaaagatgctcagaagtctattccgattggtactatccttgccatcctgaccacctcctttgtttatttaagcaatgttgtcctttttggtgcatgtattgaaggggttgttctcagagacaagttcggtgatgctgtgaaaggtaatttggtggtaggcaccttatcttggccatccccatgggtgattgttattggctccttcttttcaacatgtggggctggacttcagagcctcacaggtgcaccgaggctgctacaagctattgccaaggataacatcataccgtttctgagggtttttggccacagcaaagccaatggggaacctacctgggctttacttctaactgctgccattgcagagcttggaatactcattgcctccctggatcttgtggccccaattctttccatgttttttctcatgtgttacctctttgtaaacttggcatgtgccttgcaaacattacttcgaacacccaactggagaccccgattccgctactaccattgggccctttctttcatgggaatgagtatctgtctggctctgatgttcatttcttcctggtattatgccattgtagccatggtaatagctggtatgatctacaagtacattgaataccaaggagctgagaaagaatggggtgatggtatccgtgggctgtccctcagtgcagcccggtttgctttgcttcgattggaggaaggacctccacacactaaaaactggaggcctcagttgcttgtattactgaaactagatgaagacttacatgtcaagcatcctcgcctcctcacctttgcctcacagctcaaagcaggaaaaggtctcactattgtgggctctgtcatcgtggggaacttcctagagaactacggtgaagctttagctgctgagcagaccataaagcacctaatggaggcagagaaggtaaaaggattctgccagctggtggtggccgccaagctgagagagggcatttcccacctcatccagtcatgtggccttgggggcatgaagcacaacacggtggtgatgggctggcctaatggctggcgtcaaagcgaagatgcccgcgcttggaagacttttattgcaatgtggagcaattttctgagggcaacattgatgtgtggtggattgtgcatgatggggggatgcttatgctactaccattcctactgaaacagcacaaggtgtggcgaaagtgcagcatacggatcttcacagtagcccaattagaagacaacagtatccaaatgaagaaggacctagccaccttcctatatcacttacgcattgaggcggaggtagaagtggtggagatggtgagaaagctgagtttgagatacaagagcatgacagtgatatatcagcatatacttacgagcgcactttgatgatggaacaaaggtcccagatgctccggcacatgcggctatccaaaacagagcgagacagagaggcacaattggtgaaagaccgaaactcaatgctacgattgaccagcattggctctgatgaggacgaagagacagaaacctatcaggagaaggtgcacatgacttggacaaaagacaagtacatggcatcccggggacaaaaagcgaagtcaatggaaggattccaggacctgcttaacatgcgtccggaccagtccaatgtgaggcggatgcatacagcagtgaaactcaacgaggttatagttaacaagtcccatgaagcaaagctggttttattgaatatgccagggccaccccgaaaccctgagggtgatgaaaactacatggagttcctagaggtgcttaccgagggactagagcgagtcctacttgtccggggtggtggcagtgaagtgatcaccatttattcataacctactctgaatgaccgtgcttgacctgttttcttaaaaggcctacgtcctccatggaagtgccagctcattactaccactcccactcaactagaagcctgtgttctgtacacatcatactgaactcttgatgagctgagcctcaagtacctgtgtaaaagagctcccatctgatctgcagtcattacagaaaaagcaaatattccctcaacatcagaacaatgctcaagtctttcaagccacgtctgagcagtcaaaggcaaattagaattaacaagctgagccaataaatgaattggtaaaagggatgctagaaattcaactgaagaaaaaaagcaagtcaagtacgtattcagcattaaagatgaatctcagaagtcatggttcaatgttgacactgtgaggataacaactagagacagcttcatcttactaaagaatttatggtcaagtatatttggacctattatcctcggcaagccaagatgcaaacattttttagctatatttctttagtatacccactgctgtaattttatattaggatactaacttgaaacatggctgcagcctctacttcttcaaaaacatccccccaaaataccagatttaaatatc

SEQ ID NO: 182838 - DNA, 4239 bp, Homo sapiens
  Payload ID: 16023
  Gene Symbol: SLC12A6
  Gene Name: solute carrier family 12 (potassium/chloride transporter), member 6
  Uniprot ID: Q9UHW9
  ENST ID: ENST00000560611
  CDS Start-End: 165-3617
tgagtagaagtattcttagttggggctttttgtgtggtgtgaatcaaggttattgaaatgtgttatttttcaagttatcttttgtattgcagtcaaaagtagctagcgtaagaggaagattttgcgaggttccccccactttttttgttcttaaaaagaacaaaatgcatcctccagaaaccaccaccaagatggcttcagttcggttcatggtgacaccgacaaagatcgatgacattccaggtttgtcagacaccagtccggacctcagctctcgatctagttcccgagtaagatttagctcccgggaaagcgtgcctgaaacaagccggagtgagcctatgagtgagatgtctggggccaccacttcgctggcaactgttgcactggatccacccagtgaccggacttctcacccccaggatgtcatcgaggacctgagtcagaactccatcacaggggaacacagccaactgttagacgacggacataagaaagctcgaaatgcttatctcaataattccaattatgaagaaggagatgaatattttgataaaaatttggcactctttgaggaagaaatggacaccagaccgaaggtgtcttccctcctcaaccgcatggccaattacactaatctgactcaaggagcaaaggaacatgaagaggcagaaaacatcactgaagggaaaaagaagcccaccaagaccccccaaatgggtaccttcatgggtgtctacctcccatgtctacaaaatatttttggagtgatcctttttttacgccttacatgggtggtgggcacagctggagttcttcaggcttttgcaattgtccttatctgctgctgctgtacaatgttgactgctatctccatgagtgccattgccactaatggagtggtgccagctgggggctcatactttatgatttcccgggcactgggcccagagtttggtggggctgttggcctctgcttttatcttggtaccacatttgcagcagccatgtacatccttggtgccattgaaatctttctggtctatatcgtcccccgagctgccatctttcacagtgatgacgcactcaaggaatcagcagccatgctaaataacatgcgtgtctacggcacagctttcttggtccttatggtattagtggtatttatcggcgtacgctatgtgaacaagtttgcctcacttttcctggcctgtgtcattgtgtccatcttggccatctatgctggagccatcaagtcttcttttgctcctccacacttcccggtctgcatgctgggtaaccgcaccctttcatcaagacacattgacgtttgctctaagaccaaggaaattaacaacatgacagtcccatcaaagttatggggattcttctgtaactcgagtcaatttttcaatgccacctgtgatgaatactttgttcacaataacgtcacttcaatccagggcattcctggattggctagtggtataattacagagaatctttggagtaattacctacccaagggagagatcatcgaaaagccttcagccaaatcttctgatgtcttaggcagcttaaaccatgaatatgttcttgttgacatcaccacctccttcacgcttctggtgggaatcttctttccctctgttacaggtatcatggctggatcaaacagatctggagatctgaaagatgctcagaagtctattccgattggtactatccttgccatcctgaccacctcctttgtttatttaagcaatgttgtcctttttggtgcatgtattgaaggggttgttctcagagacaagttcggtgatgctgtgaaaggtaatttggtggtaggcaccttatcttggccatccccatgggtgattgttattggctccttcttttcaacatgtggggctggacttcagagcctcacaggtgcaccgaggctgctacaagctattgccaaggataacatcataccgtttctgagggtttttggccacagcaaagccaatggggaacctacctgggctttacttctaactgctgccattgcagagcttggaatactcattgcctccctggatcttgtggccccaattctttccatgttttttctcatgtgttacctctttgtaaacttggcatgtgccttgcaaacattacttcgaacacccaactggagaccccgattccgctactaccattgggccctttctttcatgggaatgagtatctgtctggctctgatgttcatttcttcctggtattatgccattgtagccatggtaatagctggtatgatctacaagtacattgaataccaaggagctgagaaagaatggggtgatggtatccgtgggctgtccctcagtgcagcccggtttgctttgcttcgattggaggaaggacctccacacactaaaaactggaggcctcagttgcttgtattactgaaactagatgaagacttacatgtcaagcatcctcgcctcctcacctttgcctcacagctcaaagcaggaaaaggtctcactattgtgggctctgtcatcgtggggaacttcctagagaactacggtgaagctttagctgctgagcagaccataaagcacctaatggaggcagagaaggtaaaaggattctgccagctggtggtggccgccaagctgagagagggcatttcccacctcatccagtcatgtggccttgggggcatgaagcacaacacggtggtgatgggctggcctaatggctggcgtcaaagcgaagatgcccgcgcttggaagacttttattggcacagttcgagtgacaactgctgcccatcttgcactgctggtggctaaaaacatctccttctttcccagcaatgtggagcaattttctgagggcaacattgatgtgtggtggattgtgcatgatggggggatgcttatgctactaccattcctactgaaacagcacaaggtgtggcgaaagtgcagcatacggatcttcacagtagcccaattagaagacaacagtatccaaatgaagaaggacctagccaccttcctatatcacttacgcattgaggcggaggtagaagtggtggagatgcatgacagtgatatatcagcatatacttacgagcgcactttgatgatggaacaaaggtcccagatgctccggcacatgcggctatccaaaacagagcgagacagagaggcacaattggtgaaagaccgaaactcaatgctacgattgaccagcattggctctgatgaggacgaagagacagaaacctatcaggagaaggtgcacatgacttggacaaaagacaagtacatggcatcccggggacaaaaagcgaagtcaatggaaggattccaggacctgcttaacatgcgtccggaccagtccaatgtgaggcggatgcatacagcagtgaaactcaacgaggttatagttaacaagtcccatgaagcaaagctggttttattgaatatgccagggccaccccgaaaccctgagggtgatgaaaactacatggagttcctagaggtgcttaccgagggactagagcgagtcctacttgtccggggtggtggcagtgaagtgatcaccatttattcataacctactctgaatgaccgtgcttgacctgttttcttaaaaggcctacgtcctccatggaagtgccagctcattactaccactcccactcaactagaagcctgtgttctgtacacatcatactgaactcttgatgagctgagcctcaagtacctgtgtaaaagagctcccatctgatctgcagtcattacagaaaaagcaaatattccctcaacatcagaacaatgctcaagtctttcaagccacgtctgagcagtcaaaggcaaattagaattaacaagctgagccaataaatgaattggtaaaagggatgctagaaattcaactgaagaaaaaaagcaagtcaagtacgtattcagcattaaagatgaatctcagaagtcatggttcaatgttgacactgtgaggataacaactagagacagcttcatcttactaaagaatttatggtcaagtatatttggacctattatcctcggcaagccaagatgcaaacattttttagctatatttctttagtatacccactgctgtaattttatattaggatactaacttgaaacatggctgcagcctctacttcttcaaaaacatccccccaaaataccagatttaaatatccaaa

SEQ ID NO: 182839 - DNA, 5280 bp, Homo sapiens
  Payload ID: 16024
  Gene Symbol: SLC12A7
  Gene Name: solute carrier family 12 (potassium/chloride transporter), member 7
  Uniprot ID: Q9Y666
  ENST ID: ENST00000264930
  CDS Start-End: 45-3296
agcgcgggccgggccgggacggggactgtcggctgcaggcggccatgcccaccaacttcaccgtggtgcccgtggaggctcacgccgacggcggcggggacgagactgccgagcggacggaggctccgggcacccccgagggccccgagcccgagcgccccagcccgggagatggaaatccaagagaaaacagcccattcctcaacaatgtcgaggtggaacaagagagcttctttgaagggaagaacatggcacttttcgaggaggagatggacagtaaccccatggtgtcctcgctgctcaacaagctggccaactacaccaacctgagccagggcgtggtggagcacgaggaggacgaggagagccggcggcgggaggccaaggctccgcgcatgggcaccttcatcggcgtctacctgccgtgcctgcagaacatcctgggcgtcatcctcttcctgcgcctgacgtggatcgtgggggtggctggtgtcctggagtccttcctcatcgtggccatgtgctgcacatgtacaatgctgaccgccatttccatgagtgcgatcgctaccaacggtgtggtcccagctggcgggtcctactacatgatatcgcgctcgctgggacccgagtttggaggcgctgtcggcctctgcttctacctgggcacgacgtttgcaggggccatgtatattttggggaccatcgagatttttctgacgtacatctccccgggtgcggccatcttccaggcggaggctgcaggtggcgaggcggccgccatgctgcacaacatgcgtgtgtacggcacgtgcacgctcgtgctcatggccctggtggtcttcgtgggcgtcaagtatgtcaacaagctggcgctggtcttcctggcctgcgtcgtgctgtccatcctggccatctatgccggcgtcatcaagtctgccttcgaccccccggacatcccggtctgcctcctggggaaccgcacgctgtcacggcgcagcttcgatgcctgcgtcaaggcctacggcatccacaacaactcagccacctccgcgctctggggcctcttctgcaacggctcccagcccagcgccgcctgtgacgagtacttcatccagaacaacgtcaccgaaatccagggcatcccgggcgcggccagtggtgtcttcctggagaacctgtggagtacgtacgcgcacgcgggggcgtttgtggagaagaaaggtgtgccctcggtgcccgtggcagaggagagccgtgccagcgcactgccctacgtgctcaccgacatcgcggcctccttcaccctgctggttggcatctacttcccttccgtgaccggtatcatggcgggttcaaaccggtccggggacctcaaggatgcacagaagtccatccccacggggaccatcctggccatagtgacgacgtctttcatctatctctcctgcattgtgctgtttggggcctgcattgaaggcgtggtcttacgagataagttcggggaggccctgcaggggaacctggtcatcggcatgctggcctggccctccccctgggtcatcgtcatcggctccttcttctccacctgcggtgccggcctgcagagcctcacgggggcaccgcgcctactgcaggccattgcccgtgacggcatcgtccccttcctgcaggtgtttggccacgggaaggccaacggggagcccacgtgggcgctgctgctgacagtcctcatctgcgagactggcatcctcatcgcctctctggacagcgtggccccgatcctctccatgttcttcctcatgtgctacctgttcgtgaacctggcctgcgccgtgcagaccctgctacgtacccccaactggcgtccacgcttcaagttctaccactggaccctgtcctttctgggtatgagcctgtgcctggcgctgatgttcatctgctcctggtactacgcgctgtccgccatgctcatcgctggctgcatctacaagtacatcgagtaccgcggggccgagaaggagtggggcgatggcatccgtggcctatccctgaacgccgcccgctacgccctgctgcgcgtggagcacggtcccccccacaccaagaactggaggccccaggtgctggtgatgctgaacctggacgcggagcaggccgtgaagcacccccgcctgctgtccttcacgtcgcagctgaaggccggcaagggcctgaccatcgtgggctcggtgctggaggggacgtacctggacaagcacatggaggctcagcgggccgaggagaacatacggtccctaatgagcacagagaagaccaagggcttctgccagctggtggtctcgtccagcctgcgggatggcatgtcccacctgatccagtcggccggcctgggcggcctgaagcacaacacggtgctcatggcctggcccgcatcctggaagcaggaggacaaccccttctcctggaagaactttgtggacaccgtccgcgacaccaccgccgcgcaccaggctctgctggtggccaagaacgtcgactcgtttccgcaaaaccaggagcgcttcggcgggggccacatcgacgtgtggtggatcgtgcacgacggcggcatgctcatgctgctgcccttcctgctgcgccagcacaaggtgtggaggaagtgccggatgcgtatcttcaccgtggcccaggtggacgacaacagcatccagatgaagaaggacctgcagatgttcttgtaccacttgcgcatcagcgccgaggtggaggtggtggagatggttgaaaacgacatatctgctttcacctacgagaggacactaatgatggagcagaggtcgcagatgctgaagcagatgcagctgtccaagaacgagcaggagcgagaggcccagctgatccacgacaggaacaccgcgtcccacaccgcggcggcagccaggacccaagcgccgcctacgccagacaaggtgcagatgacctggaccagggagaagctgatcgctgagaagtacaggagcagagacaccagcctatctggtttcaaagacctcttcagcatgaagccggaccagtccaacgtcaggcggatgcacacggctgtgaagctcaatggcgtcgtcctcaacaagtcccaggatgcgcagctggtcctgctcaacatgccaggtcctcccaaaaaccggcagggagacgagaactacatggagtttcttgaagtcctgaccgaggggctgaacagagtcctcctggtcaggggtggcggccgggaggtgatcaccatctactcctaatgcccaacagcatcacggcactctgggacaggcacggaggacggcgtgggcagcctgggcctgggcttggcccagggaaacagacggcagacacacctgtcccccagtgatgccgcccaagctgcccatggggcttcctacggaagtttctaggcccgtcacctagggctctcctgttcagccttaacaggctcagcaaatcagggcgtggctggacgatttccttgcatctgagggcagacgctgctaccggagtgacctggacgtggccagatcttctcgcaggtcacaagaagccagtgagcccttgccttggtttctggaagttcttttccttggctggatttacccagtggttaggttgcatttctaccccatccagaacattcttggaagagcacccggagctgaagctgtccctgatgatgaaggtgaaacgtcagccctggccatggctccgctcagggccccggtcacctccgagtcactctgttccttgactgtctttgtgtttctgtacctcaaggcactgaagctggaggactctgtccatgcccgtgtcaccctcgtgtgggagcctctgggctcggcaggtccacatttcatgagctgaggcgtgggccagggccatctggaaagggaactcggcttttccagaacgtggtggatcatctgtcgggtgtgtggtgaacacgttcagttcatcagggcctacgctccgggaaggggcccccagctgtggctctgccatgccgggctgtgtttgcagctgtccgagtctccatccacctttagaaaaccagccacttcttttcataagcactgacagggcccagcccacagccacaggtgcgatcagtgcctcacgcaggcaaatgcactgaaacccaggggcacacgcgcgcagagtgaacagtgagttcccccgacagcccacgacagccaggactgccctccccaccccaccccaccccaggagcacggcacacagttcagcctctgagctggctcacacgtgccatccccaccccggtgctccagggaaggaggacacggacccgacgtgggaggtcctcaggcagcagtggcgcctggtgtcaggtctgtctggctgagtcccgggcgtcccctgccatggcctgtgccttgcatggaggcggcggtggcactgaagagatagctttcaagggcccaacactttgcacttcggctggctgtgagtttctgctttgtaggttgtggtcacatttgcaggctgcgggcagtggcaccgacttgggcctccctttctatgtggcatatttatttatttaaacaccccagggagttacgtggtaacaaggttgtccataaagaggttgcttctatatactagaggccccagatggccaggccttgggctacgtctggcttgcatggtctcccaagggaatcagccccatcaacaaagttcaaatcggggcagaggctgcacttgtgcccccagatgtttctgaggagccagactagggctggcattgctgtagagtgacggctgctgcccagagcgtgtcccagacatcacagcggggctcagcagttcccacagcctctgcctgccttggctaagcatgagttaagcagcaaaacgctcctccatgtctggatggggccggcaggtcctgtgtcccctgcacctggaggagagcaggctagaggcacagcggccacatggtgctggctctgaacgttggttggtggctggaaaacagccctgcttctgagggccgctcagttctgcacacgaaaccacctcctgagggctcagctctgcccccgccctgggctgcagcctctgcacgcaagcaccaggcatcctttgtgttgtcaactccgtgtaaccagtaactacagccatttacaattgactccgtttccttttgtaggtttccctgtctgtctgtgttagtagaaaaataaaatcctatgaaatctgagtacgttg

SEQ ID NO: 182840 - DNA, 1066 bp, Homo sapiens
  Payload ID: 16024
  Gene Symbol: SLC12A7
  Gene Name: solute carrier family 12 (potassium/chloride transporter), member 7
  ENST ID: ENST00000513223
  CDS Start-End: 1-1066
ggtactacgcgctgtccgccatgctcatcgctggctgcatctacaagtacatcgagtaccgcggggccgagaaggagtggggcgatggcatccgtggcctatccctgaacgccgcccgctacgccctgctgcgcgtggagcacggtcccccccacaccaagaactggaggccccaggtgctggtgatgctgaacctggacgcggagcaggccgtgaagcacccccgcctgctgtccttcacgtcgcagctgaaggccggcaagggcctgaccatcgtgggctcggtgctggaggggacgtacctggacaagcacatggaggctcagcgggccgaggagaacatacggtccctaatgagcacagagaagaccaagggcttctgccagctggtggtctcgtccagcctgcgggatggcatgtcccacctgatccagtcggccggcctgggcggcctgaagcacaacacggtgctcatggcctggcccgcatcctggaagcaggaggacaaccccttctcctggaagaactttgtggacaccgtccgcgacaccaccgccgcgcaccaggctctgctggtggccaagaacgtcgactcgtttccgcaaaaccaggagcgcttcggcgggggccacatcgacgtgtggtggatcgtgcacgacggcggcatgctcatgctgctgcccttcctgctgcgccagcacaaggtgtggaggaagtgccggatgcgtatcttcaccgtggcccaggtggacgacaacagcatccagatgaagaaggacctgcagatgttcttgtaccacttgcgcatcagcgccgaggtggaggtggtggagatggttgaaaacgacatatctgctttcacctacgagaggacactaatgatggagcagaggtcgcagatgctgaagcagatgcagctgtccaagaacgagcaggagcgagaggcccagctgatccacgacaggaacaccgcgtcccacaccgcggcggcagccaggacccaagcgccgcctacgccagacaaggtgcagatgacctggaccagggagaagctgatcgctgagaa

SEQ ID NO: 182841 - DNA, 5280 bp, Homo sapiens
  Payload ID: 16024
  Gene Symbol: SLC12A7
  Gene Name: solute carrier family 12 (potassium/chloride transporter), member 7
  ENST ID: ENST00000611005
  CDS Start-End: 45-3296
agcgcgggccgggccgggacggggactgtcggctgcaggcggccatgcccaccaacttcaccgtggtgcccgtggaggctcacgccgacggcggcggggacgagactgccgagcggacggaggctccgggcacccccgagggccccgagcccgagcgccccagcccgggagatggaaatccaagagaaaacagcccattcctcaacaatgtcgaggtggaacaagagagcttctttgaagggaagaacatggcacttttcgaggaggagatggacagtaaccccatggtgtcctcgctgctcaacaagctggccaactacaccaacctgagccagggcgtggtggagcacgaggaggacgaggagagccggcggcgggaggccaaggctccgcgcatgggcaccttcatcggcgtctacctgccgtgcctgcagaacatcctgggcgtcatcctcttcctgcgcctgacgtggatcgtgggggtggctggtgtcctggagtccttcctcatcgtggccatgtgctgcacatgtacaatgctgaccgccatttccatgagtgcgatcgctaccaacggtgtggtcccagctggcgggtcctactacatgatatcgcgctcgctgggacccgagtttggaggcgctgtcggcctctgcttctacctgggcacgacgtttgcaggggccatgtatattttggggaccatcgagatttttctgacgtacatctccccgggtgcggccatcttccaggcggaggctgcaggtggcgaggcggccgccatgctgcacaacatgcgtgtgtacggcacgtgcacgctcgtgctcatggccctggtggtcttcgtgggcgtcaagtatgtcaacaagctggcgctggtcttcctggcctgcgtcgtgctgtccatcctggccatctatgccggcgtcatcaagtctgccttcgaccccccggacatcccggtctgcctcctggggaaccgcacgctgtcacggcgcagcttcgatgcctgcgtcaaggcctacggcatccacaacaactcagccacctccgcgctctggggcctcttctgcaacggctcccagcccagcgccgcctgtgacgagtacttcatccagaacaacgtcaccgaaatccagggcatcccgggcgcggccagtggtgtcttcctggagaacctgtggagtacgtacgcgcacgcgggggcgtttgtggagaagaaaggtgtgccctcggtgcccgtggcagaggagagccgtgccagcacactgccctacgtgctcaccgacatcgcggcctccttcaccctgctggttggcatctacttcccttccgtgaccggtatcatggcgggttcaaaccggtccggggacctcaaggatgcacagaagtccatccccacggggaccatcctggccatagtgacgacgtctttcatctatctctcctgcattgtgctgtttggggcctgcattgaaggcgtggtcttacgagataagttcggggaggccctgcaggggaacctggtcatcggcatgctggcctggccctccccctgggtcatcgtcatcggctccttcttctccacctgcggtgccggcctgcagagcctcacgggggcaccgcgcctactgcaggccattgcccgtgacggcatcgtccccttcctgcaggtgtttggccacgggaaggccaacggggagcccacgtgggcgctgctgctgacagtcctcatctgcgagactggcatcctcatcgcctctctggacagcgtggccccgatcctctccatgttcttcctcatgtgctacctgttcgtgaacctggcctgcgccgtgcagaccctgctacgtacccccaactggcgtccacgcttcaagttctaccactggaccctgtcctttctgggtatgagcctgtgcctggcgctgatgttcatctgctcctggtactacgcgctgtccgccatgctcatcgctggctgcatctacaagtacatcgagtaccgcggggccgagaaggagtggggcgatggcatccgtggcctatccctgaacgccgcccgctacgccctgctgcgcgtggagcacggtcccccccacaccaagaactggaggccccaggtgctggtgatgctgaacctggacgcggagcaggccgtgaagcacccccgcctgctgtccttcacgtcgcagctgaaggccggcaagggcctgaccatcgtgggctcggtgctggaggggacgtacctggacaagcacatggaggctcagcgggccgaggagaacatacggtccctaatgagcacagagaagaccaagggcttctgccagctggtggtctcgtccagcctgcgggatggcatgtcccacctgatccagtcggccggcctgggcggcctgaagcacaacacggtgctcatggcctggcccgcatcctggaagcaggaggacaaccccttctcctggaagaactttgtggacaccgtccgcgacaccaccgccgcgcaccaggctctgctggtggccaagaacgtcgactcgtttccgcaaaaccaggagcgcttcggcgggggccacatcgacgtgtggtggatcgtgcacgacggcggcatgctcatgctgctgcccttcctgctgcgccagcacaaggtgtggaggaagtgccggatgcgtatcttcaccgtggcccaggtggacgacaacagcatccagatgaagaaggacctgcagatgttcttgtatcacttgcgcatcagcgccgaggtggaggtggtggagatggttgaaaacgacatatctgctttcacctacgagaggacactaatgatggagcagaggtcgcagatgctgaagcagatgcagctgtccaagaacgagcaggagcgagaggcccagctgatccacgacaggaacaccgcgtcccacaccgcggcggcagccaggacccaagcgccgcctacgccagacaaggtgcagatgacctggaccagggagaagctgatcgctgagaagtacaggagcagagacaccagcctatccggtttcaaagacctcttcagcatgaagccggaccagtccaacgtcaggcggatgcacacggctgtgaagctcaatggcgtcgtcctcaacaagtcccaggatgcgcagctggtcctgctcaacatgccaggtcctcccaaaaaccggcagggagacgagaactacatggagtttcttgaagtcctgaccgaggggctgaacagagtcctcctggtcaggggtggcggccgggaggtgatcaccatctactcctaatgcccaacagcatcacggcactctgggacaggcacggaggacggcgtgggcagcctgggcctgggcttggcccagggaaacagacggcagacacacctgtcccccagtgatgccgcccaagctgcccatggggcttcctacggaagtttctaggcccgtcacctagggctctcctgttcagccttaacaggctcagcaaatcagggcgtggctggacgatttccttgcatctgagggcagacgctgctaccggagtgacctggacgtggccagatcttctcgcaggtcacaagaagccagtgagcccttgccttggtttctggaagttcttttccttggctggatttacccagtggttaggttgcatttctaccccatccagaacattcttggaagagcacccggagctgaagctgtccctgatgatgaaggtgaaacgtcagccctggccatggctccgctcagggccccggtcacctccgagtcactctgttccttgactgtctttgtgtttctgtacctcaaggcactgaagctggaggactctgtccatgcccgtgtcaccctcgtgtgggagcctctgggctcggcaggtccacatttcatgagctgaggcgtgggccagggccatctggaaagggaactcggcttttccagaacgtggtggatcatctgtcgggtgtgtggtgaacacgttcagttcatcagggcctacgctccgggaaggggcccccagctgtggctctgccatgccgggctgtgtttgcagctgtccgagtctccatccgcctttagaaaaccagccacttcttttcataagcactgacagggcccagcccacagccacaggtgcgatcagtgcctcacgcaggcaaatgcactgaaacccaggggcacacgcgcgcagagtgaacagtgagttcccccgacagcccacgacagccaggactgccctccccaccccaccccaccccaggagcacggcacacagttcagcctctgagctggctcacacgtgccatccccaccccggtgctccagggaaggaggacacggacccgacgtgggaggtcctcaggcagcagtggcgcctggtgtcaggtctgtctggctgagtcccgggcgtcccctgccatggcctgtgccttgcatggaggcggcggtggcactgaagagatagctttcaagggcccaacactttgcacttcggctggctgtgagtttctgctttgtaggttgtggtcacatttgcaggctgcgggcagtggcgccgacttgggcctccctttctatgtggcatatttatttatttaaacaccccagggagttacgtggtaacaaggttgtccataaagaggttgcttctatatactagaggccccagatggccaggccttgggctacgtctggcttgcatggtctcccaagggaatcagccccatcaacaaagttcaaatcggggcagaggctgcacttgtgcccccagatgtttctgaggagccagactagggctggcattgctgtagagtgacggctgctgcccagagcgtgtcccagacatcacagcggggctcagcagttcccacagcctctgcctgccttggctaagcatgagttaagcagcaaaacgctcctccatgtctggatggggccggcaggtcctgtgtcccctgcacctggaggagagcaggctagaggcacagcggccacatggtgctggctctgaacgttggttggtggctggaaaacagccctgcttctgagggccgctcagttctgcacacgaaaccacctcctgagggctcagctctgcccccgccctgggctgcagcctctgcacgcaagcaccaggcatcctttgtgttgtcaactccgtgtaaccagtaactacagccatttacaattgactccgtttccttttgtaggtttccctgtctgtctgtgttagtagaaaaataaaatcctatgaaatctgagtacgttg

SEQ ID NO: 182842 - DNA, 1041 bp, Homo sapiens
  Payload ID: 16024
  Gene Symbol: SLC12A7
  Gene Name: solute carrier family 12 (potassium/chloride transporter), member 7
  ENST ID: ENST00000628680
  CDS Start-End: 1-1041
ggtacgcggctggacaaaccccgacttcctttcccacagggccgagaaggagtggggcgatggcatccgtggcctatccctgaacgccgcccgctacgccctgctgcgcgtggagcacggtcccccccacaccaagaactggaggccccaggtgctggtgatgctgaacctggacgcggagcaggccgtgaagcacccccgcctgctgtccttcacgtcgcagctgaaggccggcaagggcctgaccatcgtgggctcggtgctggaggggacgtacctggacaagcacatggaggctcagcgggccgaggagaacatacggtccctaatgagcacagagaagaccaagggcttctgccagctggtggtctcgtccagcctgcgggatggcatgtcccacctgatccagtcggccggcctgggcggcctgaagcacaacacggtgctcatggcctggcccgcatcctggaagcaggaggacaaccccttctcctggaagaactttgtggacaccgtccgcgacaccaccgccgcgcaccaggctctgctggtggccaagaacgtcgactcgtttccgcaaaaccaggagcgcttcggcgggggccacatcgacgtgtggtggatcgtgcacgacggcggcatgctcatgctgctgcccttcctgctgcgccagcacaaggtgtggaggaagtgccggatgcgtatcttcaccgtggcccaggtggacgacaacagcatccagatgaagaaggacctgcagatgttcttgtatcacttgcgcatcagcgccgaggtggaggtggtggagatggttgaaaacgacatatctgctttcacctacgagaggacactaatgatggagcagaggtcgcagatgctgaagcagatgcagctgtccaagaacgagcaggagcgagaggcccagctgatccacgacaggaacaccgcgtcccacaccgcggcggcagccaggacccaagcgccgcctacgccagacaaggtgcagatgacctggaccagggagaagctgatcgctgagaa

SEQ ID NO: 182843 - DNA, 680 bp, Homo sapiens
  Payload ID: 16024
  Gene Symbol: SLC12A7
  Gene Name: solute carrier family 12 (potassium/chloride transporter), member 7
  ENST ID: ENST00000504576
  CDS Start-End: 1-192
cccacgtgggcgctgctgctgacagtcctcatctgcgagactggcatcctcatcgcctctctggacagcgtggccccgatcctctccatgttcttcctcatgtgctacctgttcgtgaacctggcctgcgccgtgcagaccctgctacgtacccccaactggcgtccacgcttcaagttctaccactggtgaggccactcagcacgggcgtgaggagccccacaggctgggacactgggtgcctctgccactggtgaggccgctcagcacaggcgtcaggagccccacaggctgggacactgggtgcctctacaaggccagctgctctgggcctgaagaccccagcgcgtccttgactgttcctttgcggagtaagcccctgcgcagctgatgagactgcacctgaggaaggcctctggttacgaggatgcccaggaccctgtcctttctgggtatgagcctgtgcctggcgctgatgttcatctgctcctggtactacgcgctgtccgccatgctcatcgctggctgcatctacaagtacatcgagtaccgcggggccgagaaggagtggggcgatggcatccgtggcctatccctgaacgccgcccgctacgccctgctgcgcgtggagcacggtcccccccacaccaagaactggaggccccaggtgctggtgatgc

SEQ ID NO: 182844 - DNA, 3142 bp, Homo sapiens
  Payload ID: 16024
  Gene Symbol: SLC12A7
  Gene Name: solute carrier family 12 (potassium/chloride transporter), member 7
  ENST ID: ENST00000634447
  CDS Start-End: 1-2968
ggagcacgaggaggacgaggagagccggcggcgggaggccaaggctccgcgcatgggcaccttcatcggcgtctacctgccgtgcctgcagaacatcctgggcgtcatcctcttcctgcgcctgacgtggatcgtgggggtggctggtgtcctggagtccttcctcatcgtggccatgtgctgcacatgtacaatgctgaccgccatttccatgagtgcgatcgctaccaacggtgtggtcccagctggcgggtcctactacatgatatcgcgctcgctgggacccgagtttggaggcgctgtcggcctctgcttctacctgggcacgacgtttgcaggggccatgtatattttggggaccatcgagatttttctgacgtacatctccccgggtgcggccatcttccaggcggaggctgcaggtggcgaggcggccgccatgctgcacaacatgcgtgtgtacggcacgtgcacgctcgtgctcatggccctggtggtcttcgtgggcgtcaagtatgtcaacaagctggcgctggtcttcctggcctgcgtcgtgctgtccatcctggccatctatgccggcgtcatcaagtctgccttcgaccccccggacatcccggtctgcctcctggggaaccgcacgctgtcacggcgcagcttcgatgcctgcgtcaaggcctacggcatccacaacaactcagccacctccgcgctctggggcctcttctgcaacggctcccagcccagcgccgcctgtgacgagtacttcatccagaacaacgtcaccgaaatccagggcatcccgggcgcggccagtggtgtcttcctggagaacctgtggagtacgtacgcgcacgcgggggcgtttgtggagaagaaaggtgtgccctcggtgcccgtggcagaggagagccgtgccagcgcactgccctacgtgctcaccgacatcgcggcctccttcaccctgctggttggcatctacttcccttccgtgaccggtatcatggcgggttcaaaccggtccggggacctcaaggatgcacagaagtccatccccacggggaccatcctggccatagtgacgacgtctttcatctatctctcctgcattgtgctgtttggggcctgcattgaaggcgtggtcttacgagataagttcggggaggccctgcaggggaacctggtcatcggcatgctggcctggccctccccctgggtcatcgtcatcggctccttcttctccacctgcggtgccggcctgcagagcctcacgggggcaccgcgcctactgcaggccattgcccgtgacggcatcgtccccttcctgcaggtgtttggccacgggaaggccaacggggagcccacgtgggcgctgctgctgacagtcctcatctgcgagactggcatcctcatcgcctctctggacagcgtggccccgatcctctccatgttcttcctcatgtgctacctgttcgtgaacctggcctgcgccgtgcagaccctgctacgtacccccaactggcgtccacgcttcaagttctaccactggaccctgtcctttctgggtatgagcctgtgcctggcgctgatgttcatctgctcctggtactacgcgctgtccgccatgctcatcgctggctgcatctacaagtacatcgagtaccgcggggccgagaaggagtggggcgatggcatccgtggcctatccctgaacgccgcccgctacgccctgctgcgcgtggagcacggtcccccccacaccaagaactggaggccccaggtgctggtgatgctgaacctggacgcggagcaggccgtgaagcacccccgcctgctgtccttcacgtcgcagctgaaggccggcaagggcctgaccatcgtgggctcggtgctggaggggacgtacctggacaagcacatggaggctcagcgggccgaggagaacatacggtccctaatgagcacagagaagaccaagggcttctgccagctggtggtctcgtccagcctgcgggatggcatgtcccacctgatccagtcggccggcctgggcggcctgaagcacaacacggtgctcatggcctggcccgcatcctggaagcaggaggacaaccccttctcctggaagaactttgtggacaccgtccgcgacaccaccgccgcgcaccaggctctgctggtggccaagaacgtcgactcgtttccgcaaaaccaggagcgcttcggcgggggccacatcgacgtgtggtggatcgtgcacgacggcggcatgctcatgctgctgcccttcctgctgcgccagcacaaggtgtggaggaagtgccggatgcgtatcttcaccgtggcccaggtggacgacaacagcatccagatgaagaaggacctgcagatgttcttgtaccacttgcgcatcagcgccgaggtggaggtggtggagatggttgaaaacgacatatctgctttcacctacgagaggacactaatgatggagcagaggtcgcagatgctgaagcagatgcagctgtccaagaacgagcaggagcgagaggcccagctgatccacgacaggaacaccgcgtcccacaccgcggcggcagccaggacccaagcgccgcctacgccagacaaggtgcagatgacctggaccagggagaagctgatcgctgagaagtacaggagcagagacaccagcctatctggtttcaaagacctcttcagcatgaagccagaatggggaaacctggaccagtccaacgtcaggcggatgcacacggctgtgaagctcaatggcgtcgtcctcaacaagtcccaggatgcgcagctggtcctgctcaacatgccaggtcctcccaaaaaccggcagggagacgagaactacatggagtttcttgaagtcctgaccgaggggctgaacagagtcctcctggtcaggggtggcggccgggaggtgatcaccatctactcctaatgcccaacagcatcacggcactctgggacaggcacggaggacggcgtgggcagcctgggcctgggcttggcccagggaaacagacggcagacacacctgtcccccagtgatgccgcccaagctgcccatggggcttcctacggaagtttctaggcccgtcacctagggctctcc

SEQ ID NO: 182845 - DNA, 4208 bp, Homo sapiens
  Payload ID: 16025
  Gene Symbol: SLC12A3
  Gene Name: solute carrier family 12 (sodium/chloride transporter), member 3
  ENST ID: ENST00000262502
  CDS Start-End: 26-3088
cccctccctggacacccaggcgacaatggcagaactgcccacaacagagacgcctggggacgccactttgtgcagcgggcgcttcaccatcagcacactgctgagcagtgatgagccctctccaccagctgcctatgacagcagccaccccagccacctgacccacagcagcaccttctgcatgcgcacctttggctacaacacgatcgatgtggtgcccacatatgagcactatgccaacagcacccagcctggtgagccccggaaggtccggcccacactggctgacctgcactccttcctcaaggaaggcagacacctgcatgccctggcctttgacagccggcccagccacgagatgactgatgggctggtggagggcgaggcaggcaccagcagcgagaagaaccccgaggagccagtgcgcttcggctgggtcaagggggtgatgattcgttgcatgctcaacatttggggcgtgatcctctacctgcggctgccctggattacggcccaggcaggcatcgtcctgacctggatcatcatcctgctgtcggtcacggtgacctccatcacaggcctctccatctcagccatctccaccaatggcaaggtcaagtcaggtggcacctacttcctcatctcccggagtctgggcccagagcttgggggctccatcggcctcattttcgctttcgccaatgccgtgggtgtggccatgcacacggtgggctttgcagagaccgtgcgggacctgctccaggagtatggggcacccatcgtggaccccattaacgacatccgcatcattgccgtggtctcggtcactgtgctgctggccatctccctggctggcatggagtgggagtccaaggcccaggtgctgttcttccttgtcatcatggtctcctttgccaactatttagtggggacgctgatccccccatctgaggacaaggcctccaaaggcttcttcagctaccgggcggacatttttgtccagaacttggtgcctgactggcggggtccagatggcaccttcttcggaatgttctccatcttcttcccctcggccacaggcatcctggcaggggccaacatatctggtgacctcaaggaccctgctatagccatccccaaggggaccctcatggccattttctggacgaccatttcctacctggccatctcagccaccattggctcctgcgtggtgcgtgatgcctctggggtcctgaatgacacagtgacccctggctggggtgcctgcgaggggctggcctgcagctatggctggaacttcaccgagtgcacccagcagcacagctgccactacggcctcatcaactattaccagaccatgagcatggtgtcaggcttcgcgcccctgatcacggctggcatcttcggggccaccctctcctctgccctggcctgccttgtctctgctgccaaagtcttccagtgcctttgcgaggaccagctgtacccactgatcggcttcttcggcaaaggctatggcaagaacaaggagcccgtgcgtggctacctgctggcctacgccatcgctgtggccttcatcatcatcgctgagctcaacaccatagcccccatcatttccaacttcttcctctgctcctatgccctcatcaacttcagctgcttccacgcctccatcaccaactcgcctgggtggagaccttcattccaatactacaacaagtgggcggcgctgtttggggctatcatctccgtggtcatcatgttcctcctcacctggtgggcggccctcatcgccattggcgtggtgctcttcctcctgctctatgtcatctacaagaagccagaggtaaattggggctcctcggtacaggctggctcctacaacctggccctcagctactcggtgggcctcaatgaggtggaagaccacatcaagaactaccgcccccagtgcctggtgctcacggggccccccaacttccgcccggccctggtggactttgtgggcaccttcacccggaacctcagcctgatgatctgtggccacgtgctcatcggaccccacaagcagaggatgcctgagctccagctcatcgccaacgggcacaccaagtggctgaacaagaggaagatcaaggccttctactcggatgtcattgccgaggacctccgcagaggcgtccagatcctcatgcaggccgcaggtctcgggagaatgaagcccaacattctggtggttgggttcaagaagaactggcagtcggctcacccggccacagtggaagactacattggcatcctccatgatgcctttgatttcaactatggcgtgtgtgtcatgaggatgcgggagggactcaacgtgtccaagatgatgcaggcgcacattaaccccgtgtttgacccagcggaggacgggaaggaagccagcgccagagtggaccccaaggccctggtgaaggaggagcaggccaccaccatcttccagtcggagcagggcaagaagaccatagacatctactggctctttgacgatggaggcctcaccctcctcattccctatctccttggccgcaagaggaggtggagcaaatgcaagatccgtgtgttcgtaggcggccagattaacaggatggaccaggagagaaaggcgatcatttctctgctgagcaagttccgactgggattccatgaagtccacatcctccctgacatcaaccagaaccctcgggctgagcacaccaagaggtttgaggacatgattgcacccttccgtctgaatgatggcttcaaggatgaggccactgtcaacgagatgcggcgggactgcccctggaagatctcagatgaggagattacgaagaacagagtcaagtcccttcggcaggtgaggctgaatgagattgtgctggattactcccgagacgctgctctcatcgtcatcactttgcccatagggaggaaggggaagtgccccagctcgctgtacatggcctggctggagaccctgtcccaggacctcagacctccagtcatcctgatccgaggaaaccaggaaaacgtgctcaccttttactgccagtaactccaggctttgacatccctgtccacagctctgagtgtgtgggataagttggaacttgattgcctctagtccacagggatgagactcatgttctgttgcactttaagtggcagcatctgatgatctcaccgaaaaagatggtagatttccaaatctggctggactccacttccatgggacacattccctgggtcttgtgtttataggctagagaaatagcagatggagctgcaaggaaaactctctaaagcatcctattccttttaaaggatttcttttgattttgatgaccattaattaagagttcagtctttgatttgtatgcaaattggagtcccaatgctgggcgtgaatcttgacagtttctacagaccttcctgggtgaaagttcctaaatcatgccctgcttcctccaataggagaatgggagcctcacctgtaggacctacaggctctctaaggaatgcaggtctctctctgagcctccacagccaggcaaatacatatatatatattttttttttagatgaagttttttctcttgttgcccaggctagggtgtaatggcatgatctcaggtcactgcaacctcctcccgggttcaagcatttcttctgtctcagcctcccgaatagctgggattacaggcacctgccatcacacgagctaatttttgtatttttagtagagatggggtttcaccatgttgaccaggctggtgttgagctcctgacctcaggtgatccacccacctcggtctcccaaagtgctggggttacaggcctgagccactgcgcccggcccaggcaaatttcttgaaccacttctcactcccgtcactttcaataaggggtctttgatgtcttcactggttctttggacgagggacttttcgaacttttttggttgcaacacacagtaagaaatatacttcacactgagacttgcagcgcacacacacggaaacgaccaaaacaaaaatgtcacaaaacaatacttacccttccctgggggacgtcctccagtatgttctgttctgtttatttttcactgttggttgcaatccaataaaatgactttgggatccactcatgggtggggacccacacatttgaaaggc

SEQ ID NO: 182846 - DNA, 5567 bp, Homo sapiens
  Payload ID: 16025
  Gene Symbol: SLC12A3
  Gene Name: solute carrier family 12 (sodium/chloride transporter), member 3
  Uniprot ID: P55017
  ENST ID: ENST00000438926
  CDS Start-End: 30-3122
ctggcccctccctggacacccaggcgacaatggcagaactgcccacaacagagacgcctggggacgccactttgtgcagcgggcgcttcaccatcagcacactgctgagcagtgatgagccctctccaccagctgcctatgacagcagccaccccagccacctgacccacagcagcaccttctgcatgcgcacctttggctacaacacgatcgatgtggtgcccacatatgagcactatgccaacagcacccagcctggtgagccccggaaggtccggcccacactggctgacctgcactccttcctcaagcaggaaggcagacacctgcatgccctggcctttgacagccggcccagccacgagatgactgatgggctggtggagggcgaggcaggcaccagcagcgagaagaaccccgaggagccagtgcgcttcggctgggtcaagggggtgatgattcgttgcatgctcaacatttggggcgtgatcctctacctgcggctgccctggattacggcccaggcaggcatcgtcctgacctggatcatcatcctgctgtcggtcacggtgacctccatcacaggcctctccatctcagccatctccaccaatggcaaggtcaagtcaggtggcacctacttcctcatctcccggagtctgggcccagagcttgggggctccatcggcctcattttcgctttcgccaatgccgtgggtgtggccatgcacacggtgggctttgcagagaccgtgcgggacctgctccaggagtatggggcacccatcgtggaccccattaacgacatccgcatcattgccgtggtctcggtcactgtgctgctggccatctccctggctggcatggagtgggagtccaaggcccaggtgctgttcttccttgtcatcatggtctcctttgccaactatttagtggggacgctgatccccccatctgaggacaaggcctccaaaggcttcttcagctaccgggcggacatttttgtccagaacttggtgcctgactggcggggtccagatggcaccttcttcggaatgttctccatcttcttcccctcggccacaggcatcctggcaggggccaacatatctggtgacctcaaggaccctgctatagccatccccaaggggaccctcatggccattttctggacgaccatttcctacctggccatctcagccaccattggctcctgcgtggtgcgtgatgcctctggggtcctgaatgacacagtgacccctggctggggtgcctgcgaggggctggcctgcagctatggctggaacttcaccgagtgcacccagcagcacagctgccactacggcctcatcaactattaccagaccatgagcatggtgtcaggcttcgcgcccctgatcacggctggcatcttcggggccaccctctcctctgccctggcctgccttgtctctgctgccaaagtcttccagtgcctttgcgaggaccagctgtacccactgatcggcttcttcggcaaaggctatggcaagaacaaggagcccgtgcgtggctacctgctggcctacgccatcgctgtggccttcatcatcatcgctgagctcaacaccatagcccccatcatttccaacttcttcctctgctcctatgccctcatcaacttcagctgcttccacgcctccatcaccaactcgcctgggtggagaccttcattccaatactacaacaagtgggcggcgctgtttggggctatcatctccgtggtcatcatgttcctcctcacctggtgggcggccctcatcgccattggcgtggtgctcttcctcctgctctatgtcatctacaagaagccagaggtaaattggggctcctcggtacaggctggctcctacaacctggccctcagctactcggtgggcctcaatgaggtggaagaccacatcaagaactaccgcccccagtgcctggtgctcacggggccccccaacttccgcccggccctggtggactttgtgggcaccttcacccggaacctcagcctgatgatctgtggccacgtgctcatcggaccccacaagcagaggatgcctgagctccagctcatcgccaacgggcacaccaagtggctgaacaagaggaagatcaaggccttctactcggatgtcattgccgaggacctccgcagaggcgtccagatcctcatgcaggccgcaggtctcgggagaatgaagcccaacattctggtggttgggttcaagaagaactggcagtcggctcacccggccacagtggaagactacattggcatcctccatgatgcctttgatttcaactatggcgtgtgtgtcatgaggatgcgggagggactcaacgtgtccaagatgatgcaggcgcacattaaccccgtgtttgacccagcggaggacgggaaggaagccagcgccagaggtgccaggccatcagtctctggcgctttggaccccaaggccctggtgaaggaggagcaggccaccaccatcttccagtcggagcagggcaagaagaccatagacatctactggctctttgacgatggaggcctcaccctcctcattccctatctccttggccgcaagaggaggtggagcaaatgcaagatccgtgtgttcgtaggcggccagattaacaggatggaccaggagagaaaggcgatcatttctctgctgagcaagttccgactgggattccatgaagtccacatcctccctgacatcaaccagaaccctcgggctgagcacaccaagaggtttgaggacatgattgcacccttccgtctgaatgatggcttcaaggatgaggccactgtcaacgagatgcggcgggactgcccctggaagatctcagatgaggagattacgaagaacagagtcaagtcccttcggcaggtgaggctgaatgagattgtgctggattactcccgagacgctgctctcatcgtcatcactttgcccatagggaggaaggggaagtgccccagctcgctgtacatggcctggctggagaccctgtcccaggacctcagacctccagtcatcctgatccgaggaaaccaggaaaacgtgctcaccttttactgccagtaactccaggctttgacatccctgtccacagctctgagtgtgtgggataagttggaacttgattgcctctagtccacagggatgagactcatgttctgttgcactttaagtggcagcatctgatgatctcaccgaaaaagatggtagatttccaaatctggctggactccacttccatgggacacattccctgggtcttgtgtttataggctagagaaatagcagatggagctgcaaggaaaactctctaaagcatcctattccttttaaaggatttcttttgattttgatgaccattaattaagagttcagtctttgatttgtatgcaaattggagtcccaatgctgggcgtgaatcttgacagtttctacagaccttcctgggtgaaagttcctaaatcatgccctgcttcctccaataggagaatgggagcctcacctgtaggacctacaggctctctaaggaatgcaggtctctctctgagcctccacagccaggcaaatacatatatatatattttttttttagatgaagttttttctcttgttgcccaggctagggtgtaatggcatgatctcaggtcactgcaacctcctcccgggttcaagcatttcttctgtctcagcctcccgaatagctgggattacaggcacctgccatcacacgagctaatttttgtatttttagtagagatggggtttcaccatgttgaccaggctggtgttgagctcctgacctcaggtgatccacccacctcggtctcccaaagtgctggggttacaggcctgagccactgcgcccggcccaggcaaatttcttgaaccacttctcactcccgtcactttcaataaggggtctttgatgtcttcactggttctttggacgagggacttttcgaacttttttggttgcaacacacagtaagaaatatacttcacactgagacttgcagcgcacacacacggaaacgaccaaaacaaaaatgtcacaaaacaatacttacccttccctgggggacgtcctccagtatgttctgttctgtttatttttcactgttggttgcaatccaataaaatgactttgggatccactcatgggtggggacccacacatttgaaaggcatggccacctttctgttgtgccttgcatttgtccacacacagggagtctggctgagctggggaaaggccacggctgggtgtcattgccattttcccagctcatctcaccgggaagaaaagcagattgacagaacacgtgaggaggggtattgatggcaggagagtcaaaaaagagttttaaagaaggggcaaggttgaaggagtctagtggcaagggtaagatttcaggcatggttaagaacagacgacaaggatgtcaggaatgaagatgtggagaggggtgtagagatggcaaggttggcaaggaacagataggcaggagcaggtccaagccaagcctagcccaagaccaggtgaaaggagaggggaggaggagccacctgcaagagatggaaagagcaggcggcagagggggctggcagggaggggctgttaagagtggggttggaggtgggagagaagctaggacaagggagatggagaaaggacctatacctggctcacggaaggccttcaggtcactacacgttgaacatccccagtgtttgagcccccaaagctagggtgcaagagcactgccatcgaatgccagtgggtgaggccaagtgagggtatttgcagctctagacataaccaagaagcgtaaaggtgagttgtttggtggtacgactgcctgtgccttcttccgatggcactggggtggctgaaggaacagacatctttgggtttcatcagcctcctccaagactgctgcagtgcctacactttagacttcagaaggagactaaagacttctagaatttagaaggagatctgaagtctcctttctggagttacaacccaaaggatgttagcatttctcaggtcatcccactgcaaagcccagaaggcttggggctcccaggctgctctgaagccccactgtctgaccgcctcagggcttgctacgagggactggggcacggccaagctgactaggaacagctctcgtgctcctgagggacctggaggatgggcctgcctcccagccattgagctggattctgggataattcttaactcgaaataaggggaagcatccatcagggaatgctggcctttctagagccacgtagaaaacaattttctggttcttcaaacctcaaagagtccttggtccaaaaaacagaatgttttggcttcgggtgtcaaaaaaaaaattttcacgatgtcagaaatagtatgtttttaacaatagtaatagctttgtaaaaaaataaaaagctttaacagcgaggccataaacaatgaaatgaataaaaacggtggtcattcagtcaacggaa

SEQ ID NO: 182847 - DNA, 4208 bp, Homo sapiens
  Payload ID: 16025
  Gene Symbol: SLC12A3
  Gene Name: solute carrier family 12 (sodium/chloride transporter), member 3
  Uniprot ID: P55017
  ENST ID: ENST00000563236
  CDS Start-End: 26-3091
cccctccctggacacccaggcgacaatggcagaactgcccacaacagagacgcctggggacgccactttgtgcagcgggcgcttcaccatcagcacactgctgagcagtgatgagccctctccaccagctgcctatgacagcagccaccccagccacctgacccacagcagcaccttctgcatgcgcacctttggctacaacacgatcgatgtggtgcccacatatgagcactatgccaacagcacccagcctggtgagccccggaaggtccggcccacactggctgacctgcactccttcctcaagcaggaaggcagacacctgcatgccctggcctttgacagccggcccagccacgagatgactgatgggctggtggagggcgaggcaggcaccagcagcgagaagaaccccgaggagccagtgcgcttcggctgggtcaagggggtgatgattcgttgcatgctcaacatttggggcgtgatcctctacctgcggctgccctggattacggcccaggcaggcatcgtcctgacctggatcatcatcctgctgtcggtcacggtgacctccatcacaggcctctccatctcagccatctccaccaatggcaaggtcaagtcaggtggcacctacttcctcatctcccggagtctgggcccagagcttgggggctccatcggcctcattttcgctttcgccaatgccgtgggtgtggccatgcacacggtgggctttgcagagaccgtgcgggacctgctccaggagtatggggcacccatcgtggaccccattaacgacatccgcatcattgccgtggtctcggtcactgtgctgctggccatctccctggctggcatggagtgggagtccaaggcccaggtgctgttcttccttgtcatcatggtctcctttgccaactatttagtggggacgctgatccccccatctgaggacaaggcctccaaaggcttcttcagctaccgggcggacatttttgtccagaacttggtgcctgactggcggggtccagatggcaccttcttcggaatgttctccatcttcttcccctcggccacaggcatcctggcaggggccaacatatctggtgacctcaaggaccctgctatagccatccccaaggggaccctcatggccattttctggacgaccatttcctacctggccatctcagccaccattggctcctgcgtggtgcgtgatgcctctggggtcctgaatgacacagtgacccctggctggggtgcctgcgaggggctggcctgcagctatggctggaacttcaccgagtgcacccagcagcacagctgccactacggcctcatcaactattaccagaccatgagcatggtgtcaggcttcgcgcccctgatcacggctggcatcttcggggccaccctctcctctgccctggcctgccttgtctctgctgccaaagtcttccagtgcctttgcgaggaccagctgtacccactgatcggcttcttcggcaaaggctatggcaagaacaaggagcccgtgcgtggctacctgctggcctacgccatcgctgtggccttcatcatcatcgctgagctcaacaccatagcccccatcatttccaacttcttcctctgctcctatgccctcatcaacttcagctgcttccacgcctccatcaccaactcgcctgggtggagaccttcattccaatactacaacaagtgggcggcgctgtttggggctatcatctccgtggtcatcatgttcctcctcacctggtgggcggccctcatcgccattggcgtggtgctcttcctcctgctctatgtcatctacaagaagccagaggtaaattggggctcctcggtacaggctggctcctacaacctggccctcagctactcggtgggcctcaatgaggtggaagaccacatcaagaactaccgcccccagtgcctggtgctcacggggccccccaacttccgcccggccctggtggactttgtgggcaccttcacccggaacctcagcctgatgatctgtggccacgtgctcatcggaccccacaagcagaggatgcctgagctccagctcatcgccaacgggcacaccaagtggctgaacaagaggaagatcaaggccttctactcggatgtcattgccgaggacctccgcagaggcgtccagatcctcatgcaggccgcaggtctcgggagaatgaagcccaacattctggtggttgggttcaagaagaactggcagtcggctcacccggccacagtggaagactacattggcatcctccatgatgcctttgatttcaactatggcgtgtgtgtcatgaggatgcgggagggactcaacgtgtccaagatgatgcaggcgcacattaaccccgtgtttgacccagcggaggacgggaaggaagccagcgccagagtggaccccaaggccctggtgaaggaggagcaggccaccaccatcttccagtcggagcagggcaagaagaccatagacatctactggctctttgacgatggaggcctcaccctcctcattccctatctccttggccgcaagaggaggtggagcaaatgcaagatccgtgtgttcgtaggcggccagattaacaggatggaccaggagagaaaggcgatcatttctctgctgagcaagttccgactgggattccatgaagtccacatcctccctgacatcaaccagaaccctcgggctgagcacaccaagaggtttgaggacatgattgcacccttccgtctgaatgatggcttcaaggatgaggccactgtcaacgagatgcggcgggactgcccctggaagatctcagatgaggagattacgaagaacagagtcaagtcccttcggcaggtgaggctgaatgagattgtgctggattactcccgagacgctgctctcatcgtcatcactttgcccatagggaggaaggggaagtgccccagctcgctgtacatggcctggctggagaccctgtcccaggacctcagacctccagtcatcctgatccgaggaaaccaggaaaacgtgctcaccttttactgccagtaactccaggctttgacatccctgtccacagctctgagtgtgtgggataagttggaacttgattgcctctagtccacagggatgagactcatgttctgttgcactttaagtggcagcatctgatgatctcaccgaaaaagatggtagatttccaaatctggctggactccacttccatgggacacattccctgggtcttgtgtttataggctagagaaatagcagatggagctgcaaggaaaactctctaaagcatcctattccttttaaaggatttcttttgattttgatgaccattaattaagagttcagtctttgatttgtatgcaaattggagtcccaatgctgggcgtgaatcttgacagtttctacagaccttcctgggtgaaagttcctaaatcatgccctgcttcctccaataggagaatgggagcctcacctgtaggacctacaggctctctaaggaatgcaggtctctctctgagcctccacagccaggcaaatacatatatatatattttttttttagatgaagttttttctcttgttgcccaggctagggtgtaatggcatgatctcaggtcactgcaacctcctcccgggttcaagcatttcttctgtctcagcctcccgaatagctgggattacaggcacctgccatcacacgagctaatttttgtatttttagtagagatggggtttcaccatgttgaccaggctggtgttgagctcctgacctcaggtgatccacccacctcggtctcccaaagtgctggggttacaggcctgagccactgcgcccggcccaggcaaatttcttgaaccacttctcactcccgtcactttcaataaggggtctttgatgtcttcactggttctttggacgagggacttttcgaacttttttggttgcaacacacagtaagaaatatacttcacactgagacttgcagcgcacacacacggaaacgaccaaaacaaaaatgtcacaaaacaatacttacccttccctgggggacgtcctccagtatgttctgttctgtttatttttcactgttggttgcaatccaataaaatgactttgggatccactcatgggtggggacccacacatttgaaa

SEQ ID NO: 182848 - DNA, 3119 bp, Homo sapiens
  Payload ID: 16025
  Gene Symbol: SLC12A3
  Gene Name: solute carrier family 12 (sodium/chloride transporter), member 3
  Uniprot ID: P55017
  ENST ID: ENST00000566786
  CDS Start-End: 30-3119
ctggcccctccctggacacccaggcgacaatggcagaactgcccacaacagagacgcctggggacgccactttgtgcagcgggcgcttcaccatcagcacactgctgagcagtgatgagccctctccaccagctgcctatgacagcagccaccccagccacctgacccacagcagcaccttctgcatgcgcacctttggctacaacacgatcgatgtggtgcccacatatgagcactatgccaacagcacccagcctggtgagccccggaaggtccggcccacactggctgacctgcactccttcctcaaggaaggcagacacctgcatgccctggcctttgacagccggcccagccacgagatgactgatgggctggtggagggcgaggcaggcaccagcagcgagaagaaccccgaggagccagtgcgcttcggctgggtcaagggggtgatgattcgttgcatgctcaacatttggggcgtgatcctctacctgcggctgccctggattacggcccaggcaggcatcgtcctgacctggatcatcatcctgctgtcggtcacggtgacctccatcacaggcctctccatctcagccatctccaccaatggcaaggtcaagtcaggtggcacctacttcctcatctcccggagtctgggcccagagcttgggggctccatcggcctcattttcgctttcgccaatgccgtgggtgtggccatgcacacggtgggctttgcagagaccgtgcgggacctgctccaggagtatggggcacccatcgtggaccccattaacgacatccgcatcattgccgtggtctcggtcactgtgctgctggccatctccctggctggcatggagtgggagtccaaggcccaggtgctgttcttccttgtcatcatggtctcctttgccaactatttagtggggacgctgatccccccatctgaggacaaggcctccaaaggcttcttcagctaccgggcggacatttttgtccagaacttggtgcctgactggcggggtccagatggcaccttcttcggaatgttctccatcttcttcccctcggccacaggcatcctggcaggggccaacatatctggtgacctcaaggaccctgctatagccatccccaaggggaccctcatggccattttctggacgaccatttcctacctggccatctcagccaccattggctcctgcgtggtgcgtgatgcctctggggtcctgaatgacacagtgacccctggctggggtgcctgcgaggggctggcctgcagctatggctggaacttcaccgagtgcacccagcagcacagctgccactacggcctcatcaactattaccagaccatgagcatggtgtcaggcttcgcgcccctgatcacggctggcatcttcggggccaccctctcctctgccctggcctgccttgtctctgctgccaaagtcttccagtgcctttgcgaggaccagctgtacccactgatcggcttcttcggcaaaggctatggcaagaacaaggagcccgtgcgtggctacctgctggcctacgccatcgctgtggccttcatcatcatcgctgagctcaacaccatagcccccatcatttccaacttcttcctctgctcctatgccctcatcaacttcagctgcttccacgcctccatcaccaactcgcctgggtggagaccttcattccaatactacaacaagtgggcggcgctgtttggggctatcatctccgtggtcatcatgttcctcctcacctggtgggcggccctcatcgccattggcgtggtgctcttcctcctgctctatgtcatctacaagaagccagaggtaaattggggctcctcggtacaggctggctcctacaacctggccctcagctactcggtgggcctcaatgaggtggaagaccacatcaagaactaccgcccccagtgcctggtgctcacggggccccccaacttccgcccggccctggtggactttgtgggcaccttcacccggaacctcagcctgatgatctgtggccacgtgctcatcggaccccacaagcagaggatgcctgagctccagctcatcgccaacgggcacaccaagtggctgaacaagaggaagatcaaggccttctactcggatgtcattgccgaggacctccgcagaggcgtccagatcctcatgcaggccgcaggtctcgggagaatgaagcccaacattctggtggttgggttcaagaagaactggcagtcggctcacccggccacagtggaagactacattggcatcctccatgatgcctttgatttcaactatggcgtgtgtgtcatgaggatgcgggagggactcaacgtgtccaagatgatgcaggcgcacattaaccccgtgtttgacccagcggaggacgggaaggaagccagcgccagaggtgccaggccatcagtctctggcgctttggaccccaaggccctggtgaaggaggagcaggccaccaccatcttccagtcggagcagggcaagaagaccatagacatctactggctctttgacgatggaggcctcaccctcctcattccctatctccttggccgcaagaggaggtggagcaaatgcaagatccgtgtgttcgtaggcggccagattaacaggatggaccaggagagaaaggcgatcatttctctgctgagcaagttccgactgggattccatgaagtccacatcctccctgacatcaaccagaaccctcgggctgagcacaccaagaggtttgaggacatgattgcacccttccgtctgaatgatggcttcaaggatgaggccactgtcaacgagatgcggcgggactgcccctggaagatctcagatgaggagattacgaagaacagagtcaagtcccttcggcaggtgaggctgaatgagattgtgctggattactcccgagacgctgctctcatcgtcatcactttgcccatagggaggaaggggaagtgccccagctcgctgtacatggcctggctggagaccctgtcccaggacctcagacctccagtcatcctgatccgaggaaaccaggaaaacgtgctcaccttttactgccagtaa

SEQ ID NO: 182849 - DNA, 1764 bp, Homo sapiens
  Payload ID: 16026
  Gene Symbol: SLC12A1
  Gene Name: solute carrier family 12 (sodium/potassium/chloride transporter), member 1
  ENST ID: ENST00000330289
  CDS Start-End: 187-1479
ctttgaagaacatcctgaagattatatcggagacaatatatcaagaatctatttattgaatcatctagaacaaaagccaggagctccctaatggaagcacattagtgtttattttgatgaagaaatatatagattttttaaaacaaccacaaagtagatagctcagtaaaaaatcaattttggaagatgtcactgaacaactcttccaatgtatttctggattcagtgcccagtaataccaatcgctttcaagttagtgtcataaatgagaaccatgagagcagtgcagctgcagatgacaatactgacccaccacattatgaagaaacctcttttggggatgaagctcagaaaagactcagaatcagctttaggcctgggaatcaggagtgctatgacaatttcctccaaagtggagaaactgctaaaacagatgccagttttcacgcttatgattctcacacaaacacatactatctacaaacttttggccacaacaccatggatgccgttcccaagatagagtactatcgtaacaccggcagcatcagtgggcccaaggtcaaccgacccagcctgcttgagattcacgagcaactcgcaaagaatgtggcagtcaccccaagttcagctgacagagttgctaacggtgatgggatacctggagatgaacaagctgaaaataaggaagatgatcaagctggtgttgtgaagtttggatgggtgaaaggtgtgctggtaagatgcatgctgaacatctggggagtcatgctcttcattcgcctctcctggattgttggagaagctggaattggtcttggagttctcataattcttctttccaccatggtaacttctattactgggttgtcaacttctgcgatagcaactaacgggtttgttcgtggaggtggggcctactatcttatttccagaagtttagggcccgagttcggtgggtcaataggcctgatctttgcttttgctaatgcagtggctgttgctatgtatgtggtgggatttgctgagactgtagtagatcttcttaaggagagtgattcgatgatggtggatccaaccaatgacatccggattataggctccatcacagtggtgattcttctaggaatttcagtagctggaatggaatgggaggcaaaggcccaagtcattcttctggtcattcttctaattgctattgcaaacttcttcattggaactgtcattccatccaacaatgagaaaaagtccagaggtttctttaattaccaagcatcaatatttgcagaaaactttgggccacgcttcacaaagggtgaaggcttcttctctgtctttgccatttttttcccagcagctactgggattcttgctggtgccaatatctcaggagatttggaggcactgaggaaacaaggagcttcacctctccctcaaggagctcagagtcgaaggaggagacagacttcccttatatgaattagaacaagcaagagtagaatcaagtgcaaaggaaagaggaagcagaaattgcctgtcccctcaaaaagtaaaggaagactttcagaagaggggacactcaatccaggttttgagggatgaacaggagtttgccgacaggacaaagaagagacggacatttgaaacagaaggaatgggatgtaagaaggcaccaagaaagatgctgctaatgagaattattttaagtgcagagtagtgtatgtaatccttcattaatatattaataaacatatttataaataa

SEQ ID NO: 182850 - DNA, 4707 bp, Homo sapiens
  Payload ID: 16026
  Gene Symbol: SLC12A1
  Gene Name: solute carrier family 12 (sodium/potassium/chloride transporter), member 1
  Uniprot ID: Q13621
  ENST ID: ENST00000380993
  CDS Start-End: 217-3516
tacatttcctcagaagaaggctccttggtgctttgaagaacatcctgaagattatatcggagacaatatatcaagaatctatttattgaatcatctagaacaaaagccaggagctccctaatggaagcacattagtgtttattttgatgaagaaatatatagattttttaaaacaaccacaaagtagatagctcagtaaaaaatcaattttggaagatgtcactgaacaactcttccaatgtatttctggattcagtgcccagtaataccaatcgctttcaagttagtgtcataaatgagaaccatgagagcagtgcagctgcagatgacaatactgacccaccacattatgaagaaacctcttttggggatgaagctcagaaaagactcagaatcagctttaggcctgggaatcaggagtgctatgacaatttcctccaaagtggagaaactgctaaaacagatgccagttttcacgcttatgattctcacacaaacacatactatctacaaacttttggccacaacaccatggatgccgttcccaagatagagtactatcgtaacaccggcagcatcagtgggcccaaggtcaaccgacccagcctgcttgagattcacgagcaactcgcaaagaatgtggcagtcaccccaagttcagctgacagagttgctaacggtgatgggatacctggagatgaacaagctgaaaataaggaagatgatcaagctggtgttgtgaagtttggatgggtgaaaggtgtgctggtaagatgcatgctgaacatctggggagtcatgctcttcattcgcctctcctggattgttggagaagctggaattggtcttggagttctcataattcttctttccaccatggtaacttctattactgggttgtcaacttctgcgatagcaactaacgggtttgttcgtggaggtggggcctactatcttatttccagaagtttagggcccgagttcggtgggtcaataggcctgatctttgcttttgctaatgcagtggctgttgctatgtatgtggtgggatttgctgagactgtagtagatcttcttaaggagagtgattcgatgatggtggatccaaccaatgacatccggattataggctccatcacagtggtgattcttctaggaatttcagtagctggaatggaatgggaggcaaaggcccaagtcattcttctggtcattcttctaattgctattgcaaacttcttcattggaactgtcattccatccaacaatgagaaaaagtccagaggtttctttaattaccaagcatcaatatttgcagaaaactttgggccacgcttcacaaagggtgaaggcttcttctctgtctttgccatttttttcccagcagctactgggattcttgctggtgccaatatctcaggagatttggaggatccccaagatgccatccccagaggaaccatgctggccattttcatcaccactgttgcctacttaggggttgcaatttgtgtaggggcctgtgtggtccgagatgccaccgggaacatgaatgacaccatcatttctgggatgaactgcaatggttcagcagcatgtgggttgggctatgacttctcaagatgtcgacatgaaccatgtcagtacgggctgatgaacaatttccaggtcatgagcatggtatcagggttcggccccctcatcactgcgggaatcttttctgcaacactctcctccgccctggcctcccttgtcagcgcacccaaagtgttccaggctctgtgcaaggacaacatctacaaagccctgcagttttttgcaaagggatatgggaaaaacaatgaacccctgagaggatatattctcacttttcttatagccatggcatttattcttattgcggaactgaacaccattgctcccatcatctccaactttttcctggcctcatatgcacttattaatttctcctgcttccatgcctcttatgccaaatctccaggatggagacctgcgtatggaatttacaacatgtgggtatctctttttggagctgttttgtgctgtgcagtcatgtttgtcatcaactggtgggcagctgtcatcacctatgtcattgaattcttcctttacgtctatgtgacttgtaagaagccagatgtgaactggggctcctccacacaggctctttcctacgtgagtgctttagacaatgctctggaattaaccacagtggaagaccacgtaaaaaacttcaggccccagtgcattgtcttaacagggggacccatgacaagacctgctctcctggacataactcacgcctttaccaagaacagtggcctttgcatctgctgtgaagtctttgtgggaccgcgcaaactgtgtgttaaggagatgaacagtggcatggcgaaaaaacaggcctggcttataaagaacaaaatcaaggctttttatgctgcagtggcggcagactgtttcagggatggtgtccgaagtcttcttcaggcctcaggcttaggaagaatgaaaccaaacactctggtgattggatataagaaaaactggaggaaagctcccttgacagagattgagaactacgtgggaatcatacatgatgcatttgattttgagattggcgtggttatagtcagaatcagccaaggatttgacatctctcaggttcttcaggtgcaagaggaattagagagattagaacaggagagactagcattggaagcgactatcaaagataatgagtgtgaagaggaaagtggaggcatccgaggcttgtttaaaaaagctggcaagttgaacattactaagacaacgcctaaaaaagatggcagcattaacacaagccagtcgatgcatgtgggagagttcaaccagaaactggtggaagccagcactcaatttaaaaagaaacaagaaaaaggcacaattgatgtttggtggttgtttgatgatggagggttaacacttcttatcccctatatcttaactctcagaaaaaaatggaaagactgtaaattaagaatctatgtgggagggaagatcaaccgcattgaagaagaaaaaattgtaatggcttcccttctgagcaaatttaggataaaatttgcagacatccatatcatcggtgacatcaacattaggccaaacaaagagagctggaaagtctttgaagagatgattgaaccatatcgtctccatgaaagctgcaaagatttaacaactgctgagaaattaaaaagagaaactccgtggaaaattacagatgcagaactggaagcagtcaaggaaaagagttaccgccaagttcgactgaatgaactcttacaggagcactccagagctgctaatctcattgtcctgagccttcccgtggcaagaaagggatccatatcggatttgttgtatatggcttggttggaaatcctcacaaagaacctcccacctgtcttactagttagaggaaatcacaaaaatgtcttgacattttactcttaaaacatgaaagattggaatacattttaacttaatgtaatgcataattaagaaacatgttccagtactttatgttgtaaatctgatctatggatatgcaaacctctggagaggatcctaccagattctacatacattgcataatttttatcagttaatgcgagcttttttttctcttctcagcttaaggggttgtcaaagccaatgttatccctagaaaaacatttttgtcactgctgttgataaacaagaaaatcaaggaaactcatgttggcttatgctcatgaaaaccaccaatgtgattgtaaacttctccagacaaacttaaccttttgtttcttaattttttgttttgagtgtttgcttctcagccctggtataggtctcagccccacagcaggatctcaataaatgcttattgacaggctggcatagtaaccacaggtggttatcaaaggaaaagaccaataggctggggaacataattatgcttggccccctcagaggcttatacctccaaagcagatttaaaaatcagtaactcaaaactttaagaagtagttgagtctacaaaatattcaaagcagttacctaaataaggttatttaatgtaacagattatatacttaaagtgatctgagcaatcattgataacatatggcttaaatttgctgctgcctgaaaagtatattaactagattagaagacaccatatactccaataaaatgaaatatattctattctcaatatataaactttaattgtactccctatcaaatattttgaaatttccatcacggcattactttgcatatttttttctaattaaatggttagtacagatgaaatctttatagatgactacttgaaaactaagtgctacaaattttcaaaccattattaagaaatatatcctgaatcatatatttagttactttctatagtgattgtatggatttaaaagaataattaaaatgtgaagttgaaaaacttgtaaaatttggaatatacagatactgatttttttcatttttgttagtatacctataatacataatcacattgacaaaccaatgaaaatattgattttctgatgaatggcttgatttttctccttgacatgttttgactgttcattctaactgaaaacatatatgggaaaatatgaacctgaaataaaagcactcaaattc

SEQ ID NO: 182851 - DNA, 4708 bp, Homo sapiens
  Payload ID: 16026
  Gene Symbol: SLC12A1
  Gene Name: solute carrier family 12 (sodium/potassium/chloride transporter), member 1
  Uniprot ID: Q13621
  ENST ID: ENST00000396577
  CDS Start-End: 216-3515
acatttcctcagaagaaggctccttggtgctttgaagaacatcctgaagattatatcggagacaatatatcaagaatctatttattgaatcatctagaacaaaagccaggagctccctaatggaagcacattagtgtttattttgatgaagaaatatatagattttttaaaacaaccacaaagtagatagctcagtaaaaaatcaattttggaagatgtcactgaacaactcttccaatgtatttctggattcagtgcccagtaataccaatcgctttcaagttagtgtcataaatgagaaccatgagagcagtgcagctgcagatgacaatactgacccaccacattatgaagaaacctcttttggggatgaagctcagaaaagactcagaatcagctttaggcctgggaatcaggagtgctatgacaatttcctccaaagtggagaaactgctaaaacagatgccagttttcacgcttatgattctcacacaaacacatactatctacaaacttttggccacaacaccatggatgccgttcccaagatagagtactatcgtaacaccggcagcatcagtgggcccaaggtcaaccgacccagcctgcttgagattcacgagcaactcgcaaagaatgtggcagtcaccccaagttcagctgacagagttgctaacggtgatgggatacctggagatgaacaagctgaaaataaggaagatgatcaagctggtgttgtgaagtttggatgggtgaaaggtgtgctggtaagatgcatgctgaacatctggggagtcatgctcttcattcgcctctcctggattgttggagaagctggaattggtcttggagtcatcatcattggcctaagtgtggtagtaacgacactcacaggtatttctatgtctgctatttgcacgaatggagtagtaagaggaggtggggcctactatcttatttccagaagtttagggcccgagttcggtgggtcaataggcctgatctttgcttttgctaatgcagtggctgttgctatgtatgtggtgggatttgctgagactgtagtagatcttcttaaggagagtgattcgatgatggtggatccaaccaatgacatccggattataggctccatcacagtggtgattcttctaggaatttcagtagctggaatggaatgggaggcaaaggcccaagtcattcttctggtcattcttctaattgctattgcaaacttcttcattggaactgtcattccatccaacaatgagaaaaagtccagaggtttctttaattaccaagcatcaatatttgcagaaaactttgggccacgcttcacaaagggtgaaggcttcttctctgtctttgccatttttttcccagcagctactgggattcttgctggtgccaatatctcaggagatttggaggatccccaagatgccatccccagaggaaccatgctggccattttcatcaccactgttgcctacttaggggttgcaatttgtgtaggggcctgtgtggtccgagatgccaccgggaacatgaatgacaccatcatttctgggatgaactgcaatggttcagcagcatgtgggttgggctatgacttctcaagatgtcgacatgaaccatgtcagtacgggctgatgaacaatttccaggtcatgagcatggtatcagggttcggccccctcatcactgcgggaatcttttctgcaacactctcctccgccctggcctcccttgtcagcgcacccaaagtgttccaggctctgtgcaaggacaacatctacaaagccctgcagttttttgcaaagggatatgggaaaaacaatgaacccctgagaggatatattctcacttttcttatagccatggcatttattcttattgcggaactgaacaccattgctcccatcatctccaactttttcctggcctcatatgcacttattaatttctcctgcttccatgcctcttatgccaaatctccaggatggagacctgcgtatggaatttacaacatgtgggtatctctttttggagctgttttgtgctgtgcagtcatgtttgtcatcaactggtgggcagctgtcatcacctatgtcattgaattcttcctttacgtctatgtgacttgtaagaagccagatgtgaactggggctcctccacacaggctctttcctacgtgagtgctttagacaatgctctggaattaaccacagtggaagaccacgtaaaaaacttcaggccccagtgcattgtcttaacagggggacccatgacaagacctgctctcctggacataactcacgcctttaccaagaacagtggcctttgcatctgctgtgaagtctttgtgggaccgcgcaaactgtgtgttaaggagatgaacagtggcatggcgaaaaaacaggcctggcttataaagaacaaaatcaaggctttttatgctgcagtggcggcagactgtttcagggatggtgtccgaagtcttcttcaggcctcaggcttaggaagaatgaaaccaaacactctggtgattggatataagaaaaactggaggaaagctcccttgacagagattgagaactacgtgggaatcatacatgatgcatttgattttgagattggcgtggttatagtcagaatcagccaaggatttgacatctctcaggttcttcaggtgcaagaggaattagagagattagaacaggagagactagcattggaagcgactatcaaagataatgagtgtgaagaggaaagtggaggcatccgaggcttgtttaaaaaagctggcaagttgaacattactaagacaacgcctaaaaaagatggcagcattaacacaagccagtcgatgcatgtgggagagttcaaccagaaactggtggaagccagcactcaatttaaaaagaaacaagaaaaaggcacaattgatgtttggtggttgtttgatgatggagggttaacacttcttatcccctatatcttaactctcagaaaaaaatggaaagactgtaaattaagaatctatgtgggagggaagatcaaccgcattgaagaagaaaaaattgtaatggcttcccttctgagcaaatttaggataaaatttgcagacatccatatcatcggtgacatcaacattaggccaaacaaagagagctggaaagtctttgaagagatgattgaaccatatcgtctccatgaaagctgcaaagatttaacaactgctgagaaattaaaaagagaaactccgtggaaaattacagatgcagaactggaagcagtcaaggaaaagagttaccgccaagttcgactgaatgaactcttacaggagcactccagagctgctaatctcattgtcctgagccttcccgtggcaagaaagggatccatatcggatttgttgtatatggcttggttggaaatcctcacaaagaacctcccacctgtcttactagttagaggaaatcacaaaaatgtcttgacattttactcttaaaacatgaaagattggaatacattttaacttaatgtaatgcataattaagaaacatgttccagtactttatgttgtaaatctgatctatggatatgcaaacctctggagaggatcctaccagattctacatacattgcataatttttatcagttaatgcgagcttttttttctcttctcagcttaaggggttgtcaaagccaatgttatccctagaaaaacatttttgtcactgctgttgataaacaagaaaatcaaggaaactcatgttggcttatgctcatgaaaaccaccaatgtgattgtaaacttctccagacaaacttaaccttttgtttcttaattttttgttttgagtgtttgcttctcagccctggtataggtctcagccccacagcaggatctcaataaatgcttattgacaggctggcatagtaaccacaggtggttatcaaaggaaaagaccaataggctggggaacataattatgcttggccccctcagaggcttatacctccaaagcagatttaaaaatcagtaactcaaaactttaagaagtagttgagtctacaaaatattcaaagcagttacctaaataaggttatttaatgtaacagattatatacttaaagtgatctgagcaatcattgataacatatggcttaaatttgctgctgcctgaaaagtatattaactagattagaagacaccatatactccaataaaatgaaatatattctattctcaatatataaactttaattgtactccctatcaaatattttgaaatttccatcacggcattactttgcatatttttttctaattaaatggttagtacagatgaaatctttatagatgactacttgaaaactaagtgctacaaattttcaaaccattattaagaaatatatcctgaatcatatatttagttactttctatagtgattgtatggatttaaaagaataattaaaatgtgaagttgaaaaacttgtaaaatttggaatatacagatactgatttttttcatttttgttagtatacctataatacataatcacattgacaaaccaatgaaaatattgattttctgatgaatggcttgatttttctccttgacatgttttgactgttcattctaactgaaaacatatatgggaaaatatgaacctgaaataaaagcactcaaattcaa

SEQ ID NO: 182852 - DNA, 2176 bp, Homo sapiens
  Payload ID: 16026
  Gene Symbol: SLC12A1
  Gene Name: solute carrier family 12 (sodium/potassium/chloride transporter), member 1
  ENST ID: ENST00000559641
  CDS Start-End: 231-2176
gttactgaaccgatcagcgaacacagacaaacgtgccaacacttaagtctactggctggacttcatctccatggcaacaagcatggaagaatgtggcagtcaccccaagttcagctgacagagttgctaacggtgatgggatacctggagatgaacaagctgaaaataaggaagatgatcaagctggtgttgtgaagtttggatgggtgaaaggtgtgctggtaagatgcatgctgaacatctggggagtcatgctcttcattcgcctctcctggattgttggagaagctggaattggtcttggagttctcataattcttctttccaccatggtaacttctattactgggttgtcaacttctgcgatagcaactaacgggtttgttcgtggaggtggggcctactatcttatttccagaagtttagggcccgagttcggtgggtcaataggcctgatctttgcttttgctaatgcagtggctgttgctatgtatgtggtgggatttgctgagactgtagtagatcttcttaaggagagtgattcgatgatggtggatccaaccaatgacatccggattataggctccatcacagtggtgattcttctaggaatttcagtagctggaatggaatgggaggcaaaggcccaagtcattcttctggtcattcttctaattgctattgcaaacttcttcattggaactgtcattccatccaacaatgagaaaaagtccagaggtttctttaattaccaagcatcaatatttgcagaaaactttgggccacgcttcacaaagggtgaaggcttcttctctgtctttgccatttttttcccagcagctactgggattcttgctggtgccaatatctcaggagatttggaggatccccaagatgccatccccagaggaaccatgctggccattttcatcaccactgttgcctacttaggggttgcaatttgtgtaggggcctgtgtggtccgagatgccaccgggaacatgaatgacaccatcatttctgggatgaactgcaatggttcagcagcatgtgggttgggctatgacttctcaagatgtcgacatgaaccatgtcagtacgggctgatgaacaatttccaggtcatgagcatggtatcagggttcggccccctcatcactgcgggaatcttttctgcaacactctcctccgccctggcctcccttgtcagcgcacccaaagtgttccaggctctgtgcaaggacaacatctacaaagccctgcagttttttgcaaagggatatgggaaaaacaatgaacccctgagaggatatattctcacttttcttatagccatggcatttattcttattgcggaactgaacaccattgctcccatcatctccaactttttcctggcctcatatgcacttattaatttctcctgcttccatgcctcttatgccaaatctccaggatggagacctgcgtatggaatttacaacatgtgggtatctctttttggagctgttttgtgctgtgcagtcatgtttgtcatcaactggtgggcagctgtcatcacctatgtcattgaattcttcctttacgtctatgtgacttgtaagaagccagatgtgaactggggctcctccacacaggctctttcctacgtgagtgctttagacaatgctctggaattaaccacagtggaagaccacgtaaaaaacttcaggccccagtgcattgtcttaacagggggacccatgacaagacctgctctcctggacataactcacgcctttaccaagaacagtggcctttgcatctgctgtgaagtctttgtgggaccgcgcaaactgtgtgttaaggagatgaacagtggcatggcgaaaaaacaggcctggcttataaagaacaaaatcaaggctttttatgctgcagtggcggcagactgtttcagggatggtgtccgaagtcttcttcaggcctcaggcttaggaagaatgaaaccaaacactctggtgattggatataagaaaaactggaggaaagctcccttgacagagattgagaactacgtgggaatcatacatgatgcatttgattttgagattggcgtggttatagtcagaatcagccaaggatttgacatctctcaggttcttcaggtgcaagaggaattagagagattagaaca

SEQ ID NO: 182853 - DNA, 3426 bp, Homo sapiens
  Payload ID: 16026
  Gene Symbol: SLC12A1
  Gene Name: solute carrier family 12 (sodium/potassium/chloride transporter), member 1
  Uniprot ID: Q13621
  ENST ID: ENST00000558405
  CDS Start-End: 15-3314
atcaattttggaagatgtcactgaacaactcttccaatgtatttctggattcagtgcccagtaataccaatcgctttcaagttagtgtcataaatgagaaccatgagagcagtgcagctgcagatgacaatactgacccaccacattatgaagaaacctcttttggggatgaagctcagaaaagactcagaatcagctttaggcctgggaatcaggagtgctatgacaatttcctccaaagtggagaaactgctaaaacagatgccagttttcacgcttatgattctcacacaaacacatactatctacaaacttttggccacaacaccatggatgccgttcccaagatagagtactatcgtaacaccggcagcatcagtgggcccaaggtcaaccgacccagcctgcttgagattcacgagcaactcgcaaagaatgtggcagtcaccccaagttcagctgacagagttgctaacggtgatgggatacctggagatgaacaagctgaaaataaggaagatgatcaagctggtgttgtgaagtttggatgggtgaaaggtgtgctggtaagatgcatgctgaacatctggggagtcatgctcttcattcgcctctcctggattgttggagaagctggaattggtcttggagttctcataattcttctttccaccatggtaacttctattactgggttgtcaacttctgcgatagcaactaacgggtttgttcgtggaggtggggcctactatcttatttccagaagtttagggcccgagttcggtgggtcaataggcctgatctttgcttttgctaatgcagtggctgttgctatgtatgtggtgggatttgctgagactgtagtagatcttcttaaggagagtgattcgatgatggtggatccaaccaatgacatccggattataggctccatcacagtggtgattcttctaggaatttcagtagctggaatggaatgggaggcaaaggcccaagtcattcttctggtcattcttctaattgctattgcaaacttcttcattggaactgtcattccatccaacaatgagaaaaagtccagaggtttctttaattaccaagcatcaatatttgcagaaaactttgggccacgcttcacaaagggtgaaggcttcttctctgtctttgccatttttttcccagcagctactgggattcttgctggtgccaatatctcaggagatttggaggatccccaagatgccatccccagaggaaccatgctggccattttcatcaccactgttgcctacttaggggttgcaatttgtgtaggggcctgtgtggtccgagatgccaccgggaacatgaatgacaccatcatttctgggatgaactgcaatggttcagcagcatgtgggttgggctatgacttctcaagatgtcgacatgaaccatgtcagtacgggctgatgaacaatttccaggtcatgagcatggtatcagggttcggccccctcatcactgcgggaatcttttctgcaacactctcctccgccctggcctcccttgtcagcgcacccaaagtgttccaggctctgtgcaaggacaacatctacaaagccctgcagttttttgcaaagggatatgggaaaaacaatgaacccctgagaggatatattctcacttttcttatagccatggcatttattcttattgcggaactgaacaccattgctcccatcatctccaactttttcctggcctcatatgcacttattaatttctcctgcttccatgcctcttatgccaaatctccaggatggagacctgcgtatggaatttacaacatgtgggtatctctttttggagctgttttgtgctgtgcagtcatgtttgtcatcaactggtgggcagctgtcatcacctatgtcattgaattcttcctttacgtctatgtgacttgtaagaagccagatgtgaactggggctcctccacacaggctctttcctacgtgagtgctttagacaatgctctggaattaaccacagtggaagaccacgtaaaaaacttcaggccccagtgcattgtcttaacagggggacccatgacaagacctgctctcctggacataactcacgcctttaccaagaacagtggcctttgcatctgctgtgaagtctttgtgggaccgcgcaaactgtgtgttaaggagatgaacagtggcatggcgaaaaaacaggcctggcttataaagaacaaaatcaaggctttttatgctgcagtggcggcagactgtttcagggatggtgtccgaagtcttcttcaggcctcaggcttaggaagaatgaaaccaaacactctggtgattggatataagaaaaactggaggaaagctcccttgacagagattgagaactacgtgggaatcatacatgatgcatttgattttgagattggcgtggttatagtcagaatcagccaaggatttgacatctctcaggttcttcaggtgcaagaggaattagagagattagaacaggagagactagcattggaagcgactatcaaagataatgagtgtgaagaggaaagtggaggcatccgaggcttgtttaaaaaagctggcaagttgaacattactaagacaacgcctaaaaaagatggcagcattaacacaagccagtcgatgcatgtgggagagttcaaccagaaactggtggaagccagcactcaatttaaaaagaaacaagaaaaaggcacaattgatgtttggtggttgtttgatgatggagggttaacacttcttatcccctatatcttaactctcagaaaaaaatggaaagactgtaaattaagaatctatgtgggagggaagatcaaccgcattgaagaagaaaaaattgtaatggcttcccttctgagcaaatttaggataaaatttgcagacatccatatcatcggtgacatcaacattaggccaaacaaagagagctggaaagtctttgaagagatgattgaaccatatcgtctccatgaaagctgcaaagatttaacaactgctgagaaattaaaaagagaaactccgtggaaaattacagatgcagaactggaagcagtcaaggaaaagagttaccgccaagttcgactgaatgaactcttacaggagcactccagagctgctaatctcattgtcctgagccttcccgtggcaagaaagggatccatatcggatttgttgtatatggcttggttggaaatcctcacaaagaacctcccacctgtcttactagttagaggaaatcacaaaaatgtcttgacattttactcttaaaacatgaaagattggaatacattttaacttaatgtaatgcataattaagaaacatgttccagtactttatgttgtaaatctgatctatggatatgcaaacctctggagagga

SEQ ID NO: 182854 - DNA, 664 bp, Homo sapiens
  Payload ID: 16026
  Gene Symbol: SLC12A1
  Gene Name: solute carrier family 12 (sodium/potassium/chloride transporter), member 1
  ENST ID: ENST00000561127
  CDS Start-End: 324-664
tgtctcaccaacagacacagacatttacacttctaggccaggaaagcgctaaccagggccctgtgactctacgcaggttccagaacacgccttctacatttgttactgaaccgatcagcgaacacagacaaacgtgccaacacttaagtctactggctggacttcatctccatggcaacaagcatggaagaatgtggcagtcaccccaagttcagctgacagagttgctaacggtgatgggatacctggagatgaacaagctgaaaataaggaagatgatcaagctggtgttgtgaagtttggatgggtgaaaggtaagatgcatgctgaacatctggggagtcatgctcttcattcgcctctcctggattgttggagaagctggaattggtcttggagttctcataattcttctttccaccatggtaacttctattactgggttgtcaacttctgcgatagcaactaacgggtttgttcgtggaggtggggcctactatcttatttccagaagtttagggcccgagttcggtgggtcaataggcctgatctttgcttttgctaatgcagtggctgttgctatgtatgtggtgggatttgctgagactgtagtagatcttcttaaggagagtgattcgatgatggtggatccaaccaatgacat

SEQ ID NO: 182855 - DNA, 582 bp, Homo sapiens
  Payload ID: 16026
  Gene Symbol: SLC12A1
  Gene Name: solute carrier family 12 (sodium/potassium/chloride transporter), member 1
  ENST ID: ENST00000558805
  CDS Start-End: 1-311
aggcccaagtcattcttctggtcattcttctaattgctattgcaaacttcttcattggaactgtcattccatccaacaatgagaaaaagtccagaggtttctttaattaccaagcatcaatatttgcagaaaactttgggccacgcttcacaaagggtgaaggcttcttctctgtctttgccatttttttcccagcagctactgggattcttgctggtgccaatatctcaggagatttggaggtacgttgtttgctctgctttgcagtcctgggagtggtggtacacttggtgggtagcacaaggagctagagaggttagatgtgaccatattaccctacagattcaaactgtaggtttctgcaagatttcctgatgatttaaaagttctctcttttaatgccaaatttggatttatattccagataattcttccaaaagtcttattcagtgatatcagaagaacagggtagtgtgatagtgtgtcatatttccccaaaataaatgtagttcagtgaaaaaaataccagaaccaccctttctcttttaaacccaaatgaataggaatattttcctgtaaaag

SEQ ID NO: 182856 - DNA, 735 bp, Homo sapiens
  Payload ID: 16026
  Gene Symbol: SLC12A1
  Gene Name: solute carrier family 12 (sodium/potassium/chloride transporter), member 1
  ENST ID: ENST00000561031
  CDS Start-End: 1-654
atgtcactgaacaactcttccaatgtatttctggattcagtgcccagtaataccaatcgctttcaagttagtgtcataaatgagaaccatgagagcagtgcagctgcagatgacaatactgacccaccacattatgaagaaacctcttttggggatgaagctcagaaaagactcagaatcagctttaggcctgggaatcaggagtgctatgacaatttcctccaaagtggagaaactgctaaaacagatgccagttttcacgcttatgattctcacacaaacacatactatctacaaacttttggccacaacaccatggatgccgttcccaagatagagtactatcgtaacaccggcagcatcagtgggcccaaggtcaaccgacccagcctgcttgagattcacgagcaactcgcaaagaatgtggcagtcaccccaagttcagctgacagagttgctaacggtgatgggatacctggagatgaacaagctgaaaataaggaagatgatcaagctggtgttgtgaagtttggatgggtgaaaggtgtgctggtaagatgcatgctgaacatctggggagtcatgctcttcattcgcctctcctggattgttggagaagctggaattgagtatccttcttggcatgattggtaaaacttcactgaacaaaaataacttgtgagaaaactggtgaaaatgtgacctgactaataaaaatgctgaattgttgaactt

SEQ ID NO: 182857 - DNA, 6885 bp, Homo sapiens
  Payload ID: 16027
  Gene Symbol: SLC12A2
  Gene Name: solute carrier family 12 (sodium/potassium/chloride transporter), member 2
  Uniprot ID: P55011
  ENST ID: ENST00000262461
  CDS Start-End: 190-3828
acactcgcgcgctcgctcggctgccggtggcctctgtggccgtccaggctagcggcggcccgcaggcggcggggagaaagactctctcacctggtcttgcggctgtggccaccgccggccaggggtgtggagggcgtgctgccggagacgtccgccgggctctgcagttccgccgggggtcgggcagctatggagccgcggcccacggcgccctcctccggcgccccgggactggccggggtcggggagacgccgtcagccgctgcgctggccgcagccagggtggaactgcccggcacggctgtgccctcggtgccggaggatgctgcgcccgcgagccgggacggcggcggggtccgcgatgagggccccgcggcggccggggacgggctgggcagacccttggggcccaccccgagccagagccgtttccaggtggacctggtttccgagaacgccgggcgggccgctgctgcggcggcggcggcggcggcggcagcggcggcggctggtgctggggcgggggccaagcagacccccgcggacggggaagccagcggcgagagcgagccggctaaaggcagcgaggaagccaagggccgcttccgcgtgaacttcgtggacccagctgcctcctcgtcggctgaagacagcctgtcagatgctgccggggtcggagtcgacgggcccaacgtgagcttccagaacggcggggacacggtgctgagcgagggcagcagcctgcactccggcggcggcggcggcagtgggcaccaccagcactactattatgatacccacaccaacacctactacctgcgcaccttcggccacaacaccatggacgctgtgcccaggatcgatcactaccggcacacagccgcgcagctgggcgagaagctgctccggcctagcctggcggagctccacgacgagctggaaaaggaaccttttgaggatggctttgcaaatggggaagaaagtactccaaccagagatgctgtggtcacgtatactgcagaaagtaaaggagtcgtgaagtttggctggatcaagggtgtattagtacgttgtatgttaaacatttggggtgtgatgcttttcattagattgtcatggattgtgggtcaagctggaataggtctatcagtccttgtaataatgatggccactgttgtgacaactatcacaggattgtctacttcagcaatagcaactaatggatttgtaagaggaggaggagcatattatttaatatctagaagtctagggccagaatttggtggtgcaattggtctaatcttcgcctttgccaacgctgttgcagttgctatgtatgtggttggatttgcagaaaccgtggtggagttgcttaaggaacattccatacttatgatagatgaaatcaatgatatccgaattattggagccattacagtcgtgattcttttaggtatctcagtagctggaatggagtgggaagcaaaagctcagattgttcttttggtgatcctacttcttgctattggtgatttcgtcataggaacatttatcccactggagagcaagaagccaaaagggttttttggttataaatctgaaatatttaatgagaactttgggcccgattttcgagaggaagagactttcttttctgtatttgccatcttttttcctgctgcaactggtattctggctggagcaaatatctcaggtgatcttgcagatcctcagtcagccatacccaaaggaacactcctagccattttaattactacattggtttacgtaggaattgcagtatctgtaggttcttgtgttgttcgagatgccactggaaacgttaatgacactatcgtaacagagctaacaaactgtacttctgcagcctgcaaattaaactttgatttttcatcttgtgaaagcagtccttgttcctatggcctaatgaacaacttccaggtaatgagtatggtgtcaggatttacaccactaatttctgcaggtatattttcagccactctttcttcagcattagcatccctagtgagtgctcccaaaatatttcaggctctatgtaaggacaacatctacccagctttccagatgtttgctaaaggttatgggaaaaataatgaacctcttcgtggctacatcttaacattcttaattgcacttggattcatcttaattgctgaactgaatgttattgcaccaattatctcaaacttcttccttgcatcatatgcattgatcaatttttcagtattccatgcatcacttgcaaaatctccaggatggcgtcctgcattcaaatactacaacatgtggatatcacttcttggagcaattctttgttgcatagtaatgttcgtcattaactggtgggctgcattgctaacatatgtgatagtccttgggctgtatatttatgttacctacaaaaaaccagatgtgaattggggatcctctacacaagccctgacttacctgaatgcactgcagcattcaattcgtctttctggagtggaagaccacgtgaaaaactttaggccacagtgtcttgttatgacaggtgctccaaactcacgtccagctttacttcatcttgttcatgatttcacaaaaaatgttggtttgatgatctgtggccatgtacatatgggtcctcgaagacaagccatgaaagagatgtccatcgatcaagccaaatatcagcgatggcttattaagaacaaaatgaaggcattttatgctccagtacatgcagatgacttgagagaaggtgcacagtatttgatgcaggctgctggtcttggtcgtatgaagccaaacacacttgtccttggatttaagaaagattggttgcaagcagatatgagggatgtggatatgtatataaacttatttcatgatgcttttgacatacaatatggagtagtggttattcgcctaaaagaaggtctggatatatctcatcttcaaggacaagaagaattattgtcatcacaagagaaatctcctggcaccaaggatgtggtagtaagtgtggaatatagtaaaaagtccgatttagatacttccaaaccactcagtgaaaaaccaattacacacaaagttgaggaagaggatggcaagactgcaactcaaccactgttgaaaaaagaatccaaaggccctattgtgcctttaaatgtagctgaccaaaagcttcttgaagctagtacacagtttcagaaaaaacaaggaaagaatactattgatgtctggtggctttttgatgatggaggtttgaccttattgataccttaccttctgacgaccaagaaaaaatggaaagactgtaagatcagagtattcattggtggaaagataaacagaatagaccatgaccggagagcgatggctactttgcttagcaagttccggatagacttttctgatatcatggttctaggagatatcaataccaaaccaaagaaagaaaatattatagcttttgaggaaatcattgagccatacagacttcatgaagatgataaagagcaagatattgcagataaaatgaaagaagatgaaccatggcgaataacagataatgagcttgaactttataagaccaagacataccggcagatcaggttaaatgagttattaaaggaacattcaagcacagctaatattattgtcatgagtctcccagttgcacgaaaaggtgctgtgtctagtgctctctacatggcatggttagaagctctatctaaggacctaccaccaatcctcctagttcgtgggaatcatcagagtgtccttaccttctattcataaatgttctatacagtggacagccctccagaatggtacttcagtgcctagtgtagtaactgaaatcttcaatgacacattaacatcacaatggcgaatggtgacttttctttcacgatttcattaatttgaaagcacacaggaaagttgctccattgataacgtgtatggagacttcggttttagtcaattccatatctcaatcttaatggtgattcttctctgttgaactgaagtttgtgagagtagttttcctttgctacttgaatagcaataaaagcgtgttaactttttgattgatgaaagaagtacaaaaagcctttagccttgaggtgccttctgaaattaaccaaatttcatccatatatcctcttttataaacttatagaatgtcaaactttgccttcaactgtttttatttctagtctcttccactttaaaacaaaatgaacactgcttgtcttcttccattgaccatttagtgttgagtactgtatgtgttttgttaattctataaaggtatctgttagatattaaaggtgagaattagggcaggttaatcaaaaatggggaaggggaaatggtaaccaaaaagtaaccccatggtaaggtttatatgagtatatgtgaatatagagctaggaaaaaaagcccccccaaatacctttttaacccctctgattggctattattactatatttattattatttattgaaaccttagggaagattgaagattcatcccatacttctatataccatgcttaaaaatcacgtcattctttaaacaaaaatactcaagatcatttatatttatttggagagaaaactgtcctaatttagaatttccctcaaatctgagggacttttaagaaatgctaacagatttttctggaggaaatttagacaaaacaatgtcatttagtagaatatttcagtatttaagtggaatttcagtatactgtactatcctttataagtcattaaaataatgtttcatcaaatggttaaatggaccactggtttcttagagaaatgtttttaggcttaattcattcaattgtcaagtacacttagtcttaatacactcaggtttgaacagattattctgaatattaaaatttaatccattcttaatattttaaaacttttgttaagaaaaactgccagtttgtgcttttgaaatgtctgttttgacatcatagtctagtaaaattttgacagtgcatatgtactgttactaaaagctttatatgaaattattaatgtgaagtttttcatttataattcaaggaaggatttcctgaaaacatttcaagggatttatgtctacatatttgtgtgtgtgtgtgtatatatatgtaatatgcatacacagatgcatatgtgtatatataatgaaatttatgttgctggtattttgcattttaaagtgatcaagattcattaggcaaactttggtttaagtaaacatatgttcaaaatcagattaacagatacaggtttcatagagaacaaaggtgatcatttgaagggcatgctgtaatttcacacaattttccagttcaaaaatggagaatacttcgcctaaaatactgttaagtgggttaattgatacaagtttctgtggtggaaaatttatgcaggttttcacgaatccttttttttttttttttttttttttgagacggagtcttgctctgttgccacgctggaatgcagtaacgtgatcttggctcactgcgacctccacctccccagttcaagcgattctcctgcctcagcctccctagtagctgggactacgggtgcacgccaccatgcccagctaatttttgtattttgagtagagacagggtttcaccgtgttggctaggatggtgtctatctcttgaccttgtgatccacccgcctcagcctcccagagtgctgggattacaggtgcgagccactgcgcctggctggttttcatgaatcttgatagacatctataacgttattattttcagtggtgtgcagcatttttgcttcatgagtatgacctaggtatagagatctgataacttgaattcagaatattaagaaaatgaagtaactgattttctaaaaaaaaaaaaaaaaaaaatttctacattataactcacagcattgttccattgcaggttttgcaatgtttgggggtaaagacagtagaaatattattcagtaaacaataatgtgtgaacttttaagatggataatagggcatggactgagtgctgctatcttgaaatgtgcacaggtacacttaccttttttttttttttttttaagtttttcccattcaggaaaacaacattgtgatctgtactacaggaaccaaatgtcatgcgtcatacatgtgggtataaagtacataaaatatatctaactattcataatgtggggtgggtaatactgtctgtgaaataatgtaagaagcttttcacttaaaaaaaatgcattactttcacttaacactagacaccaggtcgaaaattttcaaggttatagtacttatttcaacaattcttagagatgctagctagtgttgaagctaaaaatagctttatttatgctgaattgtgatttttttatgccaaattttttttagttctaatcattgatgatagcttggaaataaataattatgccatggcatttgacagttcattattcctataagaattaaattgagtttagagagaatggtggtgttgagctgattattaacagttactgaaatcaaatatttatttgttacattattccatttgtattttaggtttccttttacattctttttatatgcattctgacattacatattttttaagactatggaaataatttaaagatttaagctctggtggatgattatctgctaagtaagtctgaaaatgtaatattttgataatactgtaatatacctgtcacacaaatgcttttctaatgttttaaccttgagtattgcagttgctgctttgtacagaggttactgcaataaaggaagtggattcattaaacctatttaatgtcca

SEQ ID NO: 182858 - DNA, 5509 bp, Homo sapiens
  Payload ID: 16027
  Gene Symbol: SLC12A2
  Gene Name: solute carrier family 12 (sodium/potassium/chloride transporter), member 2
  Uniprot ID: P55011
  ENST ID: ENST00000343225
  CDS Start-End: 108-3698
tctctcacctggtcttgcggctgtggccaccgccggccaggggtgtggagggcgtgctgccggagacgtccgccgggctctgcagttccgccgggggtcgggcagctatggagccgcggcccacggcgccctcctccggcgccccgggactggccggggtcggggagacgccgtcagccgctgcgctggccgcagccagggtggaactgcccggcacggctgtgccctcggtgccggaggatgctgcgcccgcgagccgggacggcggcggggtccgcgatgagggccccgcggcggccggggacgggctgggcagacccttggggcccaccccgagccagagccgtttccaggtggacctggtttccgagaacgccgggcgggccgctgctgcggcggcggcggcggcggcggcagcggcggcggctggtgctggggcgggggccaagcagacccccgcggacggggaagccagcggcgagagcgagccggctaaaggcagcgaggaagccaagggccgcttccgcgtgaacttcgtggacccagctgcctcctcgtcggctgaagacagcctgtcagatgctgccggggtcggagtcgacgggcccaacgtgagcttccagaacggcggggacacggtgctgagcgagggcagcagcctgcactccggcggcggcggcggcagtgggcaccaccagcactactattatgatacccacaccaacacctactacctgcgcaccttcggccacaacaccatggacgctgtgcccaggatcgatcactaccggcacacagccgcgcagctgggcgagaagctgctccggcctagcctggcggagctccacgacgagctggaaaaggaaccttttgaggatggctttgcaaatggggaagaaagtactccaaccagagatgctgtggtcacgtatactgcagaaagtaaaggagtcgtgaagtttggctggatcaagggtgtattagtacgttgtatgttaaacatttggggtgtgatgcttttcattagattgtcatggattgtgggtcaagctggaataggtctatcagtccttgtaataatgatggccactgttgtgacaactatcacaggattgtctacttcagcaatagcaactaatggatttgtaagaggaggaggagcatattatttaatatctagaagtctagggccagaatttggtggtgcaattggtctaatcttcgcctttgccaacgctgttgcagttgctatgtatgtggttggatttgcagaaaccgtggtggagttgcttaaggaacattccatacttatgatagatgaaatcaatgatatccgaattattggagccattacagtcgtgattcttttaggtatctcagtagctggaatggagtgggaagcaaaagctcagattgttcttttggtgatcctacttcttgctattggtgatttcgtcataggaacatttatcccactggagagcaagaagccaaaagggttttttggttataaatctgaaatatttaatgagaactttgggcccgattttcgagaggaagagactttcttttctgtatttgccatcttttttcctgctgcaactggtattctggctggagcaaatatctcaggtgatcttgcagatcctcagtcagccatacccaaaggaacactcctagccattttaattactacattggtttacgtaggaattgcagtatctgtaggttcttgtgttgttcgagatgccactggaaacgttaatgacactatcgtaacagagctaacaaactgtacttctgcagcctgcaaattaaactttgatttttcatcttgtgaaagcagtccttgttcctatggcctaatgaacaacttccaggtaatgagtatggtgtcaggatttacaccactaatttctgcaggtatattttcagccactctttcttcagcattagcatccctagtgagtgctcccaaaatatttcaggctctatgtaaggacaacatctacccagctttccagatgtttgctaaaggttatgggaaaaataatgaacctcttcgtggctacatcttaacattcttaattgcacttggattcatcttaattgctgaactgaatgttattgcaccaattatctcaaacttcttccttgcatcatatgcattgatcaatttttcagtattccatgcatcacttgcaaaatctccaggatggcgtcctgcattcaaatactacaacatgtggatatcacttcttggagcaattctttgttgcatagtaatgttcgtcattaactggtgggctgcattgctaacatatgtgatagtccttgggctgtatatttatgttacctacaaaaaaccagatgtgaattggggatcctctacacaagccctgacttacctgaatgcactgcagcattcaattcgtctttctggagtggaagaccacgtgaaaaactttaggccacagtgtcttgttatgacaggtgctccaaactcacgtccagctttacttcatcttgttcatgatttcacaaaaaatgttggtttgatgatctgtggccatgtacatatgggtcctcgaagacaagccatgaaagagatgtccatcgatcaagccaaatatcagcgatggcttattaagaacaaaatgaaggcattttatgctccagtacatgcagatgacttgagagaaggtgcacagtatttgatgcaggctgctggtcttggtcgtatgaagccaaacacacttgtccttggatttaagaaagattggttgcaagcagatatgagggatgtggatatgtatataaacttatttcatgatgcttttgacatacaatatggagtagtggttattcgcctaaaagaaggtctggatatatctcatcttcaaggacaagaagaattattgtcatcacaagagaaatctcctggcaccaaggatgtggtagtaagtgtggaatatagtaaaaagtccgatttagatacttccaaaccactcagtgaaaaaccaattacacacaaagaatccaaaggccctattgtgcctttaaatgtagctgaccaaaagcttcttgaagctagtacacagtttcagaaaaaacaaggaaagaatactattgatgtctggtggctttttgatgatggaggtttgaccttattgataccttaccttctgacgaccaagaaaaaatggaaagactgtaagatcagagtattcattggtggaaagataaacagaatagaccatgaccggagagcgatggctactttgcttagcaagttccggatagacttttctgatatcatggttctaggagatatcaataccaaaccaaagaaagaaaatattatagcttttgaggaaatcattgagccatacagacttcatgaagatgataaagagcaagatattgcagataaaatgaaagaagatgaaccatggcgaataacagataatgagcttgaactttataagaccaagacataccggcagatcaggttaaatgagttattaaaggaacattcaagcacagctaatattattgtcatgagtctcccagttgcacgaaaaggtgctgtgtctagtgctctctacatggcatggttagaagctctatctaaggacctaccaccaatcctcctagttcgtgggaatcatcagagtgtccttaccttctattcataaatgttctatacagtggacagccctccagaatggtacttcagtgcctagtgtagtaactgaaatcttcaatgacacattaacatcacaatggcgaatggtgacttttctttcacgatttcattaatttgaaagcacacaggaaagttgctccattgataacgtgtatggagacttcggttttagtcaattccatatctcaatcttaatggtgattcttctctgttgaactgaagtttgtgagagtagttttcctttgctacttgaatagcaataaaagcgtgttaactttttgattgatgaaagaagtacaaaaagcctttagccttgaggtgccttctgaaattaaccaaatttcatccatatatcctcttttataaacttatagaatgtcaaactttgccttcaactgtttttatttctagtctcttccactttaaaacaaaatgaacactgcttgtcttcttccattgaccatttagtgttgagtactgtatgtgttttgttaattctataaaggtatctgttagatattaaaggtgagaattagggcaggttaatcaaaaatggggaaggggaaatggtaaccaaaaagtaaccccatggtaaggtttatatgagtatatgtgaatatagagctaggaaaaaaagcccccccaaatacctttttaacccctctgattggctattattactatatttattattatttattgaaaccttagggaagattgaagattcatcccatacttctatataccatgcttaaaaatcacgtcattctttaaacaaaaatactcaagatcatttatatttatttggagagaaaactgtcctaatttagaatttccctcaaatctgagggacttttaagaaatgctaacagatttttctggaggaaatttagacaaaacaatgtcatttagtagaatatttcagtatttaagtggaatttcagtatactgtactatcctttataagtcattaaaataatgtttcatcaaatggttaaatggaccactggtttcttagagaaatgtttttaggcttaattcattcaattgtcaagtacacttagtcttaatacactcaggtttgaacagattattctgaatattaaaatttaatccattcttaatattttaaaacttttgttaagaaaaactgccagtttgtgcttttgaaatgtctgttttgacatcatagtctagtaaaattttgacagtgcatatgtactgttactaaaagctttatatgaaattattaatgtgaagtttttcatttataattcaaggaaggatttcctgaaaacatttcaagggatttatgtctacatatttgtgtgtgtgtgtgtatatatatgtaatatgcatacacagatgcatatgtgtatatataatgaaatttatgttgctggtattttgcattttaaagtgatcaagattcattaggcaaactttggtttaagtaaacatatgttcaaaatcagattaacagatacaggtttcatagagaacaaaggtgatcatttgaagggcatgctgtaatttcacacaattttccagttcaaaaatggagaatacttcgcctaaaatactgttaagtgggttaattgatacaagtttctgtggtggaaaatttatgcaggttttcacgaatccttttttttttttttttttttttttgagacggagtcttgctctgttgccacgctggaatgcagtaacgtgatcttggctcactgcgacctccacctccccagttcaagcgattctcctgcctcagcctccctagtagctgggactacgggtgca

SEQ ID NO: 182859 - DNA, 4263 bp, Homo sapiens
  Payload ID: 16027
  Gene Symbol: SLC12A2
  Gene Name: solute carrier family 12 (sodium/potassium/chloride transporter), member 2
  ENST ID: ENST00000509205
  CDS Start-End: 165-3617
ggtggcctctgtggccgtccaggctagcggcggcccgcaggcggcggggagaaagactctctcacctggtcttgcggctgtggccaccgccggccaggggtgtggagggcgtgctgccggagacgtccgccgggctctgcagttccgccgggggtcgggcagctatggagccgcggcccacggcgccctcctccggcgccccgggactggccggggtcggggagacgccgtcagccgctgcgctggccgcagccagggtggaactgcccggcacggctgtgccctcggtgccggaggatgctgcgcccgcgagccgggacggcggcggggtccgcgatgagggccccgcggcggccggggacgggctgggcagacccttggggcccaccccgagccagagccgtttccaggtggacctggtttccgagaacgccgggcgggccgctgctgcggcggcggcggcggcggcggcagcggcggcggctggtgctggggcgggggccaagcagacccccgcggacggggaagccagcggcgagagcgagccggctaaaggcagcgaggaagccaagggccgcttccgcgtgaacttcgtggacccagctgcctcctcgtcggctgaagacagcctgtcagatgctgccggggtcggagtcgacgggcccaacgtgagcttccagaacggcggggacacggtgctgagcgagggcagcagcctgcactccggcggcggcggcggcagtgggcaccaccagcactactattatgatacccacaccaacacctactacctgcgcaccttcggccacaacaccatggacgctgtgcccaggatcgatcactaccggcacacagccgcgcagctgggcgagaagctgctccggcctagcctggcggagctccacgacgagctggaaaaggaaccttttgaggatggctttgcaaatggggaagaaagtactccaaccagagatgctgtggtcacgtatactgcagaaagtaaaggagtcgtgaagtttggctggatcaagggtgtattagtacgttgtatgttaaacatttggggtgtgatgcttttcattagattgtcatggattgtgggtcaagctggaataggtctatcagtccttgtaataatgatggccactgttgtgacaactatcacaggattgtctacttcagcaatagcaactaatggatttgtaagaggaggaggagcatattatttaatatctagaagtctagggccagaatttggtggtgcaattggtctaatcttcgcctttgccaacgctgttgcagttgctatgtatgtggttggatttgcagaaaccgtggtggagttgcttaaggaacattccatacttatgatagatgaaatcaatgatatccgaattattggagccattacagtcgtgattcttttaggtatctcagtagctggaatggagtgggaagcaaaagctcagattgttcttttggtgatcctacttcttgctattggtgatttcgtcataggaacatttatcccactggagagcaagaagccaaaagggttttttggttataaatctgaaatatttaatgagaactttgggcccgattttcgagaggaagagactttcttttctgtatttgccatcttttttcctgctgcaactggtattctggctggagcaaatatctcaggtgatcttgcagatcctcagtcagccatacccaaaggaacactcctagccattttaattactacattggtttacgtaggaattgcagtatctgtaggttcttgtgttgttcgagatgccactggaaacgttaatgacactatcgtaacagagctaacaaactgtacttctgcagcctgcaaattaaactttgatttttcatcttgtgaaagcagtccttgttcctatggcctaatgaacaacttccaggtaatgagtatggtgtcaggatttacaccactaatttctgcaggtatattttcagccactctttcttcagcattagcatccctagtgagtgctcccaaaatatttcaggctctatgtaaggacaacatctacccagctttccagatgtttgctaaaggttatgggaaaaataatgaacctcttcgtggctacatcttaacattcttaattgcacttggattcatcttaattgctgaactgaatgttattgcaccaattatctcaaacttcttccttgcatcatatgcattgatcaatttttcagtattccatgcatcacttgcaaaatctccaggatggcgtcctgcattcaaatactacaacatgtggatatcacttcttggagcaattctttgttgcatagtaatgttcgtcattaactggtgggctgcattgctaacatatgtgatagtccttgggctgtatatttatgttacctacaaaaaaccagatgtgaattggggatcctctacacaagccctgacttacctgaatgcactgcagcattcaattcgtctttctggagtggaagaccacgtgaaaaactttaggccacagtgtcttgttatgacaggtgctccaaactcacgtccagctttacttcatcttgttcatgatttcacaaaaaatgttggtttgatgatctgtggccatgtacatatgggtcctcgaagacaagccatgaaagagatgtccatcgatcaagccaaatatcagcgatggcttattaagaacaaaatgaaggcattttatgctccagtacatgcagatgacttgagagaaggtgcacagtatttgatgcaggctgctggtcttggtcgtatgaagccaaacacacttgtccttggatttaagaaagattggttgcaagcagatatgagggatgtggatatgtatataaacttatttcatgatgcttttgacatacaatatggagtagtggttattcgcctaaaagaaggtctggatatatctcatcttcaaggacaagaagaattattgtcatcacaagagaaatctcctggcaccaaggatgtggtagtaagtgtggaatatagtaaaaagtccgatttagatacttccaaaccactcagtgaaaaaccaattacacacaaagttgaggaagaggatggcaagactgcaactcaaccactgttgaaaaaagaatccaaaggccctattgtgcctttaaatgtagctgaccaaaagcttcttgaagctagtacacagtttcagaaaaaacaaggaaagaatactattgatgtctggtggctttttgatgatggaggtttgaccttattgataccttaccttctgacgaccaagaaaaaatggaaagactgtaagatcagagtattcattggtggaaagataaacagaatagaccatgaccggagagcgatggctactttgcttagcaagttccggatagacttttctgatatcatggttctaggagatatcaataccaaaccaaagaaagaaaatattatagcttttgaggaaatcattgagccatacagacttcatgaagatgataaagagcaagatattgcagataaaatgaaagaagatgaaccatggcgaataacagataatgagcttgaactttataagaccaagttttatgaaccatgctaaattcttatttccacatggtctaggaatgactgtcctgtttcatttcagacataccggcagatcaggttaaatgagttattaaaggaacattcaagcacagctaatattattgtcatgagtctcccagttgcacgaaaaggtgctgtgtctagtgctctctacatggcatggttagaagctctatctaaggacctaccaccaatcctcctagttcgtgggaatcatcagagtgtccttaccttctattcataaatgttctatacagtggacagccctccagaatggtacttcagtgcctagtgtagtaactgaaatcttcaatgacacattaacatcacaatggcgaatggtgacttttctttcacgatttcattaatttgaaagcacacaggaaagttgctccattgataacgtgtatggagacttcggttttagtcaattccatatctcaatcttaatggtgattcttctctgttgaactgaagtttgtgagagtagttttcctttgctacttgaatagcaataaaagcgtgttaactttttgattgatgaaagaagtacaaaaagcctttagccttgaggtgccttctgaaattaaccaaatttcatccatatatcctcttttataaacttatagaatgtcaaa

SEQ ID NO: 182860 - DNA, 3617 bp, Homo sapiens
  Payload ID: 16027
  Gene Symbol: SLC12A2
  Gene Name: solute carrier family 12 (sodium/potassium/chloride transporter), member 2
  ENST ID: ENST00000628403
  CDS Start-End: 165-3617
ggtggcctctgtggccgtccaggctagcggcggcccgcaggcggcggggagaaagactctctcacctggtcttgcggctgtggccaccgccggccaggggtgtggagggcgtgctgccggagacgtccgccgggctctgcagttccgccgggggtcgggcagctatggagccgcggcccacggcgccctcctccggcgccccgggactggccggggtcggggagacgccgtcagccgctgcgctggccgcagccagggtggaactgcccggcacggctgtgccctcggtgccggaggatgctgcgcccgcgagccgggacggcggcggggtccgcgatgagggccccgcggcggccggggacgggctgggcagacccttggggcccaccccgagccagagccgtttccaggtggacctggtttccgagaacgccgggcgggccgctgctgcggcggcggcggcggcggcggcagcggcggcggctggtgctggggcgggggccaagcagacccccgcggacggggaagccagcggcgagagcgagccggctaaaggcagcgaggaagccaagggccgcttccgcgtgaacttcgtggacccagctgcctcctcgtcggctgaagacagcctgtcagatgctgccggggtcggagtcgacgggcccaacgtgagcttccagaacggcggggacacggtgctgagcgagggcagcagcctgcactccggcggcggcggcggcagtgggcaccaccagcactactattatgatacccacaccaacacctactacctgcgcaccttcggccacaacaccatggacgctgtgcccaggatcgatcactaccggcacacagccgcgcagctgggcgagaagctgctccggcctagcctggcggagctccacgacgagctggaaaaggaaccttttgaggatggctttgcaaatggggaagaaagtactccaaccagagatgctgtggtcacgtatactgcagaaagtaaaggagtcgtgaagtttggctggatcaagggtgtattagtacgttgtatgttaaacatttggggtgtgatgcttttcattagattgtcatggattgtgggtcaagctggaataggtctatcagtccttgtaataatgatggccactgttgtgacaactatcacaggattgtctacttcagcaatagcaactaatggatttgtaagaggaggaggagcatattatttaatatctagaagtctagggccagaatttggtggtgcaattggtctaatcttcgcctttgccaacgctgttgcagttgctatgtatgtggttggatttgcagaaaccgtggtggagttgcttaaggaacattccatacttatgatagatgaaatcaatgatatccgaattattggagccattacagtcgtgattcttttaggtatctcagtagctggaatggagtgggaagcaaaagctcagattgttcttttggtgatcctacttcttgctattggtgatttcgtcataggaacatttatcccactggagagcaagaagccaaaagggttttttggttataaatctgaaatatttaatgagaactttgggcccgattttcgagaggaagagactttcttttctgtatttgccatcttttttcctgctgcaactggtattctggctggagcaaatatctcaggtgatcttgcagatcctcagtcagccatacccaaaggaacactcctagccattttaattactacattggtttacgtaggaattgcagtatctgtaggttcttgtgttgttcgagatgccactggaaacgttaatgacactatcgtaacagagctaacaaactgtacttctgcagcctgcaaattaaactttgatttttcatcttgtgaaagcagtccttgttcctatggcctaatgaacaacttccaggtaatgagtatggtgtcaggatttacaccactaatttctgcaggtatattttcagccactctttcttcagcattagcatccctagtgagtgctcccaaaatatttcaggctctatgtaaggacaacatctacccagctttccagatgtttgctaaaggttatgggaaaaataatgaacctcttcgtggctacatcttaacattcttaattgcacttggattcatcttaattgctgaactgaatgttattgcaccaattatctcaaacttcttccttgcatcatatgcattgatcaatttttcagtattccatgcatcacttgcaaaatctccaggatggcgtcctgcattcaaatactacaacatgtggatatcacttcttggagcaattctttgttgcatagtaatgttcgtcattaactggtgggctgcattgctaacatatgtgatagtccttgggctgtatatttatgttacctacaaaaaaccagatgtgaattggggatcctctacacaagccctgacttacctgaatgcactgcagcattcaattcgtctttctggagtggaagaccacgtgaaaaactttaggccacagtgtcttgttatgacaggtgctccaaactcacgtccagctttacttcatcttgttcatgatttcacaaaaaatgttggtttgatgatctgtggccatgtacatatgggtcctcgaagacaagccatgaaagagatgtccatcgatcaagccaaatatcagcgatggcttattaagaacaaaatgaaggcattttatgctccagtacatgcagatgacttgagagaaggtgcacagtatttgatgcaggctgctggtcttggtcgtatgaagccaaacacacttgtccttggatttaagaaagattggttgcaagcagatatgagggatgtggatatgtatataaacttatttcatgatgcttttgacatacaatatggagtagtggttattcgcctaaaagaaggtctggatatatctcatcttcaaggacaagaagaattattgtcatcacaagagaaatctcctggcaccaaggatgtggtagtaagtgtggaatatagtaaaaagtccgatttagatacttccaaaccactcagtgaaaaaccaattacacacaaagttgaggaagaggatggcaagactgcaactcaaccactgttgaaaaaagaatccaaaggccctattgtgcctttaaatgtagctgaccaaaagcttcttgaagctagtacacagtttcagaaaaaacaaggaaagaatactattgatgtctggtggctttttgatgatggaggtttgaccttattgataccttaccttctgacgaccaagaaaaaatggaaagactgtaagatcagagtattcattggtggaaagataaacagaatagaccatgaccggagagcgatggctactttgcttagcaagttccggatagacttttctgatatcatggttctaggagatatcaataccaaaccaaagaaagaaaatattatagcttttgaggaaatcattgagccatacagacttcatgaagatgataaagagcaagatattgcagataaaatgaaagaagatgaaccatggcgaataacagataatgagcttgaactttataagaccaagttttatgaaccatgctaa

SEQ ID NO: 182861 - DNA, 3447 bp, Homo sapiens
  Payload ID: 16028
  Gene Symbol: SLC12A8
  Gene Name: solute carrier family 12, member 8
  Uniprot ID: A0AV02
  ENST ID: ENST00000393469
  CDS Start-End: 51-2195
tccagagcagtctccctgtccagatcaccaggatccctgcttgctggagaatgacccagatgtcccaggtgcaggagctcttccatgaggcagcccagcaggatgccctggcccagccccagccctggtggaagacccagctgttcatgtgggagcctgtgctgtttgggacctgggatggtgtgttcacatcctgcatgatcaacatctttggggttgtgctcttcctgaggactggctggctggtgggaaacacaggagtgctcctgggcatgttcctggtgtccttcgtcatcctggtggccctcgtcacggtgctgtctggcattggcgtcggggagcgcagcagcatcggcagcggtggcgtctactccatgatctcctcggtcctgggtgggcagacgggaggcaccatcgggctgctctatgtgtttggacagtgtgttgcaggtgccatgtatatcaccggctttgctgaatccatctcggatttgctgggcctcgggaatatctgggctgtgcgaggaatttcagttgcggtgcttctggccttgctgggcattaacctcgcaggtgtcaaatggataatccgcctccagctgctgttgctgttcctgctggccgtgtccacactggactttgtggtgggttctttcacccacctggacccagaacatggtttcattggatattcacccgaactgctacagaacaacacgctgcccgattacagcccgggggaatcttttttcactgtctttggggttttcttcccagcggctacaggagtcatggccggcttcaacatggggggcgacctcagggagcctgccgccagcattcccctgggctccctggcagctgttggcatctcgtggtttctgtacatcatcttcgtcttcctcctgggcgccatctgcactcgagaggcccttcgctatgacttcctgatagcggaaaaggtatccctcatgggcttcctgttccttttgggcttatacatctcgtccctggcttcctgcatgggaggactttatggagctccccgcatcctgcagtgcattgcccaggagaaagtgatccctgcacttgcctgtctgggacaagggaaggggccaaacaaaacacccgtggctgccatctgcctgaccagcttggtgaccatggcctttgtttttgtgggtcaagtgaacgttctggcccccatcgtcaccatcaacttcatgctgacatacgttgcagtggactactcttacttctccctgtccatgtgttcctgcagcctgaccccggtgcctgagccggtgctcagggagggcgcagaaggcctccactgctctgagcacctgctcttagagaaagctcccagttacggctctgagggacctgcccaaagagtcttggagggcacgctactggaattcaccaaggacatggatcagctcctccagctaaccaggaagcttgagagtagccagcccaggcaaggagagggtaacaggaccccagaaagtcagaagaggaaaagcaagaaggccaccaagcagaccctacaagatagcttcctcttggacctcaaatcccctccttctttccctgtcgagatctctgacaggttgcccgctgcctcctgggaggggcaggagtcctgctggaacaagcagacttccaagagcgaagggactcagcctgagggaacatatggagagcaacttgttcctgagctgtgcaaccaatcagagtccagtggagaagatttcttcctgaagtccaggctccaagaacaagatgtctggagaagatccacttctttctatacccacatgtgcaacccctgggtctccctgttgggggctgttgggtcccttctcatcatgtttgtgatacagtgggtgtataccctggttaacatgggtgttgctgccatcgtgtatttctacattggccgggccagtccagggcttcaccttggatcagcctccaacttcagctttttccggtggatgaggtctctcttgctcccctcctgcaggagcttgcggtcccctcaggagcagatcatcttggcgccgtccctggctaaggttgacatggagatgactcagctcacccaggagaatgcagacttcgccactcgggatcgctaccaccactcctccctcgtgaaccgggagcagctgatgcctcactactagatgcagtgctgggaccttcctcttttggagctgtcccatgtacagtggacccaagctcaggaccttcgtggagctgcttctccaacctgagaaactcaagacccatcctcccgctgtcactttggacaatggaaatctacattttcttttccctttttttttttttttgagacagagtctcgccctgtcacccaggctggagtccagtggcacaatcttggctcactgcaacctctgcttcccgagttcaagcaattctcctgcctcagcctcctgagtagctgggattataggcatgcaccaccacacccagctattttttgtatttttactggagacagggtttcaccatgttggccaggctggtctcgaactcctgacctcgtgatccacccgtctcagcctcccaaagtactgggattacaggcgtgagccaccatgcctggccagaaatctatgttttcttagaacatgtggaagaaggaaaaagacaaaaaaggaaatctggattctgaggaccacgtctcacccagggtgacatcaggaatggtgctagcctctgcaacacgacacccagtctgaagagctctatacaggtactaagactagcaggggacaccaagactctgcacaaccagattgcttgtgcagagggccacaataagtgtatgttttatattttattgtattatttattcaaaaataaataatacactcacatgtttccacacccaaaagatatatagagtgaaaagtctccctccaatccttattctccacctgctcagttcctgtctaccctggcctagaggtaaccactattctcatccgtacatccagcatttctttatggatatacaagcaaatgggaatgtagagtctcacattctctctttatacacaaaagttagcacgttatacacatgttctgcaccttgcttttttcccttaacaatctatcttggagacatttcatatcaattcatatgccatttgttcatttttttcattgtataaatgtgttataatttatttcgccagttccacaatgatgagcatttggattctttccaatcttttgcaatgacaatcagctctgcagtgaataatcttgtacaaatgtgcaagcataaagtgtatctctaggataaattcccaaaagtggaattgcaggatcaaaaggtacatgcatttgtaaactattattgtttagtgagggtctttttaattaaagaattaacatgaattgcct

SEQ ID NO: 182862 - DNA, 2831 bp, Homo sapiens
  Payload ID: 16028
  Gene Symbol: SLC12A8
  Gene Name: solute carrier family 12, member 8
  Uniprot ID: A0AV02
  ENST ID: ENST00000430155
  CDS Start-End: 30-1577
agttgccaggggagattgaaaagcagcctatgcgcagagctgcagctggagggcttgcggtgggacagcttccaggagagggtcccgcaggagaggaaggggcagccctggggaaggcgatgcgtggaggaggctgctcaccccattccccatctgggtgtctttcaggagtcatggccggcttcaacatggggggcgacctcagggagcctgccgccagcattcccctgggctccctggcagctgttggcatctcgtggtttctgtacatcatcttcgtcttcctcctgggcgccatctgcactcgagaggcccttcgctatgacttcctgatagcggaaaaggtatccctcatgggcttcctgttccttttgggcttatacatctcgtccctggcttcctgcatgggaggactttatggagctccccgcatcctgcagtgcattgcccaggagaaagtgatccctgcacttgcctgtctgggacaagggaaggggccaaacaaaacacccgtggctgccatctgcctgaccagcttggtgaccatggcctttgtttttgtgggtcaagtgaacgttctggcccccatcgtcaccatcaacttcatgctgacatacgttgcagtggactactcttacttctccctgtccatgtgttcctgcagcctgaccccggtgcctgagccggtgctcagggagggcgcagaaggcctccactgctctgagcacctgctcttagagaaagctcccagttacggctctgagggacctgcccaaagagtcttggagggcacgctactggaattcaccaaggacatggatcagctcctccagctaaccaggaagcttgagagtagccagcccaggcaaggagagggtaacaggaccccagaaagtcagaagaggaaaagcaagaaggccaccaagcagaccctacaagatagcttcctcttggacctcaaatcccctccttctttccctgtcgagatctctgacaggttgcccgctgcctcctgggaggggcaggagtcctgctggaacaagcagacttccaagagcgaagggactcagcctgagggaacatatggagagcaacttgttcctgagctgtgcaaccaatcagagtccagtggagaagatttcttcctgaagtccaggctccaagaacaagatgtctggagaagatccacttctttctatacccacatgtgcaacccctgggtctccctgttgggggctgttgggtcccttctcatcatgtttgtgatacagtgggtgtataccctggttaacatgggtgttgctgccatcgtgtatttctacattggccgggccagtccagggcttcaccttggatcagcctccaacttcagctttttccggtggatgaggtctctcttgctcccctcctgcaggagcttgcggtcccctcaggagcagatcatcttggcgccgtccctggctaaggttgacatggagatgactcagctcacccaggagaatgcagacttcgccactcgggatcgctaccaccactcctccctcgtgaaccgggagcagctgatgcctcactactagatgcagtgctgggaccttcctcttttggagctgtcccatgtacagtggacccaagctcaggaccttcgtggagctgcttctccaacctgagaaactcaagacccatcctcccgctgtcactttggacaatggaaatctacattttcttttccctttttttttttttttgagacagagtctcgccctgtcacccaggctggagtccagtggcacaatcttggctcactgcaacctctgcttcccgagttcaagcaattctcctgcctcagcctcctgagtagctgggattataggcatgcaccaccacacccagctattttttgtatttttactggagacagggtttcaccatgttggccaggctggtctcgaactcctgacctcgtgatccacccgtctcagcctcccaaagtactgggattacaggcgtgagccaccatgcctggccagaaatctatgttttcttagaacatgtggaagaaggaaaaagacaaaaaaggaaatctggattctgaggaccacgtctcacccagggtgacatcaggaatggtgctagcctctgcaacacgacacccagtctgaagagctctatacaggtactaagactagcaggggacaccaagactctgcacaaccagattgcttgtgcagagggccacaataagtgtatgttttatattttattgtattatttattcaaaaataaataatacactcacatgtttccacacccaaaagatatatagagtgaaaagtctccctccaatccttattctccacctgctcagttcctgtctaccctggcctagaggtaaccactattctcatccgtacatccagcatttctttatggatatacaagcaaatgggaatgtagagtctcacattctctctttatacacaaaagttagcacgttatacacatgttctgcaccttgcttttttcccttaacaatctatcttggagacatttcatatcaattcatatgccatttgttcatttttttcattgtataaatgtgttataatttatttcgccagttccacaatgatgagcatttggattctttccaatcttttgcaatgacaatcagctctgcagtgaataatcttgtacaaatgtgcaagcataaagtgtatctctaggataaattcccaaaagtggaattgcaggatcaaaaggtacatgcatttgtaaactattattgtttagtgagggtctttttaattaaagaattaacatgaattgcctaa

SEQ ID NO: 182863 - DNA, 493 bp, Homo sapiens
  Payload ID: 16028
  Gene Symbol: SLC12A8
  Gene Name: solute carrier family 12, member 8
  ENST ID: ENST00000462437
  CDS Start-End: 156-493
cagggtaaagggtttcctgaagtttctacctgctctaagtttctacccttgaggctgattgactagtccagtgagatcaaggaaatgaaaggcatttcacacaccagcaggatgccctggcccagccccagccctggtggaagacccagctgttcatgtgggagcctgtgctgtttgggacctgggatggtgtgttcacatcctgcatgatcaacatctttggggttgtgctcttcctgaggactggctggctggtgggaaacacaggagtgctcctgggcatgttcctggtgtccttcgtcatcctggtggccctcgtcacggtgctgtctggcattggcgtcggggagcgcagcagcatcggcagcggtggcgtctactccatgatctcctcggtcctgggtgggcagacgggaggcaccatcgggctgctctatgtgtttggacagtgtgttgcaggtgccatgtatatcaccggctttgctgaatccat

SEQ ID NO: 182864 - DNA, 2989 bp, Homo sapiens
  Payload ID: 16028
  Gene Symbol: SLC12A8
  Gene Name: solute carrier family 12, member 8
  Uniprot ID: A0AV02
  ENST ID: ENST00000469902
  CDS Start-End: 112-2256
agccacgtggcggcggggcggggaccgggcgggccgggcgctgggagctggctgtcccaggagcagagcagtctccctgtccagatcaccaggatccctgcttgctggagaatgacccagatgtcccaggtgcaggagctcttccatgaggcagcccagcaggatgccctggcccagccccagccctggtggaagacccagctgttcatgtgggagcctgtgctgtttgggacctgggatggtgtgttcacatcctgcatgatcaacatctttggggttgtgctcttcctgaggactggctggctggtgggaaacacaggagtgctcctgggcatgttcctggtgtccttcgtcatcctggtggccctcgtcacggtgctgtctggcattggcgtcggggagcgcagcagcatcggcagcggtggcgtctactccatgatctcctcggtcctgggtgggcagacgggaggcaccatcgggctgctctatgtgtttggacagtgtgttgcaggtgccatgtatatcaccggctttgctgaatccatctcggatttgctgggcctcgggaatatctgggctgtgcgaggaatttcagttgcggtgcttctggccttgctgggcattaacctcgcaggtgtcaaatggataatccgcctccagctgctgttgctgttcctgctggccgtgtccacactggactttgtggtgggttctttcacccacctggacccagaacatggtttcattggatattcacccgaactgctacagaacaacacgctgcccgattacagcccgggggaatcttttttcactgtctttggggttttcttcccagcggctacaggagtcatggccggcttcaacatggggggcgacctcagggagcctgccgccagcattcccctgggctccctggcagctgttggcatctcgtggtttctgtacatcatcttcgtcttcctcctgggcgccatctgcactcgagaggcccttcgctatgacttcctgatagcggaaaaggtatccctcatgggcttcctgttccttttgggcttatacatctcgtccctggcttcctgcatgggaggactttatggagctccccgcatcctgcagtgcattgcccaggagaaagtgatccctgcacttgcctgtctgggacaagggaaggggccaaacaaaacacccgtggctgccatctgcctgaccagcttggtgaccatggcctttgtttttgtgggtcaagtgaacgttctggcccccatcgtcaccatcaacttcatgctgacatacgttgcagtggactactcttacttctccctgtccatgtgttcctgcagcctgaccccggtgcctgagccggtgctcagggagggcgcagaaggcctccactgctctgagcacctgctcttagagaaagctcccagttacggctctgagggacctgcccaaagagtcttggagggcacgctactggaattcaccaaggacatggatcagctcctccagctaaccaggaagcttgagagtagccagcccaggcaaggagagggtaacaggaccccagaaagtcagaagaggaaaagcaagaaggccaccaagcagaccctacaagatagcttcctcttggacctcaaatcccctccttctttccctgtcgagatctctgacaggttgcccgctgcctcctgggaggggcaggagtcctgctggaacaagcagacttccaagagcgaagggactcagcctgagggaacatatggagagcaacttgttcctgagctgtgcaaccaatcagagtccagtggagaagatttcttcctgaagtccaggctccaagaacaagatgtctggagaagatccacttctttctatacccacatgtgcaacccctgggtctccctgttgggggctgttgggtcccttctcatcatgtttgtgatacagtgggtgtataccctggttaacatgggtgttgctgccatcgtgtatttctacattggccgggccagtccagggcttcaccttggatcagcctccaacttcagctttttccggtggatgaggtctctcttgctcccctcctgcaggagcttgcggtcccctcaggagcagatcatcttggcgccgtccctggctaaggttgacatggagatgactcagctcacccaggagaatgcagacttcgccactcgggatcgctaccaccactcctccctcgtgaaccgggagcagctgatgcctcactactagatgcagtgctgggaccttcctcttttggagctgtcccatgtacagtggacccaagctcaggaccttcgtggagctgcttctccaacctgagaaactcaagacccatcctcccgctgtcactttggacaatggaaatctacattttcttttccctttttttttttttttgagacagagtctcgccctgtcacccaggctggagtccagtggcacaatcttggctcactgcaacctctgcttcccgagttcaagcaattctcctgcctcagcctcctgagtagctgggattataggcatgcaccaccacacccagctattttttgtatttttactggagacagggtttcaccatgttggccaggctggtctcgaactcctgacctcgtgatccacccgtctcagcctcccaaagtactgggattacaggcgtgagccaccatgcctggccagaaatctatgttttcttagaacatgtggaagaaggaaaaagacaaaaaaggaaatctggattctgaggaccacgtctcacccagggtgacatcaggaatggtgctagcctctgcaacacgacacccagtctgaagagctctatacaggtactaagactagcaggggacaccaagactctgcacaaccagattgcttgtgcagagggccacaataagtgtatgttttatattttattgtattatttattcaaaaataaataatacactcacatgtttccacaccc

SEQ ID NO: 182865 - DNA, 3045 bp, Homo sapiens
  Payload ID: 16028
  Gene Symbol: SLC12A8
  Gene Name: solute carrier family 12, member 8
  ENST ID: ENST00000473262
  CDS Start-End: 1-481
gcaggatgccctggcccagccccagccctggtggaagacccagctgttcatgtgggagcctgtgctgtttgggacctgggatggtgtgttcacatcctgcatgatcaacatctttggggttgtgctcttcctgaggactggctggctggtgggaaacacaggagtgctcctgggcatgttcctggtgtccttcgtcatcctggtggccctcgtcacggtgctgtctggcattggcgtcggggagcgcagcagcatcggcagcggtggcgtctactccatgatctcctcggtcctgggtgggcagacgggaggcaccatcgggctgctctatgtgtttggacaggtgccatgtatatcaccggctttgctgaatccatctcggatttgctgggcctcgggaatatctgggctgtgcgaggaatttcagttgcggtgcttctggccttgctgggcattaacctcgcaggtgtcaaatggataatccgcctccagctgctgttgctgttcctgctggccgtgtccacactggactttgtggtgggttctttcacccacctggacccagaacatggtttcattggatattcacccgaactgctacagaacaacacgctgcccgattacagcccgggggaatcttttttcactgtctttggggttttcttcccagcggctacaggagtcatggccggcttcaacatggggggcgacctcagggagcctgccgccagcattcccctgggctccctggcagctgttggcatctcgaagaagcttctctgcccttcattgggtggtttctgtacatcatcttcgtcttcctcctgggcgccatctgcactcgagaggcccttcgctatgacttcctgatagcggaaaaggtatccctcatgggcttcctgttccttttgggcttatacatctcgtccctggcttcctgcatgggaggactttatggagctccccgcatcctgcagtgcattgcccaggagaaagtgatccctgcacttgcctgtctgggacaagggaaggggccaaacaaaacacccgtggctgccatctgcctgaccagcttggtgaccatggcctttgtttttgtgggtcaagtgaacgttctggcccccatcgtcaccatcaacttcatgctgacatacgttgcagtggactactcttacttctccctgtccatgtgttcctgcagcctgaccccggtgcctgagccggtgctcagggagggcgcagaaggcctccactgctctgagcacctgctcttagagaaagctcccagttacggctctgagggacctgcccaaagagtcttggagggcacgctactggaattcaccaaggacatggatcagctcctccagctaaccaggaagcttgagagtagccagcccaggcaaggagagggtaacaggaccccagaaagtcagaagaggaaaagcaagaaggccaccaagcagaccctacaagatagcttcctcttggacctcaaatcccctccttctttccctgtcgagatctctgacaggttgcccgctgcctcctgggaggggcaggagtcctgctggaacaagcagacttccaagagcgaagggactcagcctgagggaacatatggagagcaacttgttcctgagctgtgcaaccaatcagagtccagtggagaagatttcttcctgaagtccaggctccaagaacaagatgtctggagaagatccacttctttctatacccacatgtgcaacccctgggtctccctgttgggggctgttgggtcccttctcatcatgtttgtgatacagtgggtgtataccctggttaacatgggtgttgctgccatcgtgtatttctacattggccgggccagtccagggcttcaccttggatcagcctccaacttcagctttttccggtggatgaggtctctcttgctcccctcctgcaggagcttgcggtcccctcaggagcagatcatcttggcgccgtccctggctaaggttgacatggagatgactcagctcacccaggagaatgcagacttcgccactcgggatcgctaccaccactcctccctcgtgaaccgggagcagctgatgcctcactactagatgcagtgctgggaccttcctcttttggagctgtcccatgtacagtggacccaagctcaggaccttcgtggagctgcttctccaacctgagaaactcaagacccatcctcccgctgtcactttggacaatggaaatctacattttcttttccctttttttttttttttgagacagagtctcgccctgtcacccaggctggagtccagtggcacaatcttggctcactgcaacctctgcttcccgagttcaagcaattctcctgcctcagcctcctgagtagctgggattataggcatgcaccaccacacccagctattttttgtatttttactggagacagggtttcaccatgttggccaggctggtctcgaactcctgacctcgtgatccacccgtctcagcctcccaaagtactgggattacaggcgtgagccaccatgcctggccagaaatctatgttttcttagaacatgtggaagaaggaaaaagacaaaaaaggaaatctggattctgaggaccacgtctcacccagggtgacatcaggaatggtgctagcctctgcaacacgacacccagtctgaagagctctatacaggtactaagactagcaggggacaccaagactctgcacaaccagattgcttgtgcagagggccacaataagtgtatgttttatattttattgtattatttattcaaaaataaataatacactcacatgtttccacacccaaaagatatatagagtgaaaagtctccctccaatccttattctccacctgctcagttcctgtctaccctggcctagaggtaaccactattctcatccgtacatccagcatttctttatggatatacaagcaaatgggaatgtagagtctcacattctctctttatacacaaaagttagcacgttatacacatgttctg

SEQ ID NO: 182866 - DNA, 622 bp, Homo sapiens
  Payload ID: 16028
  Gene Symbol: SLC12A8
  Gene Name: solute carrier family 12, member 8
  ENST ID: ENST00000479826
  CDS Start-End: 1-622
ctgggatggtgtgttcacatcctgcatgatcaacatctttggggttgtgctcttcctgaggactggctggctggtgggaaacacaggagtgctcctgggcatgttcctggtgtccttcgtcatcctggtggccctcgtcacggtgctgtctggcattggcgtcggggagcgcagcagcatcggcagcggtggcgtctactccatgatctcctcggtcctgggtgggcagacgggaggcaccatcgggctgctctatgtgtttggacagaacatggtttcattggatattcacccgaactgctacagaacaacacgctgcccgattacagcccgggggaatcttttttcactgtctttggggttttcttcccagcggctacaggagtcatggccggcttcaacatggggggcgacctcagggagcctgccgccagcattcccctgggctccctggcagctgttggcatctcgtggtttctgtacatcatcttcgtcttcctcctgggcgccatctgcactcgagaggcccttcgctatgacttcctgatagcggaaaaggtatccctcatgggcttcctgttccttttgggcttatacatctcgtccctggcttcctgcatgg

SEQ ID NO: 182867 - DNA, 3273 bp, Homo sapiens
  Payload ID: 16029
  Gene Symbol: SLC12A9
  Gene Name: solute carrier family 12, member 9
  Uniprot ID: Q9BXP2
  ENST ID: ENST00000354161
  CDS Start-End: 126-2870
gtcttttccggcccccgtgcactctccgcccgagcggagccccccggctcgcggggatcgcccccgagcgctgcgtcctgcgggtcacctaacccatttgtggcttcctctacctgtgctcagccatggccagcgagagctcacctctgctggcctaccggctcctgggggaggagggggttgccctccctgccaatggggccgggggtcctggaggggcgtctgcccggaagctgtccaccttcctgggtgtggtggtgcccactgtcctgtccatgttcagcatagttgtttttctgaggattgggttcgtggtgggtcatgctgggctactgcaggccctggccatgctgctggttgcctacttcatcctggcactcaccgtcctctctgtctgtgccatcgccaccaatggagccgtgcaggggggcggagcctacttcatgatcagccgcacactggggcccgaggtcgggggcagcattgggctcatgttctacctggctaacgtctgtggctgtgccgtctccctcctggggctggtggagtctgtgcttgatgtcttcggggccgatgccacagggcccagtgggctccgggtcctgccccagggctacggctggaacctgctgtatggctccctgctgctgggccttgtgggtggggtctgcaccctgggagccggcctctatgcccgggcctcattcctcacattcctgctggtctctggctccctggcctctgtgctcatcagttttgtggctgtggggccgagggacatccgcttgactcctaggcctggccccaatggctcctccctgccgccccggtttggccacttcaccggcttcaacagcagtaccctgaaggacaacttgggcgctggctatgctgaggactacaccacgggagccgtgatgaattttgccagcgtctttgctgtcctctttaacggctgtacaggcatcatggctggggccaacatgtcaggggagctgaaggaccccagccgggcgatccctctgggcacgatcgtcgccgtcgcctacaccttcttcgtctatgtcctgcttttctttctctccagcttcacttgtgacaggaccctgctgcaggaagactatgggttcttccgcgccatcagcctgtggcccccactggtgttgatcggaatctatgccacagcgctctcagcgtccatgagctcgctcattggtgcctcccgcatcctccatgccctggcccgggatgacctctttggcgtgatcttggcaccggccaaggttgtgtcccgagggggaaacccctgggcagctgtactttattcttggggcctggtgcagctggtgctcctggctgggaagctgaacacactggctgctgtggtcactgtcttctacctggtggcctatgctgccgtggacctgtcctgcctgagcctggagtgggcctcggcccccaacttccgccccaccttcagcctgttctcctggcacacctgcctgctgggggtggcctcctgcctgctcatgatgttcctcatcagtcctggcgcggctggtggctccctgctcctcatgggtctgctggctgccctgctcaccgcgcgaggaggccccagtagctggggctatgtcagccaggccttgcttttccaccaggtgcgtaagtatctgcttcggctggacgtccggaaggatcacgtgaagttctggcggccccagctgctgctcctggtggggaacccccggggcgccctgcctctgctgcggttggccaaccagcttaagaagggggggctgtatgtgctgggccacgtcaccctgggagacctcgactccctgccctcggaccctgtacagccgcagtatggggcatggctcagcctggtggaccgtgcccaggtgaaggcttttgtggatctaaccctctcaccctccgtgcgccagggggctcagcatctgctgcgaatctccggcctcggtggcatgaagcccaacacgttggtcctaggtttctacgatgacgctccaccgcaggaccatttcctgacggacccggctttctctgagcctgcagacagcaccagggagggcagttccccagctctgagcaccctgttccctcctccccgggctcctgggagcccccgggccctcaatccccaggactatgtggccacggtggccgacgccctcaagatgaacaagaatgtggtgctggcccgggccagcggggccttgccccctgagcggctgagccgggggtctgggggcacctctcagctgcaccatgtggacgtgtggcccctcaacctgctgcggccccggggtgggcccggctatgtggatgtctgcggcctcttcctgctgcagatggcaaccatcttgggcatggtgcccgcttggcatagcgcccggctccggatcttcctgtgcctggggcctcgggaggcgcctggggcggccgaggggcggctgcgggcactgctgagccaactgaggatccgggctgaggtgcaggaggtggtgtggggcgagggggccggggctggggaacccgaggcggaggaggaaggggactttgtgaacagtgggcggggagacgcagaggcagaggccctggcacgcagcgccaacgccctggttcgggcccagcaggggcgcggcacaggaggagggccgggtgggccggagggtggggatgctgagggccccatcacagccctcaccttcctgtacttgcctcggccgccagccgatcccgcccgatacccccgctacctggcgctactggagactctaacccgagacctgggccccacgctgctggttcatggggtcactccagtcacctgcactgatctgtgatgcccctgcctccagggctaggtagagagggcccaggcaggcggcctatcctgatccttggaggaggaggaagaggaggccactgtggcccgtggccctgcccttgggacgtggagcccaggggaggtttgaaggggatcctgggcttgggcatcacgcccacctcctttggcagagggaccccagcacactaactctgggtggctgtccccaccgtgcaggggagggagtccgcagcctcccttcactggtgccttgatgctaggggccaggcctcctctgtgactctgggctacctcagtttccccattttggccagactcaccggcccactggggtggtgatgttttcgttctgttttatttttctaactctgctgaccatgaataaaagaccaaaacac

SEQ ID NO: 182868 - DNA, 720 bp, Homo sapiens
  Payload ID: 16029
  Gene Symbol: SLC12A9
  Gene Name: solute carrier family 12, member 9
  ENST ID: ENST00000448342
  CDS Start-End: 156-293
ggctccaggcctggcatcccggtagccgcagctgtcttttccggcccccgtgcactctccgcccgagcggagccccccggctcgcggggatcgcccccgagcgctgcgtcctgcgggtggctggctatgctgaggactacaccacgggagccgtgatgaattttgccagcgtctttgctgtcctctttaacggctgtacaggcatcatggctggggccaacatgtcaggaccctgctgcaggaagactatgggttcttccgcgccatcagcctgtggcccccactggtgttgatcggaatctatgccacagcgctctcagcgtccatgagctcgctcattggtgcctcccgcatcctccatgccctggcccgggatgacctctttggcgtgatcttggcaccggccaaggttgtgtcccgagggggaaacccctgggcagctgtactttattcttggggcctggtgcagggttcactggcactttctggggctcattgacactttggggtacactggcattctttggtgttcactggcattttgggggtgcactggcactttggaacaacggcacgcctcttggcccttgcccagctggtgctcctggctgggaagctgaacacactggctgctgtggtcactgtcttctacctggtggcctatgctgccgtggacctgtcctgcctgagcctggagtgggcctcggcccccaacttccg

SEQ ID NO: 182869 - DNA, 916 bp, Homo sapiens
  Payload ID: 16029
  Gene Symbol: SLC12A9
  Gene Name: solute carrier family 12, member 9
  ENST ID: ENST00000418037
  CDS Start-End: 448-916
gcatcccggtagccgcagctgtcttttccggcccccgtgcactctccgcccgagcggagccccccggctcgcggggatcgcccccgagcgctgcgtcctgcggatgccacagggcccagtgggctccgggtcctgccccagggctacggctggaacctgctgtatggctccctgctgctgggccttgtgggtggggtctgcaccctgggagccggcctctatgcccgggcctcattcctcacattcctgctggtctctggctccctggcctctgtgctcatcagttttgtggctgtggggccgagggacatccgcttgactcctaggcctggccccaatggctcctccctgccgccccggtttggccacttcaccggcttcaacagcagtaccctgaaggacaacttgggcgctggctatgctgaggactacaccacgggagccgtgatgaattttgccagcgtctttgctgtcctctttaacggctgtacaggcatcatggctggggccaacatgtcaggggagctgaaggaccccagccgggcgatccctctgggcacgatcgtcgccgtcgcctacaccttcttcgtctatgtcctgcttttctttctctccagcttcacttgtgacaggaccctgctgcaggaagactatgggttcttccgcgccatcagcctgtggcccccactggtgttgatcggaatctatgccacagcgctctcagcgtccatgagctcgctcattggtgcctcccgcatcctccatgccctggcccgggatgacctctttggcgtgatcttggcaccggccaaggttgtgtcccgagggggaaacccctgggcagctgtactttattcttggggcctggtgcagctggtgctcctggctgggaagctgaacacactggctgctgtgg

SEQ ID NO: 182870 - DNA, 589 bp, Homo sapiens
  Payload ID: 16029
  Gene Symbol: SLC12A9
  Gene Name: solute carrier family 12, member 9
  ENST ID: ENST00000434158
  CDS Start-End: 204-589
ttcctcttgcattgctagttaaggaaggagaggctggagaagcctgtgccgtcagagaacctttgcccctttccagaaccggtgccatccctagtctcaggaacataagggaaggggtggcccccaggagccgggaggggccttgaaacccctgctgacaggtcacctaacccatttgtggcttcctctacctgtgctcagccatggccagcgagagctcacctctgctggcctaccggctcctgggggaggagggggttgccctccctgccaatggggccgggggtcctggaggggcgtctgcccggaagctgtccaccttcctgggtgtggtggtgcccactgtcctgtccatgttcagcatagttgtttttctgaggattgggttcgtggtgggtcatgctgggctactgcaggccctggccatgctgctggttgcctacttcatcctggcactcaccgtcctctctgtctgtgccatcgccaccaatggagccgtgcaggggggcggagcctacttcatgatcagccgcacactggggcccgaggtcgggggcagcattgggctcatgttctacctggctaacgt

SEQ ID NO: 182871 - DNA, 840 bp, Homo sapiens
  Payload ID: 16029
  Gene Symbol: SLC12A9
  Gene Name: solute carrier family 12, member 9
  ENST ID: ENST00000416675
  CDS Start-End: 106-840
tccgcccgagcggagccccccggctcgcggggatcgcccccgagcgctgcgtcctgcgggtgggtcacctaacccatttgtggcttcctctacctgtgctcagccatggccagcgagagctcacctctgctggcctaccggctcctgggggaggagggggttgccctccctgccaatggggccgggggtcctggaggggcgtctgcccggaagctgtccaccttcctgggtgtggtggtgcccactgtcctgtccatgttcagcatagttgtttttctgaggattgctggctatgctgaggactacaccacgggagccgtgatgaattttgccagcgtctttgctgtcctctttaacggctgtacaggcatcatggctggggccaacatgtcaggggagctgaaggaccccagccgggcgatccctctgggcacgatcgtcgccgtcgcctacaccttcttcgtctatgtcctgcttttctttctctccagcttcacttgtgacaggaccctgctgcaggaagactatgggttcttccgcgccatcagcctgtggcccccactggtgttgatcggaatctatgccacagcgctctcagcgtccatgagctcgctcattggtgcctcccgcatcctccatgccctggcccgggatgacctctttggcgtgatcttggcaccggccaaggttgtgtcccgagggggaaacccctgggcagctgtactttattcttggggcctggtgcagctggtgctcctggctgggaagctgaacacactggctgctgtggtcactgtcttctacctggtggcctatgctgccgtggacctgtcctgcctg

SEQ ID NO: 182872 - DNA, 1912 bp, Homo sapiens
  Payload ID: 16029
  Gene Symbol: SLC12A9
  Gene Name: solute carrier family 12, member 9
  Uniprot ID: Q9BXP2
  ENST ID: ENST00000415287
  CDS Start-End: 146-1762
cccggtagccgcagctgtcttttccggcccccgtgcactctccgcccgagcggagccccccggctcgcggggatcgcccccgagcgctgcgtcctgcgggtgggtcacctaacccatttgtggcttcctctacctgtgctcagccatggccagcgagagctcacctctgctggcctaccggctcctgggggaggagggggttgccctccctgccaatggggccgggggtcctggaggggcgtctgcccggaagctgtccaccttcctgggtgtggtggtgcccactgtcctgtccatgttcagcatagttgtttttctgaggattgatgccacagggcccagtgggctccgggtcctgccccagggctacggctggaacctgctgtatggctccctgctgctgggccttgtgggtggggtctgcaccctgggagccggcctctatgcccgggcctcattcctcacattcctgctggtctctggctccctggcctctgtgctcatcagttttgtggctgtggggccgagggacatccgcttgactcctaggcctggccccaatggctcctccctgccgccccggtttggccacttcaccggcttcaacagcagtaccctgaaggacaacttgggcgctggctatgctgaggactacaccacgggagccgtgatgaattttgccagcgtctttgctgtcctctttaacggctgtacaggcatcatggctggggccaacatgtcaggggagctgaaggaccccagccgggcgatccctctgggcacgatcgtcgccgtcgcctacaccttcttcgtctatgtcctgcttttctttctctccagcttcacttgtgacaggaccctgctgcaggaagactatgggttcttccgcgccatcagcctgtggcccccactggtgttgatcggaatctatgccacagcgctctcagcgtccatgagctcgctcattggtgcctcccgcatcctccatgccctggcccgggatgacctctttggcgtgatcttggcaccggccaaggttgtgtcccgagggggaaacccctgggcagctgtactttattcttggggcctggtgcagctggtgctcctggctgggaagctgaacacactggctgctgtggtcactgtcttctacctggtggcctatgctgccgtggacctgtcctgcctgagcctggagtgggcctcggcccccaacttccgccccaccttcagcctgttctcctggcacacctgcctgctgggggtggcctcctgcctgctcatgatgttcctcatcagtcctggcgcggctggtggctccctgctcctcatgggtctgctggctgccctgctcaccgcgcgaggaggccccagtagctggggctatgtcagccaggccttgcttttccaccaggtgcgtaagtatctgcttcggctggacgtccggaaggatcacgtgaagttctggcggccccagctgctgctcctggtggggaacccccggggcgccctgcctctgctgcggttggccaaccagcttaagaagggggggctgtatgtgctgggccacgtcaccctgggagacctcgactccctgccctcggaccctgtacagccgcagtatggggcatggctcagcctggtggaccgtgcccaggtgaaggcttttgtggatctaaccctctcaccctccgtgcgccagggggctcagcatctgctgcgaatctccggcctcgagtcaaactcgcatcccctgccgtgaaacagatgccccgctagaagccgggagtggacagcatcctcctctccatagaattggagtgctcattagtggcaagaatcctaaggcgaactttgcctgtttaagtggaggagattagtcactgagataataaaataaatgcatgtgaaa

SEQ ID NO: 182873 - DNA, 2269 bp, Homo sapiens
  Payload ID: 16029
  Gene Symbol: SLC12A9
  Gene Name: solute carrier family 12, member 9
  Uniprot ID: Q9BXP2
  ENST ID: ENST00000540482
  CDS Start-End: 160-2055
aggctccaggcctggcatcccggtagccgcagctgtcttttccggcccccgtgcactctccgcccgagcggagccccccggctcgcggggatcgcccccgagcgctgcgtcctgcgggtcacctaacccatttgtggcttcctctacctgtgctcagccatggccagcgagagctcacctctgctggcctaccggctcctgggggaggagggggttgccctccctgccaatggggccgggggtcctggaggggcgtctgcccggaagctgtccaccttcctgggtgtggtggtgcccactgtcctgtccatgttcagcatagttgtttttctgaggattgggttcgtggtgggtcatgctgggctactgcaggccctggccatgctgctggttgcctacttcatcctggcactcaccgtcctctctgtctgtgccatcgccaccaatggagccgtgcaggggggcggagcctacttcatgatcagccgcacactggggcccgaggtcgggggcagcattgggctcatgttctacctggctaacgtctgtggctgtgccgtctccctcctggggctggtggagtctgtgcttgatgtcttcggggccgatgccacagggcccagtgggctccgggtcctgccccagggctacggctggaacctgctgtatggctccctgctgctgggccttgtgggtggggtctgcaccctgggagccggcctctatgcccgggcctcattcctcacattcctgctggtctctggctccctggcctctgtgctcatcagttttgtggctgtggggccgagggacatccgcttgactcctaggcctggccccaatggctcctccctgccgccccggtttggccacttcaccggcttcaacagcagtaccctgaaggacaacttgggcgctggctatgctgaggactacaccacgggagccgtgatgaattttgccagcgtctttgctgtcctctttaacggctgtacaggcatcatggctggggccaacatgtcaggggagctgaaggaccccagccgggcgatccctctgggcacgatcgtcgccgtcgcctacaccttcttcgtctatgtcctgcttttctttctctccagcttcacttgtgacaggaccctgctgcaggaagactatgggttcttccgcgccatcagcctgtggcccccactggtgttgatcggaatctatgccacagcgctctcagcgtccatgagctcgctcattggtgcctcccgcatcctccatgccctggcccgggatgacctctttggcgtgatcttggcaccggccaaggttgtgtcccgagggggaaacccctgggcagctgtactttattcttggggcctggtgcagctggtgctcctggctgggaagctgaacacactggctgctgtggtcactgtcttctacctggtggcctatgctgccgtggacctgtcctgcctgagcctggagtgggcctcggcccccaacttccgccccaccttcagcctgttctcctggcacacctgcctgctgggggtggcctcctgcctgctcatgatgttcctcatcagtcctggcgcggctggtggctccctgctcctcatgggtctgctggctgccctgctcaccgcgcgaggaggccccagtagctggggctatgtcagccaggccttgcttttccaccaggtgcgtaagtatctgcttcggctggacgtccggaaggatcacgtgaagttctggcggccccagctgctgctcctggtggggaacccccggggcgccctgcctctgctgcggttggccaaccagcttaagaagggggggctgtatgtgctgggccacgtcaccctgggagacctcgactccctgccctcggaccctgtacagccgcagtatggggcatggctcagcctggtggaccgtgcccaggtgaaggcttttgtggatctaaccctctcaccctccgtgcgccagggggctcagcatctgctgcgaatctccggcctcgagtctgggacgctattaccctggggattcaggtcatgagcttggctgatcagggtgtctggtttgcacaacagagtcaaactcgcatcccctgccgtgaaacagatgccccgctagaagccgggagtggacagcatcctcctctccatagaattggagtgctcattagtggcaagaatcctaaggcgaactttgcctgtttaagtggaggagattagtcactgagataataaaataaatgcatgtgaaagtg

SEQ ID NO: 182874 - DNA, 3815 bp, Homo sapiens
  Payload ID: 16030
  Gene Symbol: SLC13A1
  Gene Name: solute carrier family 13 (sodium/sulfate symporter), member 1
  Uniprot ID: Q9BZW2
  ENST ID: ENST00000194130
  CDS Start-End: 41-1828
tttatttggaggacactattgaagccacctgctcaggacaatgaaattcttcagttacattctggtttatcgccgatttctcttcgtggttttcactgtgttggttttactacctctgcccatcgtcctccacaccaaggaagcagaatgtgcctacacactctttgtggtcgccacattttggctcacagaagcattgcctctgtcggtaacagctttgctacctagtttaatgttacccatgtttgggatcatgccttctaagaaggtggcatctgcttatttcaaggattttcacttactgctaattggagttatctgtttagcaacatccatagaaaaatggaatttgcacaagagaattgctctgaaaatggtgatgatggttggtgtaaatcctgcatggctgacgctggggttcatgagcagcactgcctttttgtctatgtggctcagcaacacctcgacggctgccatggtgatgcccattgcggaggctgtagtgcagcagatcatcaatgcagaagcagaggtcgaggccactcagatgacttacttcaacggatcaaccaaccacggactagaaattgatgaaagtgttaatggacatgaaataaatgagaggaaagagaaaacaaaaccagttccaggatacaataatgatacagggaaaatttcaagcaaggtggagttggaaaagaactcaggcatgagaaccaaatatcgaacaaagaagggccacgtgacacgtaaacttacgtgtttgtgcattgcctactcttctaccattggtggactgacaacaatcactggtacctccaccaacttgatctttgcagagtatttcaatacacgctatcctgactgtcgttgcctcaactttggatcatggtttacgttttccttcccagctgcccttatcattctactcttatcctggatctggcttcagtggcttttcctaggattcaattttaaggagatgttcaaatgtggcaaaaccaaaacagtccaacaaaaagcttgtgctgaggtgattaagcaagaataccaaaagcttgggccaataaggtatcaagaaattgtgaccttggtcctcttcattataatggctctgctatggtttagtcgagaccccggatttgttcctggttggtctgcacttttttcagagtaccctggttttgctacagattcaactgttgctttacttatagggctgctattctttcttatcccagctaagacactgactaaaactacacctacaggagaaattgttgcttttgattactctccactgattacttggaaagaattccagtcattcatgccctgggatatagccattcttgttggtggagggtttgccctggcagatggttgtgaggagtctggattatctaagtggataggaaataaattatctcctctgggttcattaccagcatggctaataattctgatatcttctttgatggtgacatctttaactgaggtagccagcaatccagctaccattacactctttctcccaatattatctccattggccgaagccattcatgtgaaccctctttatattctgataccttctactctgtgtacttcatttgcattcctcctaccagtagcaaatccacccaatgctattgtcttttcatatggtcatctgaaagtcattgacatggttaaagctggacttggtgtcaacattgttggtgttgctgtggttatgcttggcatatgtacttggattgtacccatgtttgacctctacacttacccttcgtgggctcctgctatgagtaatgagaccatgccataataagcacaaaatttctgactatcttgcggtaatttctggaagacattaatgattgactgtaaaatgtggctctaaataactaatgacacacatttaaatcagttatggtgtagctgctgcaattcctgtgaatacccgaaacctgctgttataactcagagtccatatttgttattgcagtgcaactaaagagcatctatgtgccttcatcaagaagcccatgttttgagattttgctcatgaaccatctgcaacttgcttcatcataagaataatttataacttgaccttcaaagagattagagcatttgtttcatcttacagttggagttcaatgtaacattttaaatgcaatttattatttcagaaatttcccatgaaactaaaaatagaaaataagatatacaagttaattcggtacttggataaatcatttctgcattgttgttccagagaatttgctgagaaatcaaagccatggtcatctggtgatgaagagaaaagtttaatctaaatgatatgtgcatttcctcatttaaaaaatccaattggattattcttaatatatacatgtaatatgaaaattgagattgaagcactaattccaaaattatggctgaatatactaaataacagaaaagttacagataagaatttatttctactgaactctatagttagtgtaatataattcatatttttatgatattggcacactgagaaattcattttgtagagctatggataaggcttgctatgatttgcactattagtacagtatagttagaaaggaaagctgaacactataaaactattaacatattttcgtatatgagtaacaactttgcttaagtgtttatcttagttcagaaatacataatgtcatatgttaaaaataaagagatgtagaaatctaaatgaattatcactgtgtatacagacagaaaaatcacataactctggtgtgttaacattgcaatgaaaaaatgaaaaaaagaaggaaaaaagaataagaatgaaaactgctgacgtattacaaaacagaaaaataaatgatttaaaatcaaatcaaaaagaaaaaactaaacatttaaacaaaaatgggataagaatagtcttctagaagtgaggatgcgaaaaagaatgagtttccaattaccctgatgtgacaattacacattgtagacaggtagcaaaatatcacatacacccccaaaatatgtacaaatattatatatcaataaataaatttttaaagagtaagtgctattggcattccaaaattcagctaaaggaaaaatgatcaaaaacaaagtaaggtgcacagttagcaaaagatgcagatgttatatcacagcaattctcatgctaaaaatacaacaaaagacaaagcaaaaaataaacctttgcttttttttttttttttttttttttgagacggagtctcgctctgtcgcccaggctggagtgcagtggcgggatctcggctcactgcaagctccgcctcccaggttcacgccattctcctgcctcagccaaacctttgctatttttaatcttcgttggcactttccagctgttactgaccttgtcattttttattcaaataagattatttacaaacttattcttgaaactaaatatagtaaagagggtttttaaaataatatttaacatacgaattattaattggccatgttcattatttatctatgtttattaatgggccaatgcaaaaaatcattttttcaaagaaaaatttgtccatgtaaagcttaaattataatattgctgctttgtataactcttctatgtttattctattcatttgttcctttccctaccatattttacacatgtatttataatctgtagtatttattacatttctgcttttttctagtcattcaatttatcactgctgaattgcatcagatcatggatgcatttttattatgaaaaaataaaatgacttttcaaattataa

SEQ ID NO: 182875 - DNA, 2861 bp, Homo sapiens
  Payload ID: 16030
  Gene Symbol: SLC13A1
  Gene Name: solute carrier family 13 (sodium/sulfate symporter), member 1
  ENST ID: ENST00000427975
  CDS Start-End: 27-137
actattgaagccacctgctcaggacaatgaaattcttcagttacattctggtttatcgccgatttctcttcgtggttttcactgtgttggttttactacctctgcccatcgtcctccacaccaagagtaagttgtaataacgatatcggatgtatcagcaacttccagcagacttgggggaagcagaatgtgcctacacactctttgtggtcgccacattttggctcacagaagcattgcctctgtcggtaacagctttgctacctagtttaatgttacccatgtttgggatcatgccttctaagaaggtggcatctgcttatttcaaggattttcacttactgctaattggagttatctgtttagcaacatccatagaaaaatggaatttgcacaagagaattgctctgaaaatggtgatgatggttggtgtaaatcctgcatggctgacgctggggttcatgagcagcactgcctttttgtctatgtggctcagcaacacctcgacggctgccatggtgatgcccattgcggaggctgtagtgcagcagatcatcaatgcagaagcagaggtcgaggccactcagatgacttacttcaacggatcaaccaaccacggactagaaattgatgaaagtgttaatggacatgaaataaatgagaggaaagagaaaacaaaaccagttccaggatacaataatgatacagggaaaatttcaagcaaggtggagttggaaaagaactcaggcatgagaaccaaatatcgaacaaagaagggccacgtgacacgtaaacttacgtgtttgtgcattgcctactcttctaccattggtggactgacaacaatcactggtacctccaccaacttgatctttgcagagtatttcaatacacgctatcctgactgtcgttgcctcaactttggatcatggtttacgttttccttcccagctgcccttatcattctactcttatcctggatctggcttcagtggcttttcctaggattcaattttaaggagatgttcaaatgtggcaaaaccaaaacagtccaacaaaaagcttgtgctgaggtgattaagcaagaataccaaaagcttgggccaataaggtatcaagaaattgtgaccttggtcctcttcattataatggctctgctatggtttagtcgagaccccggatttgttcctggttggtctgcacttttttcagagtaccctggttttgctacagattcaactgttgctttacttatagggctgctattctttcttatcccagctaagacactgactaaaactacacctacaggagaaattgttgcttttgattactctccactgattacttggaaagaattccagtcattcatgccctgggatatagccattcttgttggtggagggtttgccctggcagatggttgtgaggagtctggattatctaagtggataggaaataaattatctcctctgggttcattaccagcatggctaataattctgatatcttctttgatggtgacatctttaactgaggtagccagcaatccagctaccattacactctttctcccaatattatctccattggccgaagccattcatgtgaaccctctttatattctgataccttctactctgtgtacttcatttgcattcctcctaccagtagcaaatccacccaatgctattgtcttttcatatggtcatctgaaagtcattgacatggttaaagctggacttggtgtcaacattgttggtgttgctgtggttatgcttggcatatgtacttggattgtacccatgtttgacctctacacttacccttcgtgggctcctgctatgagtaatgagaccatgccataataagcacaaaatttctgactatcttgcggtaatttctggaagacattaatgattgactgtaaaatgtggctctaaataactaatgacacacatttaaatcagttatggtgtagctgctgcaattcctgtgaatacccgaaacctgctgttataactcagagtccatatttgttattgcagtgcaactaaagagcatctatgtgccttcatcaagaagcccatgttttgagattttgctcatgaaccatctgcaacttgcttcatcataagaataatttataacttgaccttcaaagagattagagcatttgtttcatcttacagttggagttcaatgtaacattttaaatgcaatttattatttcagaaatttcccatgaaactaaaaatagaaaataagatatacaagttaattcggtacttggataaatcatttctgcattgttgttccagagaatttgctgagaaatcaaagccatggtcatctggtgatgaagagaaaagtttaatctaaatgatatgtgcatttcctcatttaaaaaatccaattggattattcttaatatatacatgtaatatgaaaattgagattgaagcactaattccaaaattatggctgaatatactaaataacagaaaagttacagataagaatttatttctactgaactctatagttagtgtaatataattcatatttttatgatattggcacactgagaaattcattttgtagagctatggataaggcttgctatgatttgcactattagtacagtatagttagaaaggaaagctgaacactataaaactattaacatattttcgtatatgagtaacaactttgcttaagtgtttatcttagttcagaaatacataatgtcatatgttaaaaataaagagatgtagaaatctaaatgaattatcactgtgtatacagacagaaaaatcacataactctggtgtgttaacattgcaatgaaaaaatgaaaa

SEQ ID NO: 182876 - DNA, 2457 bp, Homo sapiens
  Payload ID: 16030
  Gene Symbol: SLC13A1
  Gene Name: solute carrier family 13 (sodium/sulfate symporter), member 1
  ENST ID: ENST00000439260
  CDS Start-End: 26-148
ctattgaagccacctgctcaggacaatgaaattcttcagttacattctggtttatcgccgatttctcttcgtggttttcactgtgttggttttactacctctgcccatcgtcctccacaccaagcttattctgacttttccaagatgaagatgaagagcaggccagtggcatgggccagatgcagtcagatgactgactgaccaggagggcctccgtccagtgaccagtctcagaatttaaaggacccttcccccttacttatgcttgtactcagcccaggaagcagaatgtgcctacacactctttgtggtcgccacattttggctcacagaagcattgcctctgtcggtaacagctttgctacctagtttaatgttacccatgtttgggatcatgccttctaagaaggtggcatctgcttatttcaaggattttcacttactgctaattggagttatctgtttagcaacatccatagaaaaatggaatttgcacaagagaattgctctgaaaatggtgatgatggttggtgtaaatcctgcatggctgacgctggggttcatgagcagcactgcctttttgtctatgtggctcagcaacacctcgacggctgccatggtgatgcccattgcggaggctgtagtgcagcagatcatcaatgcagaagcagaggtcgaggccactcagatgacttacttcaacggatcaaccaaccacggactagaaattgatgaaagtgttaatggacatgaaataaatgagaggaaagagaaaacaaaaccagttccaggatacaataatgatacagggaaaatttcaagcaaggtggagttggaaaagtacttgcaagtgaggtgaccaaaaaacagctttagactcttaaacttagtgtttaaaatgagaaggctgagagacagtctgcttatggagaaagttggagtatttccccagtgccccaaccccctgccacttgtaccatcacagtcgaaagaagggaagagtctcctacttaacaaggaagaggaagaatcaaaccaacaaagggtgtttacagggtcatgggtgagaaaaagaatgaagttgcttttggcttacaccctagaaagtcatctcttaaataaaacacttacatttggactagtgattccccaagtgaaaccatttcaggatgtgccattgtccaagaactcaggcatgagaaccaaatatcgaacaaagaagggccacgtgacacgtaaacttacgtgtttgtgcattgcctactcttctaccattggtggactgacaacaatcactggtacctccaccaacttgatctttgcagagtatttcaatacacgctatcctgactgtcgttgcctcaactttggatcatggtttacgttttccttcccagctgcccttatcattctactcttatcctggatctggcttcagtggcttttcctaggattcaattttaaggagatgttcaaatgtggcaaaaccaaaacagtccaacaaaaagcttgtgctgaggtgattaagcaagaataccaaaagcttgggccaataaggtatcaagaaattgtgaccttggtcctcttcattataatggctctgctatggtttagtcgagaccccggatttgttcctggttggtctgcacttttttcagagtaccctggttttgctacagattcaactgttgctttacttatagggctgctattctttcttatcccagctaagacactgactaaaactacacctacaggagaaattgttgcttttgattactctccactgattacttggaaagaattccagtcattcatgccctgggatatagccattcttgttggtggagggtttgccctggcagatggttgtgaggagtctggattatctaagtggataggaaataaattatctcctctgggttcattaccagcatggctaataattctgatatcttctttgatggtgacatctttaactgaggtagccagcaatccagctaccattacactctttctcccaatattatctccattggccgaagccattcatgtgaaccctctttatattctgataccttctactctgtgtacttcatttgcattcctcctaccagtagcaaatccacccaatgctattgtcttttcatatggtcatctgaaagtcattgacatggttaaagctggacttggtgtcaacattgttggtgttgctgtggttatgcttggcatatgtacttggattgtacccatgtttgacctctacacttacccttcgtgggctcctgctatgagtaatgagaccatgccataataagcacaaaatttctgactatcttgcggtaatttctggaagacattaatgattgactgtaaaatgtggctctaaataactaatgacacacatttaaatcagttatggtgtagctgctgcaattcctgtgaatacccgaaacc

SEQ ID NO: 182877 - DNA, 2222 bp, Homo sapiens
  Payload ID: 16030
  Gene Symbol: SLC13A1
  Gene Name: solute carrier family 13 (sodium/sulfate symporter), member 1
  ENST ID: ENST00000539873
  CDS Start-End: 139-624
ccagcctcataatatcaccttttgctttgcatttgttcttaccaggaagcagaatgtgcctacacactctttgtggtcgccacattttggctcacagaagcattgcctctgtcggtaacagctttgctacctagtttaatgttacccatgtttgggatcatgccttctaagaaggtggcatctgcttatttcaaggattttcacttactgctaattggagttatctgtttagcaacatccatagaaaaatggaatttgcacaagagaattgctctgaaaatggtgatgatggttggtgtaaatcctgcatggctgacgctggggttcatgagcagcactgcctttttgtctatgtggctcagcaacacctcgacggctgccatggtgatgcccattgcggaggctgtagtgcagcagatcatcaatgcagaagcagaggtcgaggccactcagatgacttacttcaacggatcaaccaaccacggactagaaattgatgaaagtgttaatggacatgaaataaatgagaggaaagagaaaacaaaaccagttccaggatacaataatgatacagggaaaatttcaagcaaggtggagttggaaaagtacttgcaagtgaggtgaccaaaaaacagctttagactcttaaacttagtgtttaaaatgagaaggctgagagacagtctgcttatggagaaagttggagtatttccccagtgccccaaccccctgccacttgtaccatcacagtcgaaagaagggaagagtctcctacttaacaaggaagaggaagaatcaaaccaacaaagggtgtttacagggtcatgggtgagaaaaagaatgaagttgcttttggcttacaccctagaaagtcatctcttaaataaaacacttacatttggactagtgattccccaagtgaaaccatttcaggatgtgccattgtccaagaactcaggcatgagaaccaaatatcgaacaaagaagggccacgtgacacgtaaacttacgtgtttgtgcattgcctactcttctaccattggtggactgacaacaatcactggtacctccaccaacttgatctttgcagagtatttcaatacacgctatcctgactgtcgttgcctcaactttggatcatggtttacgttttccttcccagctgcccttatcattctactcttatcctggatctggcttcagtggcttttcctaggattcaattttaaggagatgttcaaatgtggcaaaaccaaaacagtccaacaaaaagcttgtgctgaggtgattaagcaagaataccaaaagcttgggccaataaggtatcaagaaattgtgaccttggtcctcttcattataatggctctgctatggtttagtcgagaccccggatttgttcctggttggtctgcacttttttcagagtaccctggttttgctacagattcaactgttgctttacttatagggctgctattctttcttatcccagctaagacactgactaaaactacacctacaggagaaattgttgcttttgattactctccactgattacttggaaagaattccagtcattcatgccctgggatatagccattcttgttggtggagggtttgccctggcagatggttgtgaggagtctggattatctaagtggataggaaataaattatctcctctgggttcattaccagcatggctaataattctgatatcttctttgatggtgacatctttaactgaggtagccagcaatccagctaccattacactctttctcccaatattatctccattggccgaagccattcatgtgaaccctctttatattctgataccttctactctgtgtacttcatttgcattcctcctaccagtagcaaatccacccaatgctattgtcttttcatatggtcatctgaaagtcattgacatggttaaagctggacttggtgtcaacattgttggtgttgctgtggttatgcttggcatatgtacttggattgtacccatgtttgacctctacacttacccttcgtgggctcctgctatgagtaatgagaccatgccataataagcacaaaatttctgactatcttgcggtaatttctggaagacattaatgattgactgtaaaatgtggctctaaataactaatgacacacatttaaatcagttatggtgtagctgctgcaattcctgtgaatacccgaaacc

SEQ ID NO: 182878 - DNA, 2897 bp, Homo sapiens
  Payload ID: 16031
  Gene Symbol: SLC13A4
  Gene Name: solute carrier family 13 (sodium/sulfate symporter), member 4
  Uniprot ID: Q9UKG4
  ENST ID: ENST00000354042
  CDS Start-End: 691-2571
ctgctttgcaggcccaggctcaaggcaaattataagtagggaaccaatttgagggaaagacatgtgaacagagttaaggtaccacgtcctgggagcgaccagcagccccacctgaagtccgcatgcaactctgacaagctcaggtgcttgttttaaggaaaggggctactagagtcttaccaacagcgagcccaggtgggagatgaaacaggtactccccaaaataggtcatccgagggaggaaaactgatggagagcacaatgtgctctgagcgtttttaatgtttttaagcttttaaatgatttcttcaaggccgagcagcagcagcaaaggtgtggcttaaaggattaagggggtttctgctgacacctagaatgaagttactctattactaatcaagccgagaggaggcccactatgcccccgtttatcatcctttcccagttcctttttgctggtcacaaaacgatgctcatcaatcccacctaaagcaggaggccaggagcccagcctcttgtagaaacagcgagggtataactgccctcccgttctgcccccaagacgaaggaggactctcggaagccaagaaaggtttaagaagtctttctggatagagagcagtgcccaggcaggaagcctttcgccggcagagcggggtccaaggacgagctggagaggacagaggcgcgatgggcctgctgcagggcctgctccgagtccggaagctgctgctggtcgtctgcgtcccgctcctgctgctgcctctgcccgtcctccaccccagcagcgaggcctcgtgtgcttacgtgctgatcgtgactgctgtgtactgggtgtcggaggcagtgcctctgggagctgcagccctggtgccggccttcctttacccgttcttcggagtcctccggtccaatgaggtggcggcggagtacttcaagaacaccacgctgctgctggtgggggtcatctgcgtggcggctgccgtggagaagtggaacctgcataagcgcattgctctgcgcatggtcttgatggccggagccaagccgggcatgctgctgctctgcttcatgtgctgtaccacgttgctgtccatgtggctgtccaacacctccaccaccgccatggtgatgcccatcgtggaggccgtgctgcaggagctggtcagtgctgaggacgagcagctcgtggcgggcaactccaacaccgaagaggccgaacccatcagtctggatgtaaagaacagccaaccttctctggaactcatctttgtcaatgaagagtccaacgcagacctcaccactctgatgcacaacgagaacctgaatggtgtgccctcgatcaccaaccccatcaaaactgcaaaccaacaccagggcaagaagcaacacccatcccaggaaaagccacaagtcctgacccccagccccaggaagcagaagctgaacagaaagtacaggtcccaccatgaccagatgatctgcaagtgcctctccctgagcatatcctactccgctaccattggcggcctgaccaccatcatcggcacctccaccagcctcatcttcctggaacacttcaacaaccagtatccagccgcagaggtggtgaactttggcacctggttcctcttcagcttccccatatccctcatcatgctggtggtcagctggttctggatgcactggctgttcctgggctgcaattttaaagagacctgctctctgagcaagaagaagaagaccaaaagggaacagttgtcagagaagaggatccaagaagaatatgaaaaactgggagacattagctacccagaaatggtgactggatttttcttcatcctgatgaccgtactgtggtttacccgggagcctggctttgtccctggctgggattctttctttgaaaagaaaggctaccgtactgatgccacagtctctgtcttccttggcttcctcctcttcctcattccagcgaagaagccctgctttgggaaaaagaatgatggagagaaccaggagcactcactggggaccgagcccatcatcacgtggaaggacttccagaagaccatgccctgggagattgtcattctggttgggggaggctatgctctggcttctggtagcaagagctctggcctctctacatggattgggaaccagatgttgtccctgagcagcctcccaccgtgggctgtcaccctgctggcatgcatcctcgtgtccattgtcactgagtttgtgagcaacccagcaaccatcaccatcttcctgcccatcctgtgcagcctgtctgaaacgctgcacattaaccccctctacaccctgatcccagtcaccatgtgcatctcctttgcagtgatgctgcctgtgggcaatccccctaatgccatcgtcttcagctatgggcactgccagatcaaagatatggtgaaagctggcctgggagtcaacgttattggactggtgatagtaatggtggccatcaacacctggggagttagcctcttccacctggacacttacccagcatgggcgagggtcagcaacatcactgatcaagcctaacgccaagtgtacaaactggcccaaccacaggagctgccagtatccagcagtatctggaccacaggcaaagaaaaccactaggaccaccaggagcacacaaccccagacccacgccggagggcatccctccaccagaagattccgccacctcaagtgaactgcaggaatcctccaacaaccacaaacacatgcttcgctgttagtgtcttcttcctgccctcagcaccacagctcaagaaaacctaaagtttcaatacaagccataggctcacagaaaaagaaaaagaaaataaaaattaaattaaaaaaaaagaagacaaagaaaa

SEQ ID NO: 182879 - DNA, 578 bp, Homo sapiens
  Payload ID: 16031
  Gene Symbol: SLC13A4
  Gene Name: solute carrier family 13 (sodium/sulfate symporter), member 4
  ENST ID: ENST00000378428
  CDS Start-End: 241-578
atttccaagtagtatagttgcagatcttcgaacgccattcctgtgttctgtgaattcaagacaacatgggttttataaccctttgactctgctcagcatctcccagatcaagacgaaggaggactctcggaagccaagaaaggtttaagaagtctttctggatagagagcagtgcccaggcaggaagcctttcgccggcagagcggggtccaaggacgagctggagaggacagaggcgcgatgggcctgctgcagggcctgctccgagtccggaagctgctgctggtcgtctgcgtcccgctcctgctgctgcctctgcccgtcctccaccccagcagcgaggcctcgtgtgcttacgtgctgatcgtgactgctgtgtactgggtgtcggaggcagtgcctctgggagctgcagccctggtgccggccttcctttacccgttcttcggagtcctccggtccaatgaggtggcggcggagtacttcaagaacaccacgctgctgctggtgggggtcatctgcgtggcggctgccgtggagaagtggaacctgcataagcgcattgctctgcgcatggt

SEQ ID NO: 182880 - DNA, 572 bp, Homo sapiens
  Payload ID: 16031
  Gene Symbol: SLC13A4
  Gene Name: solute carrier family 13 (sodium/sulfate symporter), member 4
  ENST ID: ENST00000422620
  CDS Start-End: 343-572
gtcacttccctggtcactttagcctggggatcatttccaagtagtatagttgcagatcttcgaacgccattcctgtgttctgtgaattcaagacaacatgggttttataaccctttgactctgctcagcatctcccagatcaagcaggaggccaggagcccagcctcttgtagaaacagcgagggtataactgccctcccgttctgcccccaagacgaaggaggactctcggaagccaagaaaggtttaagaagtctttctggatagagagcagtgcccaggcaggaagcctttcgccggcagagcggggtccaaggacgagctggagaggacagaggcgcgatgggcctgctgcagggcctgctccgagtccggaagctgctgctggtcgtctgcgtcccgctcctgctgctgcctctgcccgtcctccaccccagcagcgaggcctcgtgtgcttacgtgctgatcgtgactgctgtgtactgggtgtcggaggcagtgcctctgggagctgcagccctggtgccggccttcctttacccgttcttcggagtcctccggtccaatgaggt

SEQ ID NO: 182881 - DNA, 3176 bp, Homo sapiens
  Payload ID: 16032
  Gene Symbol: SLC13A5
  Gene Name: solute carrier family 13 (sodium-dependent citrate transporter), member 5
  Uniprot ID: Q86YT5
  ENST ID: ENST00000293800
  CDS Start-End: 37-1692
ctcactcgtctcgcccgccagtctccctcccgcgcgatggcctcggcgctgagctatgtctccaagttcaagtccttcgtgatcttgttcgtcaccccgctcctgctgctgccactcgtcattctgatgcccgccaagtttgtcaggtgtgcctacgtcatcatcctcatggccatttactggtgcacagaagtcatccctctggctgtcacctctctcatgcctgtcttgcttttcccactcttccagattctggactccaggcaggtgtgtgtccagtacatgaaggacaccaacatgctgttcctgggcggcctcatcgtggccgtggctgtggagcgctggaacctgcacaagaggatcgccctgcgcacgctcctctgggtgggggccaagcctgcacgtaacacggcaaccacggccatgatggtgcccatcgtggaggccatattgcagcagatggaagccacaagcgcagccaccgaggccggcctggagctggtggacaagggcaaggccaaggagctgccagggagtcaagtgatttttgaaggccccactctggggcagcaggaagaccaagagcggaagaggttgtgtaaggccatgaccctgtgcatctgctacgcggccagcatcgggggcaccgccaccctgaccgggacgggacccaacgtggtgctcctgggccagatgaacgagttgtttcctgacagcaaggacctcgtgaactttgcttcctggtttgcatttgcctttcccaacatgctggtgatgctgctgttcgcctggctgtggctccagtttgtttacatgagattcaattttaaaaagtcctggggctgcgggctagagagcaagaaaaacgagaaggctgccctcaaggtgctgcaggaggagtaccggaagctggggcccttgtccttcgcggagatcaacgtgctgatctgcttcttcctgctggtcatcctgtggttctcccgagaccccggcttcatgcccggctggctgactgttgcctgggtggagggtgagacaaagtatgtctccgatgccactgtggccatctttgtggccaccctgctattcattgtgccttcacagaagcccaagtttaacttccgcagccagactgaggaagaaaggaaaactccattttatccccctcccctgctggattggaaggtaacccaggagaaagtgccctggggcatcgtgctgctactagggggcggatttgctctggctaaaggatccgaggcctcggggctgtccgtgtggatggggaagcagatggagcccttgcacgcagtgcccccggcagccatcaccttgatcttgtccttgctcgttgccgtgttcactgagtgcacaagcaacgtggccaccaccaccttgttcctgcccatctttgcctccatgtctcgctccatcggcctcaatccgctgtacatcatgctgccctgtaccctgagtgcctcctttgccttcatgttgcctgtggccacccctccaaatgccatcgtgttcacctatgggcacctcaaggttgctgacatggtgaaaacaggagtcataatgaacataattggagtcttctgtgtgtttttggctgtcaacacctggggacgggccatatttgacttggatcatttccctgactgggctaatgtgacacatattgagacttaggaagagccacaagaccacacacacagcccttaccctcctcaggactaccgaaccttctggcacaccttgtacagagttttggggttcacaccccaaaatgacccaacgatgtccacacaccaccaaaacccagccaatgggccacctcttcctccaagcccagatgcagagatggtcatgggcagctggagggtaggctcagaaatgaagggaacccctcagtgggctgctggacccatctttcccaagccttgccattatctctgtgagggaggccaggtagccgagggatcaggatgcaggctgctgtacccgctctgcctcaagcatcccccacacagggctctggttttcactcgcttcgtcctagatagtttaaatgggaatcggatcccctggttgagagctaagacaaccacctaccagtgcccatgtcccttccagctcaccttgagcagcctcagatcatctctgtcactctggaagggacaccccagccagggacggaatgcctggtcttgagcaacctcccactgctggagtgcgagtgggaatcagagcctcctgaagcctctgggaactcctcctgtggccaccaccaaaggatgaggaatctgagttgccaacttcaggacgacacctggcttgccacccacagtgcaccacaggccaacctacgcccttcatcacttggttctgttttaatcgactggccccctgtcccacctctccagtgagcctccttcaactccttggtcccctgttgtctgggtcaacatttgccgagacgccttggctggcaccctctggggtcccccttttctcccaggcaggtcatcttttctgggagatgcttcccctgccatccccaaatagctaggatcacactccaagtatgggcagtgatggcgctctgggggccacagtgggctatctaggccctccctcacctgaggcccagagtggacacagctgttaatttccactggctatgccacttcagagtctttcatgccagcgtttgagctcctctgggtaaaatcttccctttgttgactggccttcacagccatggctggtgacaacagaggatcgttgagattgagcagcgcttggtgatctctcagcaaacaacccctgcccgtgggccaatctacttgaagttactcggacaaagaccccaaagtggggcaacaactccagagaggctgtgggaatcttcagaacccccctgtaagagacagacatgagagacaagcatcttctttcccccgcaagtccattttatttccttcttgtgctgctctggaagagaggcagtagcaaagagatgagctcctggatggcattttccagggcaggagaaagtatgagagcctcaggaaaccccatcaaggaccgagtatgtgtctggttccttgggtgggacgattcctgaccacactgtccagctcttgctctcattaaatgctctgtctcccgcg

SEQ ID NO: 182882 - DNA, 1738 bp, Homo sapiens
  Payload ID: 16032
  Gene Symbol: SLC13A5
  Gene Name: solute carrier family 13 (sodium-dependent citrate transporter), member 5
  Uniprot ID: Q86YT5
  ENST ID: ENST00000381074
  CDS Start-End: 34-1611
actcgtctcgcccgccagtctccctcccgcgcgatggcctcggcgctgagctatgtctccaagttcaagtccttcgtgatcttgttcgtcaccccgctcctgctgctgccactcgtcattctgatgcccgccaaggtgtgtgtccagtacatgaaggacaccaacatgctgttcctgggcggcctcatcgtggccgtggctgtggagcgctggaacctgcacaagaggatcgccctgcgcacgctcctctgggtgggggccaagcctgcacggctgatgctgggcttcatgggcgtcacagccctcctgtccatgtggatcagtaacacggcaaccacggccatgatggtgcccatcgtggaggccatattgcagcagatggaagccacaagcgcagccaccgaggccggcctggagctggtggacaagggcaaggccaaggagctgccagggagtcaagtgatttttgaaggccccactctggggcagcaggaagaccaagagcggaagaggttgtgtaaggccatgaccctgtgcatctgctacgcggccagcatcgggggcaccgccaccctgaccgggacgggacccaacgtggtgctcctgggccagatgaacgagttgtttcctgacagcaaggacctcgtgaactttgcttcctggtttgcatttgcctttcccaacatgctggtgatgctgctgttcgcctggctgtggctccagtttgtttacatgagattcaattttaaaaagtcctggggctgcgggctagagagcaagaaaaacgagaaggctgccctcaaggtgctgcaggaggagtaccggaagctggggcccttgtccttcgcggagatcaacgtgctgatctgcttcttcctgctggtcatcctgtggttctcccgagaccccggcttcatgcccggctggctgactgttgcctgggtggagggtgagacaaagtatgtctccgatgccactgtggccatctttgtggccaccctgctattcattgtgccttcacagaagcccaagtttaacttccgcagccagactgaggaagaaaggaaaactccattttatccccctcccctgctggattggaaggtaacccaggagaaagtgccctggggcatcgtgctgctactagggggcggatttgctctggctaaaggatccgaggcctcggggctgtccgtgtggatggggaagcagatggagcccttgcacgcagtgcccccggcagccatcaccttgatcttgtccttgctcgttgccgtgttcactgagtgcacaagcaacgtggccaccaccaccttgttcctgcccatctttgcctccatgtctcgctccatcggcctcaatccgctgtacatcatgctgccctgtaccctgagtgcctcctttgccttcatgttgcctgtggccacccctccaaatgccatcgtgttcacctatgggcacctcaaggttgctgacatggtgaaaacaggagtcataatgaacataattggagtcttctgtgtgtttttggctgtcaacacctggggacgggccatatttgacttggatcatttccctgactgggctaatgtgacacatattgagacttaggaagagccacaagaccacacacacagcccttaccctcctcaggactaccgaaccttctggcacaccttgtacagagttttggggttcacaccccaaaatgacccaacgatgtccacacaccaccaaa

SEQ ID NO: 182883 - DNA, 3435 bp, Homo sapiens
  Payload ID: 16032
  Gene Symbol: SLC13A5
  Gene Name: solute carrier family 13 (sodium-dependent citrate transporter), member 5
  Uniprot ID: Q86YT5
  ENST ID: ENST00000433363
  CDS Start-End: 235-1941
agcgttggagtccaaagacgcctcccaccgccgccgggtggcagaattgggggcaggcgcgtcccacagaccccgaggggtggccccgccccagggccgcggggaggcgcccccgtgcggggcggagttgtcaccgccccctccccaatccccggggactgtggccccttcttaagcccgcggcgcctctagctgcccctcactcgtctcgcccgccagtctccctcccgcgcgatggcctcggcgctgagctatgtctccaagttcaagtccttcgtgatcttgttcgtcaccccgctcctgctgctgccactcgtcattctgatgcccgccaagtttgtcaggtgtgcctacgtcatcatcctcatggccatttactggtgcacagaagtcatccctctggctgtcacctctctcatgcctgtcttgcttttcccactcttccagattctggactccaggcaggtgtgtgtccagtacatgaaggacaccaacatgctgttcctgggcggcctcatcgtggccgtggctgtggagcgctggaacctgcacaagaggatcgccctgcgcacgctcctctgggtgggggccaagcctgcacggctgatgctgggcttcatgggcgtcacagccctcctgtccatgtggatcagtaacacggcaaccacggccatgatggtgcccatcgtggaggccatattgcagcagatggaagccacaagcgcagccaccgaggccggcctggagctggtggacaagggcaaggccaaggagctgccagggagtcaagtgatttttgaaggccccactctggggcagcaggaagaccaagagcggaagaggttgtgtaaggccatgaccctgtgcatctgctacgcggccagcatcgggggcaccgccaccctgaccgggacgggacccaacgtggtgctcctgggccagatgaacgagttgtttcctgacagcaaggacctcgtgaactttgcttcctggtttgcatttgcctttcccaacatgctggtgatgctgctgttcgcctggctgtggctccagtttgtttacatgagattcaattttaaaaagtcctggggctgcgggctagagagcaagaaaaacgagaaggctgccctcaaggtgctgcaggaggagtaccggaagctggggcccttgtccttcgcggagatcaacgtgctgatctgcttcttcctgctggtcatcctgtggttctcccgagaccccggcttcatgcccggctggctgactgttgcctgggtggagggtgagacaaagtatgtctccgatgccactgtggccatctttgtggccaccctgctattcattgtgccttcacagaagcccaagtttaacttccgcagccagactgaggaagaaaggaaaactccattttatccccctcccctgctggattggaaggtaacccaggagaaagtgccctggggcatcgtgctgctactagggggcggatttgctctggctaaaggatccgaggcctcggggctgtccgtgtggatggggaagcagatggagcccttgcacgcagtgcccccggcagccatcaccttgatcttgtccttgctcgttgccgtgttcactgagtgcacaagcaacgtggccaccaccaccttgttcctgcccatctttgcctccatgtctcgctccatcggcctcaatccgctgtacatcatgctgccctgtaccctgagtgcctcctttgccttcatgttgcctgtggccacccctccaaatgccatcgtgttcacctatgggcacctcaaggttgctgacatggtgaaaacaggagtcataatgaacataattggagtcttctgtgtgtttttggctgtcaacacctggggacgggccatatttgacttggatcatttccctgactgggctaatgtgacacatattgagacttaggaagagccacaagaccacacacacagcccttaccctcctcaggactaccgaaccttctggcacaccttgtacagagttttggggttcacaccccaaaatgacccaacgatgtccacacaccaccaaaacccagccaatgggccacctcttcctccaagcccagatgcagagatggtcatgggcagctggagggtaggctcagaaatgaagggaacccctcagtgggctgctggacccatctttcccaagccttgccattatctctgtgagggaggccaggtagccgagggatcaggatgcaggctgctgtacccgctctgcctcaagcatcccccacacagggctctggttttcactcgcttcgtcctagatagtttaaatgggaatcggatcccctggttgagagctaagacaaccacctaccagtgcccatgtcccttccagctcaccttgagcagcctcagatcatctctgtcactctggaagggacaccccagccagggacggaatgcctggtcttgagcaacctcccactgctggagtgcgagtgggaatcagagcctcctgaagcctctgggaactcctcctgtggccaccaccaaaggatgaggaatctgagttgccaacttcaggacgacacctggcttgccacccacagtgcaccacaggccaacctacgcccttcatcacttggttctgttttaatcgactggccccctgtcccacctctccagtgagcctccttcaactccttggtcccctgttgtctgggtcaacatttgccgagacgccttggctggcaccctctggggtcccccttttctcccaggcaggtcatcttttctgggagatgcttcccctgccatccccaaatagctaggatcacactccaagtatgggcagtgatggcgctctgggggccacagtgggctatctaggccctccctcacctgaggcccagagtggacacagctgttaatttccactggctatgccacttcagagtctttcatgccagcgtttgagctcctctgggtaaaatcttccctttgttgactggccttcacagccatggctggtgacaacagaggatcgttgagattgagcagcgcttggtgatctctcagcaaacaacccctgcccgtgggccaatctacttgaagttactcggacaaagaccccaaagtggggcaacaactccagagaggctgtgggaatcttcagaacccccctgtaagagacagacatgagagacaagcatcttctttcccccgcaagtccattttatttccttcttgtgctgctctggaagagaggcagtagcaaagagatgagctcctggatggcattttccagggcaggagaaagtatgagagcctcaggaaaccccatcaaggaccgagtatgtgtctggttccttgggtgggacgattcctgaccacactgtccagctcttgctctcattaaatgctctgtctcccgcggaaagctcca

SEQ ID NO: 182884 - DNA, 1723 bp, Homo sapiens
  Payload ID: 16032
  Gene Symbol: SLC13A5
  Gene Name: solute carrier family 13 (sodium-dependent citrate transporter), member 5
  Uniprot ID: Q86YT5
  ENST ID: ENST00000573648
  CDS Start-End: 45-1613
agctgcccctcactcgtctcgcccgccagtctccctcccgcgcgatggcctcggcgctgagctatgtctccaagttcaagtccttcgtgatcttgttcgtcaccccgctcctgctgctgccactcgtcattctgatgcccgccaagtttgtcaggtgtgcctacgtcatcatcctcatggccatttactggtgcacagaagtcatccctctggctgtcacctctctcatgcctgtcttgcttttcccactcttccagattctggactccaggcaggtgtgtgtccagtacatgaaggacaccaacatgctgttcctgggcggcctcatcgtggccgtggctgtggagcgctggaacctgcacaagaggatcgccctgcgcacgctcctctgggtgggggccaagcctgcacggctgatgctgggcttcatgggcgtcacagccctcctgtccatgtggatcagtaacacggcaaccacggccatgatggtgcccatcgtggaggccatattgcagcagatggaagccacaagcgcagccaccgaggccggcctggagctggtggacaagggcaaggccaaggagctgccagggagtcaagtgatttttgaaggccccactctggggcagcaggaagaccaagagcggaagaggttgtgtaaggccatgaccctgtgcatctgctacgcggccagcatcgggggcaccgccaccctgaccgggacgggacccaacgtggtgctcctgggccagatgaacgagttgtttcctgacagcaaggacctcgtgaactttgcttcctggtttgcatttgcctttcccaacatgctggtgatgctgctgttcgcctggctgtggctccagtttgtttacatgagattcaattttaaaaagtcctggggctgcgggctagagagcaagaaaaacgagaaggctgccctcaaggtgctgcaggaggagtaccggaagctggggcccttgtccttcgcggagatcaacgtgctgatctgcttcttcctgctggtcatcctgtggttctcccgagaccccggcttcatgcccggctggctgactgttgcctgggtggagggtgagacaaagtatgtctccgatgccactgtggccatctttgtggccaccctgctattcattgtgccttcacagaagcccaagtttaacttccgcagccagactgaggaagaaaggaaaactccattttatccccctcccctgctggattggaaggtaacccaggagaaagtgccctggggcatcgtgctgctactagggggcggatttgctctggctaaaggatccgaggcctcggggctgtccgtgtggatggggaagcagatggagcccttgcacgcagtgcccccggcagccatcaccttgatcttgtccttgctcgttgccgtgttcactgagtgcacaagcaacgtggccaccaccaccttgttcctgcccatctttgcctccatggtgaaaacaggagtcataatgaacataattggagtcttctgtgtgtttttggctgtcaacacctggggacgggccatatttgacttggatcatttccctgactgggctaatgtgacacatattgagacttaggaagagccacaagaccacacacacagcccttaccctcctcaggactaccgaaccttctggcacaccttgtacagagttttggggttcacaccccaaaatgacccaacgat

SEQ ID NO: 182885 - DNA, 419 bp, Homo sapiens
  Payload ID: 16032
  Gene Symbol: SLC13A5
  Gene Name: solute carrier family 13 (sodium-dependent citrate transporter), member 5
  ENST ID: ENST00000570687
  CDS Start-End: 1-283
cccggcagccatcaccttgatcttgtccttgctcgttgccgtgttcactgagtgcacaagcaacgtggccaccaccaccttgttcctgcccatctttgcctccatgtctcgctccatcggcctcaatccgctgtacatcatgctgccctgtaccctgagtgcctcctttgccttcatgttgcctgtggccacccctccaaatgccatcgtgttcacctatgggcacctcaaggttgctgacatggtaacacagctgtttttatttactcccgtcggactataacgctgttgtcataagggatgccccatttatgaatgacagagtttcaaaacgatgtcatgtgacttgggaatgccacggaacatccagacctgtagccattgttgacatttataatgcagcttttcttctttttctg

SEQ ID NO: 182886 - DNA, 547 bp, Homo sapiens
  Payload ID: 16032
  Gene Symbol: SLC13A5
  Gene Name: solute carrier family 13 (sodium-dependent citrate transporter), member 5
  ENST ID: ENST00000575230
  CDS Start-End: 37-312
ctcactcgtctcgcccgccagtctccctcccgcgcgatggcctcggcgctgagctatgtctccaagttcaagtccttcgtgatcttgttcgtcaccccgctcctgctgctgccactcgtcattctgatgcccgccaagtttgtcaggtgtgcctacgtcatcatcctcatggccatttactggtgcacagaagtcatccctctggctgtcacctctctcatgcctgtcttgcttttcccactcttccagattctggactccaggcagggagacaccactcgagcctgcatccccactccaagctgtccctgaagtcagcatctggggactgggtggctctagtgtgtggcaagggacagtcctgatgaggccttcgtgccacgctccaggtgtgtgtccagtacatgaaggacaccaacatgctgttcctgggcggcctcatcgtggccgtggctgtggagcgctggaacctgcacaagaggatcgccctgcgcacgctcctctgggtgggggccaagcctgcacggctgatgctgggcttcatggg

SEQ ID NO: 182887 - DNA, 986 bp, Homo sapiens
  Payload ID: 16032
  Gene Symbol: SLC13A5
  Gene Name: solute carrier family 13 (sodium-dependent citrate transporter), member 5
  ENST ID: ENST00000572094
  CDS Start-End: 27-272
tcgcccgccagtctccctcccgcgcgatggcctcggcgctgagctatgtctccaagttcaagtccttcgtgatcttgttcgtcaccccgctcctgctgctgccactcgtcattctgatgcccgccaagtttgtcaggtgtgcctacgtcatcatcctcatggccatttactggtgcacagaagtcatccctctggctgtcacctctctcatgcctgtcttgcttttcccactcttccagattctggactccaggtgtgtgtccagtacatgaaggacaccaacatgctgttcctgggcggcctcatcgtggccgtggctgtggagcgctggaacctgcacaagaggatcgccctgcgcacgctcctctgggtgggggccaagcctgcacggctgatgctgggcttcatgggcgtcacagccctcctgtccatgtggatcagtaacacggcaaccacggccatgatggtgcccatcgtggaggccatattgcagcagatggaagccacaagcgcagccaccgaggccggcctggagctggtggacaagggcaaggccaaggagctgccagggagtcaagtgatttttgaaggccccactctggggcagcaggaagaccaagagcggaagaggttgtgtaaggccatgaccctgtgcatctgctacgcggccagcatcgggggcaccgccaccctgaccgggacgggacccaacgtggtgctcctgggccagatgaacgagttgtttcctgacagcaaggacctcgtgaactttgcttcctggtttgcatttgcctttcccaacatgctggtgatgctgctgttcgcctggctgtggctccagtttgtttacatgagattcaattttaaaaagtcctggggctgcgggctagagagcaagaaaaacgagaaggctgccctcaaggtgctgcaggaggagtaccggaagctggggcccttgtccttcgcggagatcaacgtgctgatct

SEQ ID NO: 182888 - DNA, 538 bp, Homo sapiens
  Payload ID: 16032
  Gene Symbol: SLC13A5
  Gene Name: solute carrier family 13 (sodium-dependent citrate transporter), member 5
  ENST ID: ENST00000572352
  CDS Start-End: 37-538
ctcactcgtctcgcccgccagtctccctcccgcgcgatggcctcggcgctgagctatgtctccaagttcaagtccttcgtgatcttgttcgtcaccccgctcctgctgctgccactcgtcattctgatgcccgccaagattctggactccaggcaggtgtgtgtccagtacatgaaggacaccaacatgctgttcctgggcggcctcatcgtggccgtggctgtggagcgctggaacctgcacaagaggatcgccctgcgcacgctcctctgggtgggggccaagcctgcacggctgatgctgggcttcatgggcgtcacagccctcctgtccatgtggatcagtaacacggcaaccacggccatgatggtgcccatcgtggaggccatattgcagcagatggaagccacaagcgcagccaccgaggccggcctggagctggtggacaagggcaaggccaaggagctgccagggagtcaagtgatttttgaaggccccactctggggcagcaggaagaccaagagcggaagaggttgt

SEQ ID NO: 182889 - DNA, 2711 bp, Homo sapiens
  Payload ID: 16033
  Gene Symbol: SLC13A2
  Gene Name: solute carrier family 13 (sodium-dependent dicarboxylate transporter), member 2
  Uniprot ID: Q13183
  ENST ID: ENST00000314669
  CDS Start-End: 421-2199
ggagaacagcagaaaggaaaggccgggccagcggaggtggcttgggggctgcctgtggagggtggctgggggactctccttccttctccagctcctccagcaccaccctcagcagcctccaagaacagaaggagttaacgctgggattaacttcttgaaggaacctgaagttttttaatccttgttctttcctccttccttctccctctcccttcctgatctttactccgcctgtgggtccctcctccttactctcacctccccaactccaaaaacactctgattgccagactgggtcaatggttaacactcaactggctttatataagcctgccacctgcctgcttggctgcatctttggtccttctgttacccagctcctggaggcagtggctgtagcagcccttgctgctccacaccatggccacctgctggcaggccctgtgggcctatcgctcctacctgatcgtgttcttcgtgcccattctcctgctgcctctgcccatcctcgtccccagtaaggaggcctactgcgcgtatgccatcatcctcatggcgctcttctggtgcactgaggccctgcccctggccgtcactgccctcttccccttaatcctgttccctatgatgggcatcgtggatgcctctgaggttgccgtcgagtatcttaaggactccaacctcctgttcttcggggggctgctggtggccatcgcggtggaacactggaacctgcataaacgcatcgccctccgtgtcctcctcatcgttggggtgcggcctgccccgctaatcctgggcttcatgctggtcacggccttcctgtccatgtggatcagcaacacggccacctcagccatgatggtgcccatcgcacatgccgtcctggaccagctgcacagctcgcaagccagcagcaacgtcgaggagggcagcaacaaccccaccttcgagctccaggaaccaagtccccagaaggaggtgaccaagcttgataatgggcaggccctccctgtcacgtctgcctcttcggaggggagggcacatctcagccagaagcatctccacctcacccagtgcatgagcctgtgcgtgtgctactccgccagcatcgggggcatcgccacgctgactggcaccgcacccaacctggtgctgcaaggccagatcaactcgctcttcccccaaaacggcaacgtggtgaacttcgcctcctggttcagcttcgccttccccaccatggtcatcttgctgctgctggcctggttgtggctgcagatcctcttcctgggcttcaacttccggaagaactttggcattggggaaaagatgcaggagcaacagcaggcagcctactgcgtcatccagaccgagcacaggctgctgggccccatgacctttgcagaaaaggccatcagcatcctattcgtcatcctggtgctgctctggttcacccgggagccgggcttttttcttggctggggcaatttggcttttcccaatgccaagggggagagcatggtgtccgatgggacagtggccatcttcatcggcataattatgttcatcataccctccaagttcccagggctgacccaggacccagaaaacccagggaagctgaaggcccctcttggcctcctcgactggaagacggtgaaccagaagatgccgtggaatatcgtgttattgctgggtggtggctatgccctggccaagggcagtgagcgatcgggcctgtcagagtggctgggaaacaagctgaccccactgcagagtgtgccagctccagccattgccatcatcctctccctcctggtggccaccttcaccgagtgcactagcaacgtggccaccactacgatcttcctgcccatcctagcctccatggcccaggccatctgcctccaccctctctacgtcatgctcccctgcactctggccacctccctggccttcatgttgcctgtggccaccccgcccaatgccatcgtcttctctttcggggacctcaaagtgttggatatggcccgggcaggattcctcctcaacatcattggagtcctgatcatcgcactggccatcaacagctggggcatccccctcttcagcctgcactctttcccctcctgggcacagtccaacaccacagcccagtgcctgccaagcctggccaacaccaccacaccaagcccctaggctggggcacagcctggccatgcccaggaagacccaccccattcccactcctctgagcccggaggggacaccccaagctccaagctccaagctccaggccaaaggctgaaaggcacgtgtgtacataatctcttgcgtgtctgtaaggaaggggtgtatgctcagtttcctatgtgctggaataaaaggtgtgtgcatgtgtgtgtgcgcatatgtgtgcgcctgcatggatgtgaggggtgtgtgacgtgaggctatctgaggggggctgtgtgcatgcacatgatcctaggtatgtatgttggacagtgcacacgtgtgtgttcacagacaatacaacatgccctctctggtgccccaggtcttggtatccccagcttagtgaccagacttacttgcactgtatttattgaaattcaggcttggagtggcctgggaggagggcctgccagcagctgccacgggaacagcctctgggctgttaaagtcacattaaagtctttttcagtaaa

SEQ ID NO: 182890 - DNA, 2855 bp, Homo sapiens
  Payload ID: 16033
  Gene Symbol: SLC13A2
  Gene Name: solute carrier family 13 (sodium-dependent dicarboxylate transporter), member 2
  Uniprot ID: Q13183
  ENST ID: ENST00000444914
  CDS Start-End: 421-2346
ggagaacagcagaaaggaaaggccgggccagcggaggtggcttgggggctgcctgtggagggtggctgggggactctccttccttctccagctcctccagcaccaccctcagcagcctccaagaacagaaggagttaacgctgggattaacttcttgaaggaacctgaagttttttaatccttgttctttcctccttccttctccctctcccttcctgatctttactccgcctgtgggtccctcctccttactctcacctccccaactccaaaaacactctgattgccagactgggtcaatggttaacactcaactggctttatataagcctgccacctgcctgcttggctgcatctttggtccttctgttacccagctcctggaggcagtggctgtagcagcccttgctgctccacaccatggccacctgctggcaggccctgtgggcctatcgctcctacctgatcgtgttcttcgtgcccattctcctgctgcctctgcccatcctcgtccccagtaaggaggcctactgcgcgtatgccatcatcctcatggcgctcttctggtgcactgaggccctgcccctggccgtcactgccctcttccccttaatcctgttccctatgatgggcatcgtggatgcctctgagatcattcagagaccatttccatccagtttcgagagcccaggggaatgccagtctgtgggaatgtcagtgactgcatcccataacctcgggggcaccgtgggagactccagggtcttcccgccgctcagccatgtctccacctgccaggttgccgtcgagtatcttaaggactccaacctcctgttcttcggggggctgctggtggccatcgcggtggaacactggaacctgcataaacgcatcgccctccgtgtcctcctcatcgttggggtgcggcctgccccgctaatcctgggcttcatgctggtcacggccttcctgtccatgtggatcagcaacacggccacctcagccatgatggtgcccatcgcacatgccgtcctggaccagctgcacagctcgcaagccagcagcaacgtcgaggagggcagcaacaaccccaccttcgagctccaggaaccaagtccccagaaggaggtgaccaagcttgataatgggcaggccctccctgtcacgtctgcctcttcggaggggagggcacatctcagccagaagcatctccacctcacccagtgcatgagcctgtgcgtgtgctactccgccagcatcgggggcatcgccacgctgactggcaccgcacccaacctggtgctgcaaggccagatcaactcgctcttcccccaaaacggcaacgtggtgaacttcgcctcctggttcagcttcgccttccccaccatggtcatcttgctgctgctggcctggttgtggctgcagatcctcttcctgggcttcaacttccggaagaactttggcattggggaaaagatgcaggagcaacagcaggcagcctactgcgtcatccagaccgagcacaggctgctgggccccatgacctttgcagaaaaggccatcagcatcctattcgtcatcctggtgctgctctggttcacccgggagccgggcttttttcttggctggggcaatttggcttttcccaatgccaagggggagagcatggtgtccgatgggacagtggccatcttcatcggcataattatgttcatcataccctccaagttcccagggctgacccaggacccagaaaacccagggaagctgaaggcccctcttggcctcctcgactggaagacggtgaaccagaagatgccgtggaatatcgtgttattgctgggtggtggctatgccctggccaagggcagtgagcgatcgggcctgtcagagtggctgggaaacaagctgaccccactgcagagtgtgccagctccagccattgccatcatcctctccctcctggtggccaccttcaccgagtgcactagcaacgtggccaccactacgatcttcctgcccatcctagcctccatggcccaggccatctgcctccaccctctctacgtcatgctcccctgcactctggccacctccctggccttcatgttgcctgtggccaccccgcccaatgccatcgtcttctctttcggggacctcaaagtgttggatatggcccgggcaggattcctcctcaacatcattggagtcctgatcatcgcactggccatcaacagctggggcatccccctcttcagcctgcactctttcccctcctgggcacagtccaacaccacagcccagtgcctgccaagcctggccaacaccaccacaccaagcccctaggctggggcacagcctggccatgcccaggaagacccaccccattcccactcctctgagcccggaggggacaccccaagctccaagctccaagctccaggccaaaggctgaaaggcacgtgtgtacataatctcttgcgtgtctgtaaggaaggggtgtatgctcagtttcctatgtgctggaataaaaggtgtgtgcatgtgtgtgtgcgcatatgtgtgcgcctgcatggatgtgaggggtgtgtgacgtgaggctatctgaggggggctgtgtgcatgcacatgatcctaggtatgtatgttggacagtgcacacgtgtgtgttcacagacaatacaacatgccctctctggtgccccaggtcttggtatccccagcttagtgaccagacttacttgcactgtatttattgaaattcaggcttggagtggcctgggaggagggcctgccagcagctgccacgggaacagcctctgggctgttaaagtcacattaaagtctttttcagt

SEQ ID NO: 182891 - DNA, 1276 bp, Homo sapiens
  Payload ID: 16033
  Gene Symbol: SLC13A2
  Gene Name: solute carrier family 13 (sodium-dependent dicarboxylate transporter), member 2
  ENST ID: ENST00000545060
  CDS Start-End: 200-1276
atctttggtccttctgttacccagctcctggaggcagtggctgtagcagcccttgctgctccacaccatggccacctgctggcaggccctgtgggcctatcgctcctacctgatcgtgttcttcgtgcccattctcctgctgcctctgcccatcctcgtccccagtaaggaggcctactgcgcgtatgccatcatcctcatggcgctcttctggtgcactgaggccctgcccctggccgtcactgccctcttccccttaatcctgttccctatgatgggcatcgtggatgcctctgaggttgccgtcgagtatcttaaggactccaacctcctgttcttcggggggctgctggtggccatcgcggtggaacactggaacctgcataaacgcatcgccctccgtgtcctcctcatcgttggggtgcggcctgccccgctaatcctgggcttcatgctggtcacggccttcctgtccatgtggatcagcaacacggccacctcagccatgatggtgcccatcgcacatgccgtcctggaccagctgcacagctcgcaagccagcagcaacgtcgaggagggcagcaacaaccccaccttcgagctccaggaaccaagtccccagaaggaggtgaccaagcttgataatgggcaggccctccctgtcacgtctgcctcttcggaggggagggcacatctcagccagaagcatctccacctcacccagtgcatgagcctgtgcgtgtgctactccgccagcatcgggggcatcgccacgctgactggcaccgcacccaacctggtgctgcaaggccagatcaactcgctcttcccccaaaacggcaacgtggtgaacttcgcctcctggttcagcttcgccttccccaccatggtcatcttgctgctgctggcctggttgtggctgcagatcctcttcctgggcttcaacttccggaagaactttggcattggggaaaagatgcaggagcaacagcaggcagcctactgcgtcatccagaccgagcacaggctgctgggccccatgacctttgcagaaaaggccatcagcatcctattcgtcatcctggtgctgctctggttcacccgggagccgggctttttttggctggggcaatttggcttttcccaatgccaagggggagaggtgagagttgcaggggttgggaggaggacacatctggggctcacatgctcgggaaggagggaagggtatagggcccccattgcagaacaggaggtaacacttggtgggggatga

SEQ ID NO: 182892 - DNA, 2320 bp, Homo sapiens
  Payload ID: 16033
  Gene Symbol: SLC13A2
  Gene Name: solute carrier family 13 (sodium-dependent dicarboxylate transporter), member 2
  ENST ID: ENST00000579281
  CDS Start-End: 1-83
gggcctatcgctcctacctgatcgtgttcttcgtgcccattctcctgctgcctctgcccatcctcgtccccagtaagctgtgaaatgtgaacaatagttattacctctgagagcaaataaatgcaacttgtaaaagcatttgaagcacatagaatatgacgcctggcacaaagtcatcctccaatacttatacagaaacttcttcctgaatcagcagagaggcctactgcgcgtatgccatcatcctcatggcgctcttctggtgcactgaggccctgcccctggccgtcactgccctcttccccttaatcctgttccctatgatgggcatcgtggatgcctctgaggttgccgtcgagtatcttaaggactccaacctcctgttcttcggggggctgctggtggccatcgcggtggaacactggaacctgcataaacgcatcgccctccgtgtcctcctcatcgttggggtgcggcctgccccgctaatcctgggcttcatgctggtcacggccttcctgtccatgtggatcagcaacacggccacctcagccatgatggtgcccatcgcacatgccgtcctggaccagctgcacagctcgcaagccagcagcaacgtcgaggagggcagcaacaaccccaccttcgagctccaggaaccaagtccccagaaggaggtgaccaagcttgataatgggcaggccctccctgtcacgtctgcctcttcggaggggagggcacatctcagccagaagcatctccacctcacccagtgcatgagcctgtgcgtgtgctactccgccagcatcgggggcatcgccacgctgactggcaccgcacccaacctggtgctgcaaggccagatcaactcgctcttcccccaaaacggcaacgtggtgaacttcgcctcctggttcagcttcgccttccccaccatggtcatcttgctgctgctggcctggttgtggctgcagatcctcttcctgggcttcaacttccggaagaactttggcattggggaaaagatgcaggagcaacagcaggcagcctactgcgtcatccagaccgagcacaggctgctgggccccatgacctttgcagaaaaggccatcagcatcctattcgtcatcctggtgctgctctggttcacccgggagccgggcttttttcttggctggggcaatttggcttttcccaatgccaagggggagagcatggtgtccgatgggacagtggccatcttcatcggcataattatgttcatcataccctccaagttcccagggctgacccaggacccagaaaacccagggaagctgaaggcccctcttggcctcctcgactggaagacggtgaaccagaagatgccgtggaatatcgtgttattgctgggtggtggctatgccctggccaagggcagtgagcgatcgggcctgtcagagtggctgggaaacaagctgaccccactgcagagtgtgccagctccagccattgccatcatcctctccctcctggtggccaccttcaccgagtgcactagcaacgtggccaccactacgatcttcctgcccatcctagcctccatggcccaggccatctgcctccaccctctctacgtcatgctcccctgcactctggccacctccctggccttcatgttgcctgtggccaccccgcccaatgccatcgtcttctctttcggggacctcaaagtgttggatatggcccgggcaggattcctcctcaacatcattggagtcctgatcatcgcactggccatcaacagctggggcatccccctcttcagcctgcactctttcccctcctgggcacagtccaacaccacagcccagtgcctgccaagcctggccaacaccaccacaccaagcccctaggctggggcacagcctggccatgcccaggaagacccaccccattcccactcctctgagcccggaggggacaccccaagctccaagctccaagctccaggccaaaggctgaaaggcacgtgtgtacataatctcttgcgtgtctgtaaggaaggggtgtatgctcagtttcctatgtgctggaataaaaggtgtgtgcatgtgtgtgtgcgcatatgtgtgcgcctgcatggatgtgaggggtgtgtgacgtgaggctatctgaggggggctgtgtgcatgcacatgatcctaggtatgtatgttggacagtgcacacgtgtgtgttcacagacaatacaacatgccctctctggtgccccaggtcttggtatccccagcttagtgaccagacttacttgcactgtatttattgaaattcaggcttg

SEQ ID NO: 182893 - DNA, 2217 bp, Homo sapiens
  Payload ID: 16033
  Gene Symbol: SLC13A2
  Gene Name: solute carrier family 13 (sodium-dependent dicarboxylate transporter), member 2
  ENST ID: ENST00000577903
  CDS Start-End: 22-129
cagcccttgctgctccacaccatggccacctgctggcaggccctgtgggcctatcgctcctacctgatcgtgttcttcgtgcccattctcctgctgcctctgcccatcctcgtccccagtaagctgtgaaatgtgaacaatagttattacctctgagagcaaataaatgcaacttgtaaaagcatttgaagcacatagaatatgacgcctggcacaaagtcatcctccaatacttatacagaaacttcttcctgaatcagcagagaggcctactgcgcgtatgccatcatcctcatggcgctcttctggtgcactgaggccctgcccctggccgtcactgccctcttccccttaatcctgttccctatgatgggcatcgtggatgcctctgaggttgccgtcgagtatcttaaggactccaacctcctgttcttcggggggctgctggtggccatcgcggtggaacactggaacctgcataaacgcatcgccctccgtgtcctcctcatcgttggggtgcggcctgccccgctaatcctgggcttcatgctggtcacggccttcctgtccatgtggatcagcaacacggccacctcagccatgatggtgcccatcgcacatgccgtcctggaccagctgcacagctcgcaagccagcagcaacgtcgaggagggcagcaacaaccccaccttcgagctccaggaaccaagtccccagaaggaggtgaccaagcttgataatgggcaggccctccctgtcacgtctgcctcttcggaggggagggcacatctcagccagaagcatctccacctcacccagtgcatgagcctgtgcgtgtgctactccgccagcatcgggggcatcgccacgctgactggcaccgcacccaacctggtgctgcaaggccagatcaactcgctcttcccccaaaacggcaacgtggtgaacttcgcctcctggttcagcttcgccttccccaccatggtcatcttgctgctgctggcctggttgtggctgcagatcctcttcctgggcttcaacttccggaagaactttggcattggggaaaagatgcaggagcaacagcaggcagcctactgcgtcatccagaccgagcacaggctgctgggccccatgacctttgcagaaaaggccatcagcatcctattcgtcatcctggtgctgctctggttcacccgggagccgggcttttttcttggctggggcaatttggcttttcccaatgccaagggggagaggtgagagttgcaggggttgggaggaggacacatctggggctcacatgctcgggaaggagggaagggtatagggcccccattgcagaacaggaggtaacacttggtgggggatgaaggttccccaggcttgtctatgggagaggctcatctccaccaccctccaccctgtggccctgagcaaccccaagcggctaacccagccctccccgcgccccctccaccaacagcatggtgtccgatgggacagtggccatcttcatcggcataattatgttcatcataccctccaagttcccagggctgacccaggacccagaaaacccagggaagctgaaggcccctcttggcctcctcgactggaagacggtgaaccagaagatgccgtggaatatcgtgttattgctgggtggtggctatgccctggccaagggcagtgagcgatcgggcctgtcagagtggctgggaaacaagctgaccccactgcagagtgtgccagctccagccattgccatcatcctctccctcctggtggccaccttcaccgagtgcactagcaacgtggccaccactacgatcttcctgcccatcctagcctccatggcccaggccatctgcctccaccctctctacgtcatgctcccctgcactctggccacctccctggccttcatgttgcctgtggccaccccgcccaatgccatcgtcttctctttcggggacctcaaagtgttggatatggcccgggcaggattcctcctcaacatcattggagtcctgatcatcgcactggccatcaacagctggggcatccccctcttcagcctgcactctttcccctcctgggcacagtccaacaccacagcccagtgcctgccaagcctggccaacaccaccacaccaagcccctaggctggggcacagcctggccatgcccaggaagacccaccccattcccact

SEQ ID NO: 182894 - DNA, 2466 bp, Homo sapiens
  Payload ID: 16033
  Gene Symbol: SLC13A2
  Gene Name: solute carrier family 13 (sodium-dependent dicarboxylate transporter), member 2
  ENST ID: ENST00000459818
  CDS Start-End: 1-83
gggcctatcgctcctacctgatcgtgttcttcgtgcccattctcctgctgcctctgcccatcctcgtccccagtaagctgtgaaatgtgaacaatagttattacctctgagagcaaataaatgcaacttgtaaaagcatttgaagcacatagaatatgacgcctggcacaaagtcatcctccaatacttatacagaaacttcttcctgaatcagcagagaggcctactgcgcgtatgccatcatcctcatggcgctcttctggtgcactgaggccctgcccctggccgtcactgccctcttccccttaatcctgttccctatgatgggcatcgtggatgcctctgagatcattcagagaccatttccatccagtttcgagagcccaggggaatgccagtctgtgggaatgttgccgtcgagtatcttaaggactccaacctcctgttcttcggggggctgctggtggccatcgcggtggaacactggaacctgcataaacgcatcgccctccgtgtcctcctcatcgttggggtgcggcctgccccgctaatcctgggcttcatgctggtcacggccttcctgtccatgtggatcagcaacacggccacctcagccatgatggtgcccatcgcacatgccgtcctggaccagctgcacagctcgcaagccagcagcaacgtcgaggagggcagcaacaaccccaccttcgagctccaggaaccaagtccccagaaggaggtgaccaagcttgataatgggcaggccctccctgtcacgtctgcctcttcggaggggagggcacatctcagccagaagcatctccacctcacccagtgcatgagcctgtgcgtgtgctactccgccagcatcgggggcatcgccacgctgactggcaccgcacccaacctggtgctgcaaggccagatcaactcgctcttcccccaaaacggcaacgtggtgaacttcgcctcctggttcagcttcgccttccccaccatggtcatcttgctgctgctggcctggttgtggctgcagatcctcttcctgggcttcaacttccggaagaactttggcattggggaaaagatgcaggagcaacagcaggcagcctactgcgtcatccagaccgagcacaggctgctgggccccatgacctttgcagaaaaggccatcagcatcctattcgtcatcctggtgctgctctggttcacccgggagccgggcttttttcttggctggggcaatttggcttttcccaatgccaagggggagagcatggtgtccgatgggacagtggccatcttcatcggcataattatgttcatcataccctccaagttcccagggctgacccaggacccagaaaacccagggaagctgaaggcccctcttggcctcctcgactggaagacggtgaaccagaagatgccgtggaatatcgtgttattgctgggtggtggctatgccctggccaagggcagtgagcgatcgggcctgtcagagtggctgggaaacaagctgaccccactgcagagtgtgccagctccagccattgccatcatcctctccctcctggtggccaccttcaccgagtgcactagcaacgtggccaccactacgatcttcctgcccatcctagcctccatggcccaggccatctgcctccaccctctctacgtcatgctcccctgcactctggccacctccctggccttcatgttgcctgtggccaccccgcccaatgccatcgtcttctctttcggggacctcaaagtgttggatatggcccgggcaggattcctcctcaacatcattggagtcctgatcatcgcactggccatcaacagctggggcatccccctcttcagcctgcactctttcccctcctgggcacagtccaacaccacagcccagtgcctgccaagcctggccaacaccaccacaccaagcccctaggctggggcacagcctggccatgcccaggaagacccaccccattcccactcctctgagcccggaggggacaccccaagctccaagctccaagctccaggccaaaggctgaaaggcacgtgtgtacataatctcttgcgtgtctgtaaggaaggggtgtatgctcagtttcctatgtgctggaataaaaggtgtgtgcatgtgtgtgtgcgcatatgtgtgcgcctgcatggatgtgaggggtgtgtgacgtgaggctatctgaggggggctgtgtgcatgcacatgatcctaggtatgtatgttggacagtgcacacgtgtgtgttcacagacaatacaacatgccctctctggtgccccaggtcttggtatccccagcttagtgaccagacttacttgcactgtatttattgaaattcaggcttggagtggcctgggaggagggcctgccagcagctgccacgggaacagcctctgggctgttaaagtcacattaaagtctttttcagt

SEQ ID NO: 182895 - DNA, 4017 bp, Homo sapiens
  Payload ID: 16034
  Gene Symbol: SLC13A3
  Gene Name: solute carrier family 13 (sodium-dependent dicarboxylate transporter), member 3
  Uniprot ID: Q8WWT9
  ENST ID: ENST00000279027
  CDS Start-End: 20-1828
ccgccaggcgatcgcgctgatggcggcgctggcagcagcggccaagaaggtgtggagcgcgcggcggctgctggtgctgctgttcacgccgctcgcgctgctgccggtggtcttcgccctcccgcccaaggaaggccgctgcttgtttgtcatcctgctcatggcggtgtactggtgcacggaggccctgccgctctcagtgacggcgctgctgcccatcgtcctcttccccttcatgggcatcttgccctccaacaaggtctgcccccagtacttcctcgacaccaacttcctcttcctcagtgggctgatcatggccagcgccattgaggagtggaacctgcaccggcgaatcgccctcaagatcctgatgcttgttggagtccagccggccaggctcatcctggggatgatggtgaccacctcgttcttgtccatgtggctgagcaacaccgcctccactgccatgatgcttcccattgccaatgccatcctgaaaagtctctttggccagaaggaggttcgaaaggaccccagccaggagagtgaagagaacacagctgctgtgcggagaaacggcctacacactgtgcccacggagatgcagtttctcgccagcacagaagccaaagaccaccctggggagacagaggttccactggatctgccggctgactccaggaaggaggatgaatatcgtcggaacatctggaagggcttcctcatctccatcccctactcagccagtattgggggcacagccacactcacgggcacagcccctaacctcatcctgcttggccagctcaagagtttctttccgcagtgtgacgtggtgaatttcggctcctggttcattttcgccttccctcttatgctgttgttcctgttggcaggctggctctggatctccttcctgtacgggggactgagcttcaggggctggaggaagaataaatctgagataagaaccaatgcagaagatagggctcgagctgtaattcgggaagaataccagaacctggggcccatcaagtttgccgaacaggctgttttcatccttttctgcatgtttgccatcctcctcttcacccgggacccgaagttcatccctggctgggccagcctcttcaatcctgggtttctttctgatgctgtcaccggcgtggctattgtcaccatcttgttcttcttcccgtcccaaaggccctctctcaagtggtggtttgacttcaaagctcccaacacagagacagagcccttgctgacctggaagaaggcccaggagacagtgccctggaacatcatccttctcctgggagggggcttcgccatggccaaaggctgtgaggaatcggggctgtctgtatggattggtgggcagctgcaccccctggagaatgtgccccccgccctggctgtgctgctcatcactgtggtcatcgccttcttcactgagtttgccagcaacacggcgaccatcatcatcttcctgccggtcctggcagagctggccatccgcctgagagtgcaccccctgtatctgatgattccgggcacagtcggctgctcctttgccttcatgctcccggtctcaacgccccccaactccatcgccttcgcctctggacacttgctggtcaaagacatggtgcggacaggcctcctgatgaacctgatgggtgtcctgctgctcagtttggctatgaatacctgggcacagaccatcttccagctgggcaccttcccggactgggctgatatgtactcggtcaatgtcacagcattgccacccaccttggccaatgacacatttcggaccctctgagtccccctggaggactcccttgaggctgaaccctctcaaagggctgtcaccatcacctgctgctaggacactacaaaacaatcaaataattcttttctgtaatccaatatgcagcaagcaagggtgacctccagtggcccactcaagtccatgagccattatctaggatactttctctctctttcatgcagttcaaagcccaggtatctctcagatctgctgcctgagaaataagctcctttatcagttagctgttttatcattaggatacaagacagcccagtgtcatcaacagtgagcaaatctggcatggtgtttgtctcgtacagttgggataggaggccattcattcccatgggcacagctaacattatcccccagtgattactttcgattacactgaagagaccaccttgtctttaaagatcactttcctgggctgcaatgttccaacccagttgttccagctgttcacaaccagtgtgtgattttgcttagttggtgcccattctgcaccagttgttttacccctgccgataaccagcagtcagagattcttttttaatccttggagacagggaaagggacagatagctttccaaggacatgagactgtgcaaagcctctttgctgtttctctgggctcctgagcataccaggggaagttctagaaaccgcagctgacatctcgacccaagagatttaggattctcctgtttcatctgggtcagtttggccataattctggggtcaggccaggcctgggtcctgccctcccatggggtgactcatgacccctccagccaggactctcctacatgtggcccccataggcctctgtggctgcaaggcggtcagttgctgcttgtcccagcaggtggccttgatctctccatgccccaccttaagtggtaagcatgtttaattatcaaaggccccatttgtcaggggtgagagaaaagtcaaaagataaattggggccttgtaaaaggccagggtaaaatgtctcaggcaagcaaaagattgtccccttctgcatatgggtaaaactgagacgtccccgtgagcccgaggctggaagtggtgtctgccttcaagggttaatccctctttgttccaagcagaagcattctggcatcccagtgaagagctcaggccctcaggaagtgtctgctgaatggaatggcccagcattagcccagtattggaaaagacaccagcccaggggccctgactcgtcacacttccctttcctaagcctctgagggtggagattcccctaggagcgcttggccagctgggaaggcagcgcccagctgcacttgttgttgatacagcataagtgaatcatgggcatttccctgagagcagtgggagaggccctctgagttggaagttgagctccacctcctttccaagtgagcactcagtgttgaatcacagttacaacccactggggctggtgggagatgcgttgtatgggactggaagcaagaggttcattcaaagagaaactcatgggatttgtaaccagatgaatcatgatttctaagacttctgatcaaaaatactgtgaaataaagaatgttaatcaactttggacctggagatgatttgcctttctgaacataagagagcttcaaagccccaaattcctgggctggggattccacagagttgacctctctgattttctactgctcttccctcccctctccagctacatactctgcctcagggccttcgcatgtgctgttccctctgcctagaacactctctcccaagtatatgtctggttccccgactcactttattcaagtccctgctcaggtgtcaccttccctgagaggcttccctgacctcctgtctaaaatgtcaccctcattactctccacccccttactctgctataatttctccttaataggacactgtataacttattttcttattatcttcttctccctctagaatataaatttatgaaaatacaaatgttattttttttactgctgtaactccagttcctagaacaatttccagcacatagcaagtgttcagtaaatatttgctgcttgaatctgctccagaattaacaagaaagccatctcttcctctgatctggggtctgttttgttcattactttgttcactccttcttccatttattcattcaataaacatttatt

SEQ ID NO: 182896 - DNA, 3994 bp, Homo sapiens
  Payload ID: 16034
  Gene Symbol: SLC13A3
  Gene Name: solute carrier family 13 (sodium-dependent dicarboxylate transporter), member 3
  Uniprot ID: Q8WWT9
  ENST ID: ENST00000290317
  CDS Start-End: 128-1795
ggaagtggcactaaggtccaaaggaagctacatatgggtggtccctgctacaccagcctcccaagcctcccagtgcaccttctaggagacaagcaaggaaggccgctgcttgtttgtcatcctgctcatggcggtgtactggtgcacggaggccctgccgctctcagtgacggcgctgctgcccatcgtcctcttccccttcatgggcatcttgccctccaacaaggtctgcccccagtacttcctcgacaccaacttcctcttcctcagtgggctgatcatggccagcgccattgaggagtggaacctgcaccggcgaatcgccctcaagatcctgatgcttgttggagtccagccggccaggctcatcctggggatgatggtgaccacctcgttcttgtccatgtggctgagcaacaccgcctccactgccatgatgcttcccattgccaatgccatcctgaaaagtctctttggccagaaggaggttcgaaaggaccccagccaggagagtgaagagaacacagctgctgtgcggagaaacggcctacacactgtgcccacggagatgcagtttctcgccagcacagaagccaaagaccaccctggggagacagaggttccactggatctgccggctgactccaggaaggaggatgaatatcgtcggaacatctggaagggcttcctcatctccatcccctactcagccagtattgggggcacagccacactcacgggcacagcccctaacctcatcctgcttggccagctcaagagtttctttccgcagtgtgacgtggtgaatttcggctcctggttcattttcgccttccctcttatgctgttgttcctgttggcaggctggctctggatctccttcctgtacgggggactgagcttcaggggctggaggaagaataaatctgagataagaaccaatgcagaagatagggctcgagctgtaattcgggaagaataccagaacctggggcccatcaagtttgccgaacaggctgttttcatccttttctgcatgtttgccatcctcctcttcacccgggacccgaagttcatccctggctgggccagcctcttcaatcctgggtttctttctgatgctgtcaccggcgtggctattgtcaccatcttgttcttcttcccgtcccaaaggccctctctcaagtggtggtttgacttcaaagctcccaacacagagacagagcccttgctgacctggaagaaggcccaggagacagtgccctggaacatcatccttctcctgggagggggcttcgccatggccaaaggctgtgaggaatcggggctgtctgtatggattggtgggcagctgcaccccctggagaatgtgccccccgccctggctgtgctgctcatcactgtggtcatcgccttcttcactgagtttgccagcaacacggcgaccatcatcatcttcctgccggtcctggcagagctggccatccgcctgagagtgcaccccctgtatctgatgattccgggcacagtcggctgctcctttgccttcatgctcccggtctcaacgccccccaactccatcgccttcgcctctggacacttgctggtcaaagacatggtgcggacaggcctcctgatgaacctgatgggtgtcctgctgctcagtttggctatgaatacctgggcacagaccatcttccagctgggcaccttcccggactgggctgatatgtactcggtcaatgtcacagcattgccacccaccttggccaatgacacatttcggaccctctgagtccccctggaggactcccttgaggctgaaccctctcaaagggctgtcaccatcacctgctgctaggacactacaaaacaatcaaataattcttttctgtaatccaatatgcagcaagcaagggtgacctccagtggcccactcaagtccatgagccattatctaggatactttctctctctttcatgcagttcaaagcccaggtatctctcagatctgctgcctgagaaataagctcctttatcagttagctgttttatcattaggatacaagacagcccagtgtcatcaacagtgagcaaatctggcatggtgtttgtctcgtacagttgggataggaggccattcattcccatgggcacagctaacattatcccccagtgattactttcgattacactgaagagaccaccttgtctttaaagatcactttcctgggctgcaatgttccaacccagttgttccagctgttcacaaccagtgtgtgattttgcttagttggtgcccattctgcaccagttgttttacccctgccgataaccagcagtcagagattcttttttaatccttggagacagggaaagggacagatagctttccaaggacatgagactgtgcaaagcctctttgctgtttctctgggctcctgagcataccaggggaagttctagaaaccgcagctgacatctcgacccaagagatttaggattctcctgtttcatctgggtcagtttggccataattctggggtcaggccaggcctgggtcctgccctcccatggggtgactcatgacccctccagccaggactctcctacatgtggcccccataggcctctgtggctgcaaggcggtcagttgctgcttgtcccagcaggtggccttgatctctccatgccccaccttaagtggtaagcatgtttaattatcaaaggccccatttgtcaggggtgagagaaaagtcaaaagataaattggggccttgtaaaaggccagggtaaaatgtctcaggcaagcaaaagattgtccccttctgcatatgggtaaaactgagacgtccccgtgagcccgaggctggaagtggtgtctgccttcaagggttaatccctctttgttccaagcagaagcattctggcatcccagtgaagagctcaggccctcaggaagtgtctgctgaatggaatggcccagcattagcccagtattggaaaagacaccagcccaggggccctgactcgtcacacttccctttcctaagcctctgagggtggagattcccctaggagcgcttggccagctgggaaggcagcgcccagctgcacttgttgttgatacagcataagtgaatcatgggcatttccctgagagcagtgggagaggccctctgagttggaagttgagctccacctcctttccaagtgagcactcagtgttgaatcacagttacaacccactggggctggtgggagatgcgttgtatgggactggaagcaagaggttcattcaaagagaaactcatgggatttgtaaccagatgaatcatgatttctaagacttctgatcaaaaatactgtgaaataaagaatgttaatcaactttggacctggagatgatttgcctttctgaacataagagagcttcaaagccccaaattcctgggctggggattccacagagttgacctctctgattttctactgctcttccctcccctctccagctacatactctgcctcagggccttcgcatgtgctgttccctctgcctagaacactctctcccaagtatatgtctggttccccgactcactttattcaagtccctgctcaggtgtcaccttccctgagaggcttccctgacctcctgtctaaaatgtcaccctcattactctccacccccttactctgctataatttctccttaataggacactgtataacttattttcttattatcttcttctccctctagaatataaatttatgaaaatacaaatgttattttttttactgctgtaactccagttcctagaacaatttccagcacatagcaagtgttcagtaaatatttgctgcttgaatctgctccagaattaacaagaaagccatctcttcctctgatctggggtctgttttgttcattactttgttcactccttcttccatttattcattcaataaacatttattgggaacctgt

SEQ ID NO: 182897 - DNA, 848 bp, Homo sapiens
  Payload ID: 16034
  Gene Symbol: SLC13A3
  Gene Name: solute carrier family 13 (sodium-dependent dicarboxylate transporter), member 3
  ENST ID: ENST00000372121
  CDS Start-End: 103-848
gagaagggtgtgtttgtttccccatctgccatgattataagttttctgaggcatccccagccatgctgaactgaaggccgctgcttgtttgtcatcctgctcatggcggtgtactggtgcacggaggccctgccgctctcagtgacggcgctgctgcccatcgtcctcttccccttcatgggcatcttgccctccaacaaggtctgcccccagtacttcctcgacaccaacttcctcttcctcagtgggctgatcatggccagcgccattgaggagtggaacctgcaccggcgaatcgccctcaagatcctgatgcttgttggagtccagccggccaggctcatcctggggatgatggtgaccacctcgttcttgtccatgtggctgagcaacaccgcctccactgccatgatgcttcccattgccaatgccatcctgaaaagtctctttggccagaaggaggttcgaaaggaccccagccaggagagtgaagagaacacagcaaagaccaccctggggagacagaggttccactggatctgccggctgactccaggaaggaggatgaatatcgtcggaacatctggaagggcttcctcatctccatcccctactcagccagtattgggggcacagccacactcacgggcacagcccctaacctcatcctgcttggccagctcaagaggctggctctggatctccttcctgtacgggggactgagcttcaggggctggaggaagaataaatctgagataagaaccaatgcagaagatagggctcgagctgtaattcgggaagaataccagaacctggggcccatcaagtttgccgaacaggctgtttt

SEQ ID NO: 182898 - DNA, 707 bp, Homo sapiens
  Payload ID: 16034
  Gene Symbol: SLC13A3
  Gene Name: solute carrier family 13 (sodium-dependent dicarboxylate transporter), member 3
  ENST ID: ENST00000450298
  CDS Start-End: 1-707
ctttcacaactttggcaatggctgctcagctgctgtgcggagaaacggcctacacactgtgcccacggagatgcagtttctcgccagcacagaagccaaagaccaccctggggagacagaggttccactggatctgccggctgactccaggaaggaggatgaatatcgtcggaacatctggaagggcttcctcatctccatcccctactcagccagtattgggggcacagccacactcacgggcacagcccctaacctcatcctgcttggccagctcaagagtttctttccgcagtgtgacgtggtgaatttcggctcctggttcattttcgccttccctcttatgctgttgttcctgttggcaggctggctctggatctccttcctgtacgggggactgagcttcaggggctggaggaagaataaatctgagataagaaccaatgcagaagatagggctcgagctgtaattcgggaagaataccagaacctggggcccatcaagtttgccgaacaggctgttttcatccttttctgcatgtttgccatcctcctcttcacccgggacccgaagttcatccctggctgggccagcctcttcaatcctgggtttctttctgatgctgtcaccggcgtggctattgtcaccatcttgttcttcttcccgtcccaaaggccctctctcaagtggtggtttgacttcaaag

SEQ ID NO: 182899 - DNA, 1256 bp, Homo sapiens
  Payload ID: 16034
  Gene Symbol: SLC13A3
  Gene Name: solute carrier family 13 (sodium-dependent dicarboxylate transporter), member 3
  ENST ID: ENST00000420568
  CDS Start-End: 1-906
gaaggccgctgcttgtttgtcatcctgctcatggcggtgtactggtgcacggaggccctgccgctctcagtgacggcgctgctgcccatcgtcctcttccccttcatgggcatcttgccctccaacaaggtctgcccccagtacttcctcgacaccaacttcctcttcctcagtgggctgatcatggccagcgccattgaggagtggaacctgcaccggcgaatcgccctcaagatcctgatgcttgttggagtccagccggccaggctcatcctggggatgatggtgaccacctcgttcttgtccatgtggctgagcaacaccgcctccactgccatgatgcttcccattgccaatgccatcctgaaaagtctctttggccagaaggaggttcgaaaggaccccagccaggagagtgaagagaacacagcaaagaccaccctggggagacagaggttccactggatctgccggctgactccaggaaggaggatgaatatcgtcggaacatctggaagggcttcctcatctccatcccctactcagccagtattgggggcacagccacactcacgggcacagcccctaacctcatcctgcttggccagctcaagaggctggctctggatctccttcctgtacgggggactgagcttcaggggctggaggaagaataaatctgagataagaaccaatgcagaagatagggctcgagctgtaattcgggaagaataccagaacctggggcccatcaagtttgccgaacaggctgttttcatccttttctgcatgtttgccatcctcctcttcacccgggacccgaagttcatccctggctgggccagcctcttcaatcctggatgcaaaatgggcattataagcatttcaacaatacagaaaatgtgaagatcagctaaatctcagtctctaattctgatatacatctttcctgacttttaaacaatgcctatctgagaactgttctacattgtgatcacgctgttatcggactgcatacatttgtcaagacttgttaaactatacccttaaaatgggtgcattttattgcatgttaattatacctcaatgaaacatatgccaattggcttttagaaccctattaaaagaagatttttttaacagaaatgtgatcacgtcaacatattatttgtaatccgctttttaattttgtattgaatttcaaaagttatgcatactcataaaaattcaaacaatgctgaattgaaaaaggaaaa

SEQ ID NO: 182900 - DNA, 876 bp, Homo sapiens
  Payload ID: 16034
  Gene Symbol: SLC13A3
  Gene Name: solute carrier family 13 (sodium-dependent dicarboxylate transporter), member 3
  ENST ID: ENST00000417157
  CDS Start-End: 128-685
ggaagtggcactaaggtccaaaggaagctacatatgggtggtccctgctacaccagcctcccaagcctcccagtgcaccttctaggagacaagcaaggaaggccgctgcttgtttgtcatcctgctcatggcggtgtactggtgcacggaggccctgccgctctcagtgacggcgctgctgcccatcgtcctcttccccttcatgggcatcttgccctccaacaaggtctgcccccagtacttcctcgacaccaacttcctcttcctcagtgggctgatcatggccagcgccattgaggagtggaacctgcaccggcgaatcgccctcaagatcctgatgcttgttggagtccagccggccaggctcatcctggggatgatggtgaccacctcgttcttgtccatgtggctgagcaacaccgcctccactgccatgatgcttcccattgccaatgccatcctgaaaagtctctttggccagaaggaggttcgaaaggaccccagccaggagagtgaagagaacacaggaatagaacccaatactttcctctctgaggaaaggctgaaacttcaagctccccttgtgataagacttggtcagataactgagtctggtcaatggaatatgagtggaaatgatgtgtgcaacttccgggttctgtccttcctgccgggtggaatgtgaatatgatggcacctgggacccaaagacaggagccacatcttgagagatagatggcagatctgcccctgtggctttggatcatttacctcagtgaacacaacaagcattatccatgaaaccataggttttgtgtgctagttctagtttttaaaatatgaattaaattaaatacgtatctgttaaaacttaaa

SEQ ID NO: 182901 - DNA, 2008 bp, Homo sapiens
  Payload ID: 16034
  Gene Symbol: SLC13A3
  Gene Name: solute carrier family 13 (sodium-dependent dicarboxylate transporter), member 3
  Uniprot ID: Q8WWT9
  ENST ID: ENST00000413164
  CDS Start-End: 39-1697
agtcccgggccggcccgtaccgccaggcgatcgcgctgatggcggcgctggcagcagcggccaagaaggtgtggagcgcgcggcggctgctggtgctgctgttcacgccgctcgcgctgctgccggtggtcttcgccctcccgcccaaggaaggccgctgcttgtttgtcatcctgctcatggcggtgtactggtgcacggaggccctgccgctctcagtgacggcgctgctgcccatcgtcctcttccccttcatgggcatcttgccctccaacaaggtctgcccccagtacttcctcgacaccaacttcctcttcctcagtgggctgatcatggccagcgccattgaggagtggaacctgcaccggcgaatcgccctcaagatcctgatgcttgttggagtccagccggccaggctcatcctggggatgatggtgaccacctcgttcttgtccatgtggctgagcaacaccgcctccactgccatgatgcttcccattgccaatgccatcctgaaaagtctctttggccagaaggaggttcgaaaggaccccagccaggagagtgaagagaacacagcaaagaccaccctggggagacagaggttccactggatctgccggctgactccaggaaggaggatgaatatcgtcggaacatctggaagggcttcctcatctccatcccctactcagccagtattgggggcacagccacactcacgggcacagcccctaacctcatcctgcttggccagctcaagaggctggctctggatctccttcctgtacgggggactgagcttcaggggctggaggaagaataaatctgagataagaaccaatgcagaagatagggctcgagctgtaattcgggaagaataccagaacctggggcccatcaagtttgccgaacaggctgttttcatccttttctgcatgtttgccatcctcctcttcacccgggacccgaagttcatccctggctgggccagcctcttcaatcctgggtttctttctgatgctgtcaccggcgtggctattgtcaccatcttgttcttcttcccgtcccaaaggccctctctcaagtggtggtttgacttcaaagctcccaacacagagacagagcccttgctgacctggaagaaggcccaggagacagtgccctggaacatcatccttctcctgggagggggcttcgccatggccaaaggctgtgaggaatcggggctgtctgtatggattggtgggcagctgcaccccctggagaatgtgccccccgccctggctgtgctgctcatcactgtggtcatcgccttcttcactgagtttgccagcaacacggcgaccatcatcatcttcctgccggtcctggcagagctggccatccgcctgagagtgcaccccctgtatctgatgattccgggcacagtcggctgctcctttgccttcatgctcccggtctcaacgccccccaactccatcgccttcgcctctggacacttgctggtcaaagacatggtgcggacaggcctcctgatgaacctgatgggtgtcctgctgctcagtttggctatgaatacctgggcacagaccatcttccagctgggcaccttcccggactgggctgatatgtactcggtcaatgtcacagcattgccacccaccttggccaatgacacatttcggaccctctgagtccccctggaggactcccttgaggctgaaccctctcaaagggctgtcaccatcacctgctgctaggacactacaaaacaatcaaataattcttttctgtaatccaatatgcagcaagcaagggtgacctccagtggcccactcaagtccatgagccattatctaggatactttctctctctttcatgcagttcaaagcccaggtatctctcagatctgctgcctgagaaataagctcctttatcagttagctgttttatcattaggatacaagacagcccagtgtcatcaacagtgagcaaatctggcat

SEQ ID NO: 182902 - DNA, 1597 bp, Homo sapiens
  Payload ID: 16034
  Gene Symbol: SLC13A3
  Gene Name: solute carrier family 13 (sodium-dependent dicarboxylate transporter), member 3
  ENST ID: ENST00000468915
  CDS Start-End: 372-1597
ttagccgggcatgatggcgggtgcctgtaatctcagctacttgggaggctgagataggagaatcgcttgaacccaggatgtggaggttgcagtgagccgagatcgccactgcactccagcctggacagggcactgggagtgtggcagggggcaattgggactcccttgttcccctggagtttaacctagtggtaaacactttcagacgacgaatcatgctatttggggattttgtacagggtgaggaagtggcactaaggtccaaaggaagctacatatgggtggtccctgctacaccagcctcccaagcctcccagtgcaccttctaggagacaagcaaggaaggccgctgcttgtttgtcatcctgctcatggcggtgtactggtgcacggaggccctgccgctctcagtgacggcgctgctgcccatcgtcctcttccccttcatgggcatcttgccctccaacaaggtctgcccccagtacttcctcgacaccaacttcctcttcctcagtgggctgatcatggccagcgccattgaggagtggaacctgcaccggcgaatcgccctcaagatcctgatgcttgttggagtccagccggccaggctcatcctggggatgatggtgaccacctcgttcttgtccatgtggctgagcaacaccgcctccactgccatgatgcttcccattgccaatgccatcctgaaaagtctctttggccagaaggaggttcgaaaggaccccagccaggagagtgaagagaacacagctgctgtgcggagaaacggcctacacactgtgcccacggagatgcagtttctcgccagcacagaagccaaagaccaccctggggagacagaggttccactggatctgccggctgactccaggaaggaggatgaatatcgtcggaacatctggaagggcttcctcatctccatcccctactcagccagtattgggggcacagccacactcacgggcacagcccctaacctcatcctgcttggccagctcaagagtttctttccgcagtgtgacgtggtgaatttcggctcctggttcattttcgccttccctcttatgctgttgttcctgttggcaggctggctctggatctccttcctgtacgggggactgagcttcaggggctggaggaagaataaatctgagataagaaccaatgcagaagatagggctcgagctgtaattcgggaagaataccagaacctggggcccatcaagtttgccgaacaggctgttttcatccttttctgcatgtttgccatcctcctcttcacccgggacccgaagttcatccctggctgggccagcctcttcaatcctgggtttctttctgatgctgtcaccggcgtggctattgtcaccatcttgttcttcttcccgtcccaaaggccctctctcaagtggtggtttgacttcaaagctcccaacacagagacagagcccttgctgacctggaagaaggcccaggagacagtgccctggaacatcatccttctcctgggagggggcttcgccatggccaaaggctgtgaggaatcggggctgtctgtatggattggtgggcagct

SEQ ID NO: 182903 - DNA, 1887 bp, Homo sapiens
  Payload ID: 16034
  Gene Symbol: SLC13A3
  Gene Name: solute carrier family 13 (sodium-dependent dicarboxylate transporter), member 3
  Uniprot ID: Q8WWT9
  ENST ID: ENST00000495082
  CDS Start-End: 192-1859
actgctgccctgagaacaagccggggcaggccctgccgcaggcctccttccccctctgcccccagcccaggcctccttccccctctgccctgagccctgggcctccttccccttctgccccgagccccgctgaccctctgagcatgcatctcctcctgcaggaaggccgctgcttgtttgtcatcctgctcatggcggtgtactggtgcacggaggccctgccgctctcagtgacggcgctgctgcccatcgtcctcttccccttcatgggcatcttgccctccaacaaggtctgcccccagtacttcctcgacaccaacttcctcttcctcagtgggctgatcatggccagcgccattgaggagtggaacctgcaccggcgaatcgccctcaagatcctgatgcttgttggagtccagccggccaggctcatcctggggatgatggtgaccacctcgttcttgtccatgtggctgagcaacaccgcctccactgccatgatgcttcccattgccaatgccatcctgaaaagtctctttggccagaaggaggttcgaaaggaccccagccaggagagtgaagagaacacagctgctgtgcggagaaacggcctacacactgtgcccacggagatgcagtttctcgccagcacagaagccaaagaccaccctggggagacagaggttccactggatctgccggctgactccaggaaggaggatgaatatcgtcggaacatctggaagggcttcctcatctccatcccctactcagccagtattgggggcacagccacactcacgggcacagcccctaacctcatcctgcttggccagctcaagagtttctttccgcagtgtgacgtggtgaatttcggctcctggttcattttcgccttccctcttatgctgttgttcctgttggcaggctggctctggatctccttcctgtacgggggactgagcttcaggggctggaggaagaataaatctgagataagaaccaatgcagaagatagggctcgagctgtaattcgggaagaataccagaacctggggcccatcaagtttgccgaacaggctgttttcatccttttctgcatgtttgccatcctcctcttcacccgggacccgaagttcatccctggctgggccagcctcttcaatcctgggtttctttctgatgctgtcaccggcgtggctattgtcaccatcttgttcttcttcccgtcccaaaggccctctctcaagtggtggtttgacttcaaagctcccaacacagagacagagcccttgctgacctggaagaaggcccaggagacagtgccctggaacatcatccttctcctgggagggggcttcgccatggccaaaggctgtgaggaatcggggctgtctgtatggattggtgggcagctgcaccccctggagaatgtgccccccgccctggctgtgctgctcatcactgtggtcatcgccttcttcactgagtttgccagcaacacggcgaccatcatcatcttcctgccggtcctggcagagctggccatccgcctgagagtgcaccccctgtatctgatgattccgggcacagtcggctgctcctttgccttcatgctcccggtctcaacgccccccaactccatcgccttcgcctctggacacttgctggtcaaagacatggtgcggacaggcctcctgatgaacctgatgggtgtcctgctgctcagtttggctatgaatacctgggcacagaccatcttccagctgggcaccttcccggactgggctgatatgtactcggtcaatgtcacagcattgccacccaccttggccaatgacacatttcggaccctctgagtccccctggaggactcccttgaggctg

SEQ ID NO: 182904 - DNA, 3283 bp, Homo sapiens
  Payload ID: 16034
  Gene Symbol: SLC13A3
  Gene Name: solute carrier family 13 (sodium-dependent dicarboxylate transporter), member 3
  Uniprot ID: Q8WWT9
  ENST ID: ENST00000472148
  CDS Start-End: 128-1690
ggaagtggcactaaggtccaaaggaagctacatatgggtggtccctgctacaccagcctcccaagcctcccagtgcaccttctaggagacaagcaaggaaggccgctgcttgtttgtcatcctgctcatggcggtgtactggtgcacggaggccctgccgctctcagtgacggcgctgctgcccatcgtcctcttccccttcatgggcatcttgccctccaacaaggtctgcccccagtacttcctcgacaccaacttcctcttcctcagtgggctgatcatggccagcgccattgaggagtggaacctgcaccggcgaatcgccctcaagatcctgatgcttgttggagtccagccggccaggctcatcctggggatgatggtgaccacctcgttcttgtccatgtggctgagcaacaccgcctccactgccatgatgcttcccattgccaatgccatcctgaaaagtctctttggccagaaggaggttcgaaaggaccccagccaggagagtgaagagaacacagctgctgtgcggagaaacggcctacacactgtgcccacggagatgcagtttctcgccagcacagaagccaaagaccaccctggggagacagaggttccactggatctgccggctgactccaggaaggaggatgaatatcgtcggaacatctggaagggcttcctcatctccatcccctactcagccagtattgggggcacagccacactcacgggcacagcccctaacctcatcctgcttggccagctcaagagtttctttccgcagtgtgacgtggtgaatttcggctcctggttcattttcgccttccctcttatgctgttgttcctgttggcaggctggctctggatctccttcctgtacgggggactgagcttcaggggctggaggaagaataaatctgagataagaaccaatgcagaagatagggctcgagctgtaattcgggaagaataccagaacctggggcccatcaagtttctttctgatgctgtcaccggcgtggctattgtcaccatcttgttcttcttcccgtcccaaaggccctctctcaagtggtggtttgacttcaaagctcccaacacagagacagagcccttgctgacctggaagaaggcccaggagacagtgccctggaacatcatccttctcctgggagggggcttcgccatggccaaaggctgtgaggaatcggggctgtctgtatggattggtgggcagctgcaccccctggagaatgtgccccccgccctggctgtgctgctcatcactgtggtcatcgccttcttcactgagtttgccagcaacacggcgaccatcatcatcttcctgccggtcctggcagagctggccatccgcctgagagtgcaccccctgtatctgatgattccgggcacagtcggctgctcctttgccttcatgctcccggtctcaacgccccccaactccatcgccttcgcctctggacacttgctggtcaaagacatggtgcggacaggcctcctgatgaacctgatgggtgtcctgctgctcagtttggctatgaatacctgggcacagaccatcttccagctgggcaccttcccggactgggctgatatgtactcggtcaatgtcacagcattgccacccaccttggccaatgacacatttcggaccctctgagtccccctggaggactcccttgaggctgaaccctctcaaagggctgtcaccatcacctgctgctaggacactacaaaacaatcaaataattcttttctgtaatccaatatgcagcaagcaagggtgacctccagtggcccactcaagtccatgagccattatctaggatactttctctctctttcatgcagttcaaagcccaggtatctctcagatctgctgcctgagaaataagctcctttatcagttagctgttttatcattaggatacaagacagcccagtgtcatcaacagtgagcaaatctggcatggtgtttgtctcgtacagttgggataggaggccattcattcccatgggcacagctaacattatcccccagtgattactttcgattacactgaagagaccaccttgtctttaaagatcactttcctgggctgcaatgttccaacccagttgttccagctgttcacaaccagtgtgtgattttgcttagttggtgcccattctgcaccagttgttttacccctgccgataaccagcagtcagagattcttttttaatccttggagacagggaaagggacagatagctttccaaggacatgagactgtgcaaagcctctttgctgtttctctgggctcctgagcataccaggggaagttctagaaaccgcagctgacatctcgacccaagagatttaggattctcctgtttcatctgggtcagtttggccataattctggggtcaggccaggcctgggtcctgccctcccatggggtgactcatgacccctccagccaggactctcctacatgtggcccccataggcctctgtggctgcaaggcggtcagttgctgcttgtcccagcaggtggccttgatctctccatgccccaccttaagtggtaagcatgtttaattatcaaaggccccatttgtcaggggtgagagaaaagtcaaaagataaattggggccttgtaaaaggccagggtaaaatgtctcaggcaagcaaaagattgtccccttctgcatatgggtaaaactgagacgtccccgtgagcccgaggctggaagtggtgtctgccttcaagggttaatccctctttgttccaagcagaagcattctggcatcccagtgaagagctcaggccctcaggaagtgtctgctgaatggaatggcccagcattagcccagtattggaaaagacaccagcccaggggccctgactcgtcacacttccctttcctaagcctctgagggtggagattcccctaggagcgcttggccagctgggaaggcagcgcccagctgcacttgttgttgatacagcataagtgaatcatgggcatttccctgagagcagtgggagaggccctctgagttggaagttgagctccacctcctttccaagtgagcactcagtgttgaatcacagttacaacccactggggctggtgggagatgcgttgtatgggactggaagcaagaggttcattcaaagagaaactcatgggatttgtaaccagatgaatcatgatttctaagacttctgatcaaaaatactgtgaaataaagaatgttaatc

SEQ ID NO: 182905 - DNA, 3971 bp, Homo sapiens
  Payload ID: 16035
  Gene Symbol: SLC14A1
  Gene Name: solute carrier family 14 (urea transporter), member 1 (Kidd blood group)
  Uniprot ID: Q13336
  ENST ID: ENST00000321925
  CDS Start-End: 233-1402
acacagagcagagtggggctctgagtatataactgttaggtgcctccctccagcaccatctcctgagaagcactctcccttgtcgtggaggtgggcaaatctttatcagccactgccttctgctgccaggaagccagctagagtggtctttaaagaaaactgggcatctcctgctacttaaaatcaaaaactacctaaaataaagattatagagccagaggaagagatagccatggaggacagccccactatggttagagtggacagccccactatggttaggggtgaaaaccaggtttcgccatgtcaagggagaaggtgcttccccaaagctcttggctatgtcaccggtgacatgaaagaacttgccaaccagcttaaagacaaacccgtggtgctccagttcattgactggattctccggggcatatcccaagtggtgttcgtcaacaaccccgtcagtggaatcctgattctggtaggacttcttgttcagaacccctggtgggctctcactggctggctgggaacagtggtctccactctgatggccctcttgctcagccaggacaggtcattaatagcatctgggctctatggctacaatgccaccctggtgggagtactcatggctgtcttttcggacaagggagactatttctggtggctgttactccctgtatgtgctatgtccatgacttgcccaattttctcaagtgcattgaattccatgctcagcaaatgggacctccccgtcttcaccctccctttcaacatggcgttgtcaatgtacctttcagccacaggacattacaatccattctttccagccaaactggtcatacctataactacagctccaaatatctcctggtctgacctcagtgccctggagttgttgaaatctataccagtgggagttggtcagatctatggctgtgataatccatggacagggggcattttcctgggagccatcctactctcctccccactcatgtgcctgcatgctgccataggatcattgctgggcatagcagcgggactcagtctttcagccccatttgaggacatctactttggactctggggtttcaacagctctctggcctgcattgcaatgggaggaatgttcatggcgctcacctggcaaacccacctcctggctcttggctgtgccctgttcacggcctatcttggagtcggcatggcaaactttatggctgaggttggattgccagcttgtacctggcccttctgtttggccacgctattgttcctcatcatgaccacaaaaaattccaacatctacaagatgcccctcagtaaagttacttatcctgaagaaaaccgcatcttctacctgcaagccaagaaaagaatggtggaaagccctttgtgagaacaagccccatttgcagccatggtcacgagtcatttctgcctgactgctccagctaacttccagggtctcagcaaactgctgtttttcacgagtatcaactttcatactgacgcgtctgtaatctgttcttatgctcattttgtattttcctttcaactccaggaatatccttgagcatatgagagtcacatccaggtgatgtgctctggtatggaatttgaaaccccaatggggccttggcactaagactggaatgtatataaagtcaaagtgctccaacagaaggaggaagtgaaaacaaactattagtatttattgatattcttggtgtttagctggctcgatgatgttaacagtattaaaaattaaaccccataaaccaactaagccttatggaattcacagtcacaaaatcgaagttaatccagaattctgtgataagcagcttggctttttttttaaatcaatgcaagttacacattatagccagaatctgtatcacagaggtgcaagctgacagcagagctcagtccccacttcctgcaaacaatggcctgcaccctatcccttgtgtgtgtgacattctctcatgggacaatgttggggtttttcagactgacaggactgcaagagggagaaaggaattttgtcaatcaaaattattctgtattgcaacttttctcagagattgcaaaggattttttaggtagagattatttttccttatgaaaaatgatctgttttaaatgagataaaataggagaagttcctggcttaacctgttcttacatattaaagaaaagttacttactgtatttatgaaatactcagcttaggcatttttactttaacccctaaattgattttgtaaatgccacaaatgcatagaattgttaccaacctccaaagggctctttaaaatcatattttttattcatttgaggatgtcttataaagactgaaggcaaaggtcagattgcttacgggtgttatttttataagttgttgaattccttaatttaaaaaagctcattattttttgcacactcacaatattctctctcagaaatcaatggcatttgaaccaccaaaaagaaataaagggctgagtgcggtggctcacgcctgtaatcccagcactttggggagcccaggcgggcagattgcttgaacccaggagttcaagaccagcctgggcagcatggtgaaaccctgtatctacaaaaaatacaaaaattagccaggcatggtggtgggtgcctgtagttccagctacttgggaggctgaggtgggaaaatgacttgagcccaggaggaggaggctgcagtgagctaagattgcaccactgcactccaacctgggcgacaagagtgaaactgtgtctctcaaaaaaaaaaaaaaacaaacaaaaacaaaaacaaaacaaaacaaaacaaaacaaaacaggtaaggattcccctgttttcctctctttaattttaaagttatcagttccgtaaagtctctgtaaccaaacatactgaagacagcaacagaagtcacgttcagggactggctcacacctgtaatcccagcactttgggagatggaggtaaaaggatctcttgagcccaggagttcaagaccagcttgggcaacatagcaagactccatctcttaaaaaataaaaatagtaacattagccaggtgtagcagcacacatctgcagcagctactcaggaggctgaggtggaaagatcgcttgtgcacagaagttcgaggctgcagtgagctatatgatcatgtcactgcactccagcctgtgtgaccgagcaagaccctatctcaaaaaaattaattaattaattaattaattaatttaaaaaggaagtcatgttcatttactttccacttcagtgtgtatcgtgtagtattttggaggttggaaagtgaaacgtaggaatcctgaagattttttccacttctagtttgcagtgctcagtgcacaatatacattttgctgaatgaataaacagaaatagggaagtaaacctacaaatattttagggagaagctcacttcttccttttctcaggaaaccaagcaagcaaacatatcgttccaattttaaaacccagtgaccaaagcctttggaactatgaatttgcaactgtcataggtttatggatattgctgtggagaagctcaattttcagtgtttgaactgaaccctttcttgttagggaacgtgtgaaagaagaattgtggggaaaaaaaagcaagcataaccaaagatcatcagcagtgaagaatctaggctgtggctgagagaaccagaggcctctaaaatggacccgagtcgatcttcagaacagggatctaccatgcaggagcttcttgtgctcacacaaatctgtaaatgggaacattgtacattgtcgaatttaaatgatattaattttctcaagctatttttgttactattttcctaaaattgaatatttgcagggagcacttatactttttcctaatgtctgtataacaaatttctatgcaagtacatgaataaattatgctcacagctca

SEQ ID NO: 182906 - DNA, 1390 bp, Homo sapiens
  Payload ID: 16035
  Gene Symbol: SLC14A1
  Gene Name: solute carrier family 14 (urea transporter), member 1 (Kidd blood group)
  ENST ID: ENST00000402943
  CDS Start-End: 319-1173
atctcctgagaagcactctcccttgtcgtggaggtgggcaaatctttatcagccactgccttctgctgccaggaagccagctagagtggtctttaaagaaaactgggcatctcctgctacttaaaatcaaaaactacctaaaataaagattataacaaacccgtggtgctccagttcattgactggattctccggggcatatcccaagtggtgttcgtcaacaaccccgtcagtggaatcctgattctggtaggacttcttgttcagaacccctggtgggctctcactggctggctgggaacagtggtctccactctgatggccctcttgctcagccaggacaggtcattaatagcatctgggctctatggctacaatgccaccctggtgggagtactcatggctgtcttttcggacaagggagactatttctggtggctgttactccctgtatgtgctatgtccatgacttgcccaattttctcaagtgcattgaattccatgctcagcaaatgggacctccccgtcttcaccctccctttcaacatggcgttgtcaatgtacctttcagccacaggacattacaatccattctttccagccaaactggtcatacctataactacagctccaaatatctcctggtctgacctcagtgccctggagttgttgaaatctataccagtgggagttggtcagatctatggctgtgataatccatggacagggggcattttcctgggagccatcctactctcctccccactcatgtgcctgcatgctgccataggatcattgctgggcatagcagcgggactcagtctttcagccccatttgaggacatctactttggactctggggtttcaacagctctctggcctgcattgcaatgggaggaatgttcatggcgctcacctggcaaacccacctcctggctcttggctgtgccctgttcacggcctatcttggagtcggcatggcaaactttatggctgaggttggattgccagcttgtacctggcccttctgtttggccacgctattgttcctcatcatgaccacaaaaaattccaacatctacaagatgcccctcagtaaagttacttatcctgaagaaaaccgcatcttctacctgcaagccaagaaaagaatggtggaaagccctttgtgagaacaagccccatttgcagccatggtcacgagtcatttctgcctgactgctccagctaacttccagggtctcagcaaactgctgtttttcacgagtatcaactttcatactgacgcgtctgtaatctgttcttatgctcattttgtattttcctttcaactccaggaatatccttgagcatatgagagtcacatccaggtgatgtgctctggtatgg

SEQ ID NO: 182907 - DNA, 2264 bp, Homo sapiens
  Payload ID: 16035
  Gene Symbol: SLC14A1
  Gene Name: solute carrier family 14 (urea transporter), member 1 (Kidd blood group)
  Uniprot ID: Q13336
  ENST ID: ENST00000436407
  CDS Start-End: 548-1885
atgcttacaaagcgtggctagtatcttattacagaaaacagagcccacatcatgcatccttcttctcacatttcataaacaaggccaagggaaactgctgtggggcaacctgttgctttggtgttggtccccaagatgcagccctcacaatctgcccccaaacgtgtcagaacatgaaccccctcctccccctctggaagaagcaacctcagatccaacagcagagacacgcagcagaacaaaatctgggcattggtccctgtgtaggatggcttcccgttattttttttttaagcaaagtaaatgaacatcaaatttccatagtcagctgctgtctttctgcccactgagagctctttggtgaaggcaaagtcctccttcttcattagcggtctcccatgtggggccacatcttccctcaccaggaacccagtgggcgcgctccagcccccctcagcttgccttttgcgtggtcattagagctagggcacacgtcatgctgattcacatatttttgccctttgtcatgtattgagaaaaagtaaggatgaatggacggtctttgattggcggcgctggtgacgcccgtcatggtcctgtttggaaggacccttttggaactaaagctggtgacgcagcgcgcagaggcatcgcccggctaagcttggccctggcagatgggtcgcaggaacaggagccagaggaagagatagccatggaggacagccccactatggttagagtggacagccccactatggttaggggtgaaaaccaggtttcgccatgtcaagggagaaggtgcttccccaaagctcttggctatgtcaccggtgacatgaaagaacttgccaaccagcttaaagacaaacccgtggtgctccagttcattgactggattctccggggcatatcccaagtggtgttcgtcaacaaccccgtcagtggaatcctgattctggtaggacttcttgttcagaacccctggtgggctctcactggctggctgggaacagtggtctccactctgatggccctcttgctcagccaggacaggtcattaatagcatctgggctctatggctacaatgccaccctggtgggagtactcatggctgtcttttcggacaagggagactatttctggtggctgttactccctgtatgtgctatgtccatgacttgcccaattttctcaagtgcattgaattccatgctcagcaaatgggacctccccgtcttcaccctccctttcaacatggcgttgtcaatgtacctttcagccacaggacattacaatccattctttccagccaaactggtcatacctataactacagctccaaatatctcctggtctgacctcagtgccctggagttgttgaaatctataccagtgggagttggtcagatctatggctgtgataatccatggacagggggcattttcctgggagccatcctactctcctccccactcatgtgcctgcatgctgccataggatcattgctgggcatagcagcgggactcagtctttcagccccatttgaggacatctactttggactctggggtttcaacagctctctggcctgcattgcaatgggaggaatgttcatggcgctcacctggcaaacccacctcctggctcttggctgtgccctgttcacggcctatcttggagtcggcatggcaaactttatggctgaggttggattgccagcttgtacctggcccttctgtttggccacgctattgttcctcatcatgaccacaaaaaattccaacatctacaagatgcccctcagtaaagttacttatcctgaagaaaaccgcatcttctacctgcaagccaagaaaagaatggtggaaagccctttgtgagaacaagccccatttgcagccatggtcacgagtcatttctgcctgactgctccagctaacttccagggtctcagcaaactgctgtttttcacgagtatcaactttcatactgacgcgtctgtaatctgttcttatgctcattttgtattttcctttcaactccaggaatatccttgagcatatgagagtcacatccaggtgatgtgctctggtatggaatttgaaaccccaatggggccttggcactaagactggaatgtatataaagtcaaagtgctccaacagaaggaggaagtgaaaacaaactattagtatttattgatattcttggtgtttagctggctcgatgatgttaacagtattaaaaattaaaccccat

SEQ ID NO: 182908 - DNA, 1554 bp, Homo sapiens
  Payload ID: 16035
  Gene Symbol: SLC14A1
  Gene Name: solute carrier family 14 (urea transporter), member 1 (Kidd blood group)
  Uniprot ID: Q13336
  ENST ID: ENST00000415427
  CDS Start-End: 166-1503
atctcctgagaagcactctcccttgtcgtggaggtgggcaaatctttatcagccactgccttctgctgccaggaagccagctagagtggtctttaaagaaaactgggcatctcctgctacttaaaatcaaaaactacctaaaataaagattataaaaaagtaaggatgaatggacggtctttgattggcggcgctggtgacgcccgtcatggtcctgtttggaaggacccttttggaactaaagctggtgacgcagcgcgcagaggcatcgcccggctaagcttggccctggcagatgggtcgcaggaacaggagccagaggaagagatagccatggaggacagccccactatggttagagtggacagccccactatggttaggggtgaaaaccaggtttcgccatgtcaagggagaaggtgcttccccaaagctcttggctatgtcaccggtgacatgaaagaacttgccaaccagcttaaagacaaacccgtggtgctccagttcattgactggattctccggggcatatcccaagtggtgttcgtcaacaaccccgtcagtggaatcctgattctggtaggacttcttgttcagaacccctggtgggctctcactggctggctgggaacagtggtctccactctgatggccctcttgctcagccaggacaggtcattaatagcatctgggctctatggctacaatgccaccctggtgggagtactcatggctgtcttttcggacaagggagactatttctggtggctgttactccctgtatgtgctatgtccatgacttgcccaattttctcaagtgcattgaattccatgctcagcaaatgggacctccccgtcttcaccctccctttcaacatggcgttgtcaatgtacctttcagccacaggacattacaatccattctttccagccaaactggtcatacctataactacagctccaaatatctcctggtctgacctcagtgccctggagttgttgaaatctataccagtgggagttggtcagatctatggctgtgataatccatggacagggggcattttcctgggagccatcctactctcctccccactcatgtgcctgcatgctgccataggatcattgctgggcatagcagcgggactcagtctttcagccccatttgaggacatctactttggactctggggtttcaacagctctctggcctgcattgcaatgggaggaatgttcatggcgctcacctggcaaacccacctcctggctcttggctgtgccctgttcacggcctatcttggagtcggcatggcaaactttatggctgaggttggattgccagcttgtacctggcccttctgtttggccacgctattgttcctcatcatgaccacaaaaaattccaacatctacaagatgcccctcagtaaagttacttatcctgaagaaaaccgcatcttctacctgcaagccaagaaaagaatggtggaaagccctttgtgagaacaagccccatttgcagccatggtcacgagtcatttctgcctgactgct

SEQ ID NO: 182909 - DNA, 1048 bp, Homo sapiens
  Payload ID: 16035
  Gene Symbol: SLC14A1
  Gene Name: solute carrier family 14 (urea transporter), member 1 (Kidd blood group)
  ENST ID: ENST00000535474
  CDS Start-End: 210-983
atctcctgagaagcactctcccttgtcgtggaggtgggcaaatctttatcagccactgccttctgctgccaggaagccagctagagtggtctttaaagaaaactgggcatctcctgctacttaaaatcaaaaactacctaaaataaagattatagtcattaatagcatctgggctctatggctacaatgccaccctggtgggagtactcatggctgtcttttcggacaagggagactatttctggtggctgttactccctgtatgtgctatgtccatgacttgcccaattttctcaagtgcattgaattccatgctcagcaaatgggacctccccgtcttcaccctccctttcaacatggcgttgtcaatgtacctttcagccacaggacattacaatccattctttccagccaaactggtcatacctataactacagctccaaatatctcctggtctgacctcagtgccctggagttgttgaaatctataccagtgggagttggtcagatctatggctgtgataatccatggacagggggcattttcctgggagccatcctactctcctccccactcatgtgcctgcatgctgccataggatcattgctgggcatagcagcgggactcagtctttcagccccatttgaggacatctactttggactctggggtttcaacagctctctggcctgcattgcaatgggaggaatgttcatggcgctcacctggcaaacccacctcctggctcttggctgtgccctgttcacggcctatcttggagtcggcatggcaaactttatggctgaggttggattgccagcttgtacctggcccttctgtttggccacgctattgttcctcatcatgaccacaaaaaattccaacatctacaagatgcccctcagtaaagttacttatcctgaagaaaaccgcatcttctacctgcaagccaagaaaagaatggtggaaagccctttgtgagaacaagccccatttgcagccatggtcacgagtcatttctgcctgactgctccagctaacttcca

SEQ ID NO: 182910 - DNA, 2371 bp, Homo sapiens
  Payload ID: 16035
  Gene Symbol: SLC14A1
  Gene Name: solute carrier family 14 (urea transporter), member 1 (Kidd blood group)
  ENST ID: ENST00000502059
  CDS Start-End: 301-1146
gcaccatctcctgagaagcactctcccttgtcgtggaggtgggcaaatctttatcagccactgccttctgctgccaggaagccagctagagtggtctttaaagaaaactgggcatctcctgctacttaaaatcaaaaactacctaaaataaagattataaaaaagtaaggatgaatggacggtctttgattggcggcgctggtgacgcccgtcatggtcctgtttggaaggacccttttggaactaaagctggtgacgcagcgcgcagaggcatcgcccggctaagcttggccctggcagatgggtcgcaggaacaggtcattaatagcatctgggctctatggctacaatgccaccctggtgggagtactcatggctgtcttttcggacaagggagactatttctggtggctgttactccctgtatgtgctatgtccatgacttgcccaattttctcaagtgcattgaattccatgctcagcaaatgggacctccccgtcttcaccctccctttcaacatggcgttgtcaatgtacctttcagccacaggacattacaatccattctttccagccaaactggtcatacctataactacagctccaaatatctcctggtctgacctcagtgccctggagttgttgaaatctataccagtgggagttggtcagatctatggctgtgataatccatggacagggggcattttcctgggagccatcctactctcctccccactcatgtgcctgcatgctgccataggatcattgctgggcatagcagcgggactcagtctttcagccccatttgaggacatctactttggactctggggtttcaacagctctctggcctgcattgcaatgggaggaatgttcatggcgctcacctggcaaacccacctcctggctcttggctgtgccctgttcacggcctatcttggagtcggcatggcaaactttatggctgaggttggattgccagcttgtacctggcccttctgtttggccacgctattgttcctcatcatgaccacaaaaaattccaacatctacaagatgcccctcagtaaagttacttatcctgaagaaaaccgcatcttctacctgcaagccaagaaaagaatggtggaaagccctttgtgagaacaagccccatttgcagccatggtcacgagtcatttctgcctgactgctccagctaacttccagggtctcagcaaactgctgtttttcacgagtatcaactttcatactgacgcgtctgtaatctgttcttatgctcattttgtattttcctttcaactccaggaatatccttgagcatatgagagtcacatccaggtgatgtgctctggtatggaatttgaaaccccaatggggccttggcactaagactggaatgtatataaagtcaaagtgctccaacagaaggaggaagtgaaaacaaactattagtatttattgatattcttggtgtttagctggctcgatgatgttaacagtattaaaaattaaaccccataaaccaactaagccttatggaattcacagtcacaaaatcgaagttaatccagaattctgtgataagcagcttggctttttttttaaatcaatgcaagttacacattatagccagaatctgtatcacagaggtgcaagctgacagcagagctcagtccccacttcctgcaaacaatggcctgcaccctatcccttgtgtgtgtgacattctctcatgggacaatgttggggtttttcagactgacaggactgcaagagggagaaaggaattttgtcaatcaaaattattctgtattgcaacttttctcagagattgcaaaggattttttaggtagagattatttttccttatgaaaaatgatctgttttaaatgagataaaataggagaagttcctggcttaacctgttcttacatattaaagaaaagttacttactgtatttatgaaatactcagcttaggcatttttactttaacccctaaattgattttgtaaatgccacaaatgcatagaattgttaccaacctccaaagggctctttaaaatcatattttttattcatttgaggatgtcttataaagactgaaggcaaaggtcagattgcttacgggtgttatttttataagttgttgaattccttaatttaaaaaagctcattattttttgcacactcacaatattctctctcagaaatcaatggcatttgaaccaccaaaaagaaataaagggctgagtgcggtggctcacgcctgtaatcccagcactttggggagcccaggcgggcagattgcttgaacccaggagttcaagaccagcctgggcagcatggtgaaaccctgtatctac

SEQ ID NO: 182911 - DNA, 572 bp, Homo sapiens
  Payload ID: 16035
  Gene Symbol: SLC14A1
  Gene Name: solute carrier family 14 (urea transporter), member 1 (Kidd blood group)
  ENST ID: ENST00000587601
  CDS Start-End: 488-572
agtatataactgttaggtgcctccctccagcaccatctcctgagaagcactctcccttgtcgtggaggtgggcaaatctttatcagccactgccttctgctgccaggaagccagctagagtggtctttaaagaaaactgggcatctcctgctacttaaaatcaaaaactacctaaaataaagattatatcttctcaactagactgaactccttaagtgcaagaaatacacgcttagtaaatgtttgttggaccagacactgcaccttatgaaattaaagaccagaacattctcatggtagcattacagacactgatggcaaagacaaacccgtggtgctccagttcattgactggattctccggggcatatcccaagtggtgttcgtcaacaaccccgtcagtggaatcctgattctggtaggacttcttgttcagaacccctggtgggctctcactggctggctgggaacagtggtctccactctgatggccctcttgctcagccaggacaggtcattaatagcatctgggctctatggctacaatgccaccctggtgggagtactcatgg

SEQ ID NO: 182912 - DNA, 1022 bp, Homo sapiens
  Payload ID: 16035
  Gene Symbol: SLC14A1
  Gene Name: solute carrier family 14 (urea transporter), member 1 (Kidd blood group)
  ENST ID: ENST00000589700
  CDS Start-End: 1-909
atggaggacagccccactatggttagagtggacagccccactatggttaggggtgaaaaccaggtttcgccatgtcaagggagaaggtgcttccccaaagctcttggctatgtcaccggtgacatgaaagaacttgccaaccagcttaaagacaaacccgtggtgctccagttcattgactggattctccggggcatatcccaagtggtgttcgtcaacaaccccgtcagtggaatcctgattctggtaggacttcttgttcagaacccctggtgggctctcactggctggctgggaacagtggtctccactctgatggccctcttgctcagccaggacaggtcattaatagcatctgggctctatggctacaatgccaccctggtgggagtactcatggctgtcttttcggacaagggagactatttctggtggctgttactccctgtatgtgctatgtccatgacttgcccaattttctcaagtgcattgaattccatgctcagcaaatgggacctccccgtcttcaccctccctttcaacatggcgttgtcaatgtacctttcagccacaggacattacaatccattctttccagccaaactggtcatacctataactacagctccaaatatctcctggtctgacctcagtgccctggaggactcagtctttcagccccatttgaggacatctactttggactctggggtttcaacagctctctggcctgcattgcaatgggaggaatgttcatggcgctcacctggcaaacccacctcctggctcttggctgtgccctgttcacggcctatcttggagtcggcatggcaaactttatggctgaggttggattgccagcttgtacctggcccttctgtttggccacgctattgttcctcatcatgaccacaaaaaattccaacatctacaagatgcccctcagtaaagttacttatcctgaagaaaaccgcatcttctacctgcaagccaagaaaagaatggtggaaagccctttgtga

SEQ ID NO: 182913 - DNA, 779 bp, Homo sapiens
  Payload ID: 16035
  Gene Symbol: SLC14A1
  Gene Name: solute carrier family 14 (urea transporter), member 1 (Kidd blood group)
  ENST ID: ENST00000590377
  CDS Start-End: 1-521
ctctcactggctggctgggaacagtggtctccactctgatggccctcttgctcagccaggacaggtcattaatagcatctgggctctatggctacaatgccaccctggtgggagtactcatggctgtcttttcggacaagggagactatttctggtggctgttactccctgtatgtgctatgtccatgacttgcccaattttctcaagtgcattgaattccatgctcagcaaatgggacctccccgtcttcaccctccctttcaacatggcgttgtcaatgtacctttcagccacaggacattacaatccattctttccagccaaactggtcatacctataactacagctccaaatatctcctggtctgacctcagtgccctggagccctgttcacggcctatcttggagtcggcatggcaaactttatggctgagggaacgtgtgaaagaagaattgtggggaaaaaaaagcaagcataaccaaagatcatcagcagtgaagaatctaggctgtggctgagagaaccagaggcctctaaaatggacccgagtcgatcttcagaacagggatctaccatgcaggagcttcttgtgctcacacaaatctgtaaatgggaacattgtacattgtcgaatttaaatgatattaattttctcaagctatttttgttactattttcctaaaattgaatatttgcagggagcacttatactttttcctaatgtctgtataacaaatttctatgcaagtacatgaataaattatgctcacagctca

SEQ ID NO: 182914 - DNA, 569 bp, Homo sapiens
  Payload ID: 16035
  Gene Symbol: SLC14A1
  Gene Name: solute carrier family 14 (urea transporter), member 1 (Kidd blood group)
  ENST ID: ENST00000586951
  CDS Start-End: 263-569
atctcctgagaagcactctcccttgtcgtggaggtgggcaaatctttatcagccactgccttctgctgccaggaagccagctagagtggtctttaaagaaaactgggcatctcctgctacttaaaatcaaaaactacctaaaataaagattatagacccttttggaactaaagctggtgacgcagcgcgcagaggcatcgcccggctaagcttggccctggcagatgggtcgcaggaacaggagccagaggaagagatagccatggaggacagccccactatggttagagtggacagccccactatggttaggggtgaaaaccaggtttcgccatgtcaagggagaaggtgcttccccaaagctcttggctatgtcaccggtgacatgaaagaacttgccaaccagcttaaagacaaacccgtggtgctccagttcattgactggattctccggggcatatcccaagtggtgttcgtcaacaaccccgtcagtggaatcctgattctggtaggacttcttgttcagaacccctggtgggctctcactggctggctgggaacagtggtct

SEQ ID NO: 182915 - DNA, 602 bp, Homo sapiens
  Payload ID: 16035
  Gene Symbol: SLC14A1
  Gene Name: solute carrier family 14 (urea transporter), member 1 (Kidd blood group)
  ENST ID: ENST00000589891
  CDS Start-End: 215-602
gtctttctgcccactgagagctctttggtgaaggcaaagtcctccttcttcattagcggtctcccatgtggggccacatcttccctcaccaggaacccagtgggcgcgctccagcccccctcagcttgccttttgcgtggtcattagagctagggcacacgtcatgctgattcacatatttttgccctttgtcatgtattgagaaaaagtaaggatgaatggacggtctttgattggcggcgctggtgacgcccgtcatggtcctgtttggaaggacccttttggaactaaagctggtgacgcagcgcgcagaggcatcgcccggctaagcttggccctggcagatgggtcgcaggaacaggagccagaggaagagatagccatggaggacagccccactatggttagagtggacagccccactatggttaggggtgaaaaccaggtttcgccatgtcaagggagaaggtgcttccccaaagctcttggctatgtcaccggtgacatgaaagaacttgccaaccagcttaaagacaaacccgtggtgctccagttcattgactggattctccggggcatatcccaagtggtgttcgtcaaca

SEQ ID NO: 182916 - DNA, 652 bp, Homo sapiens
  Payload ID: 16035
  Gene Symbol: SLC14A1
  Gene Name: solute carrier family 14 (urea transporter), member 1 (Kidd blood group)
  ENST ID: ENST00000589322
  CDS Start-End: 146-652
atctcctgagaagcactctcccttgtcgtggaggtgggcaaatctttatcagccactgccttctgctgccaggaagccagctagagtggtgtcattaatagcatctgggctctatggctacaatgccaccctggtgggagtactcatggctgtcttttcggacaagggagactatttctggtggctgttactccctgtatgtgctatgtccatgacttgcccaattttctcaagtgcattgaattccatgctcagcaaatgggacctccccgtcttcaccctccctttcaacatggcgttgtcaatgtacctttcagccacaggacattacaatccattctttccagccaaactggtcatacctataactacagctccaaatatctcctggtctgacctcagtgccctggagttgttgaaatctataccagtgggagttggtcagatctatggctgtgataatccatggacagggggcattttcctgggagccatcctactctcctccccactcatgtgcctgcatgctgccataggatcattgctgggcatagcagcgggactcagtctttcagccccatttgaggacatctactttggactctggggtttcaacagctctctggcctgcattgcaatgggaggaatgttc

SEQ ID NO: 182917 - DNA, 1682 bp, Homo sapiens
  Payload ID: 16035
  Gene Symbol: SLC14A1
  Gene Name: solute carrier family 14 (urea transporter), member 1 (Kidd blood group)
  ENST ID: ENST00000588179
  CDS Start-End: 154-798
gcactctcccttgtcgtggaggtgggcaaatctttatcagccactgccttctgctgccaggaagccagctagagtggtctttaaagaaaactgggcatctcctgctacttaaaatcaaaaactacctaaaataaagattataaaaaagtaaggatgaatggacggtctttgattggcggcgctggtgacgcccgtcatggtcctgtttggaaggacccttttggaactaaagctggtgacgcagcgcgcagaggcatcgcccggctaagcttggccctggcagatgggtcgcaggaacaggagccagaggaagagatagccatggaggacagccccactatggttagagtggacagccccactatggttaggggtgaaaaccaggtttcgccatgtcaagggagaaggtgcttccccaaagctcttggctatgtcaccggtgacatgaaagaacttgccaaccagcttaaagacaaacccgtggtgctccagttcattgactggattctccggggcatatcccaagtggtgttcgtcaacaaccccgtcagtggaatcctgattctggtaggacttcttgttcagaacccctggtgggctctcactggctggctgggaacagtggtctccactctgatggccctcttgctcagccaggacaggtcattaatagcatctgggctctatggctacaatgccaccctggtgggagtactcatggctgtcttttcggacaagggagactatttctggtggctgttactccctgtatgtgctatgtccatgacttgttgttgaaatctataccagtgggagttggtcagatctatggctgtgataatccatggacagggggcattttcctgggagccatcctactctcctccccactcatgtgcctgcatgctgccataggatcattgctgggcatagcagcgggactcagtctttcagccccatttgaggacatctactttggactctggggtttcaacagctctctggcctgcattgcaatgggaggaatgttcatggcgctcacctggcaaacccacctcctggctcttggctgtgccctgttcacggcctatcttggagtcggcatggcaaactttatggctgaggttggattgccagcttgtacctggcccttctgtttggccacgctattgttcctcatcatgaccacaaaaaattccaacatctacaagatgcccctcagtaaagttacttatcctgaagaaaaccgcatcttctacctgcaagccaagaaaagaatggtggaaagccctttgtgagaacaagccccatttgcagccatggtcacgagtcatttctgcctgactgctccagctaacttccagggtctcagcaaactgctgtttttcacgagtatcaactttcatactgacgcgtctgtaatctgttcttatgctcattttgtattttcctttcaactccaggaatatccttgagcatatgagagtcacatccaggtgatgtgctctggtatggaatttgaaaccccaatggggccttggcactaagactggaatgtatataaagtcaaagtgctccaacagaaggaggaagtgaaaacaaactattagtatttattgatattcttggtgtttagctggctcgatgatgttaacagtattaaaaattaaaccccataaacc

SEQ ID NO: 182918 - DNA, 557 bp, Homo sapiens
  Payload ID: 16035
  Gene Symbol: SLC14A1
  Gene Name: solute carrier family 14 (urea transporter), member 1 (Kidd blood group)
  ENST ID: ENST00000590246
  CDS Start-End: 210-557
atcgcccggctaagcttggccctggcagatgggtcgcaggaacagacaaacccgtggtgctccagttcattgactggattctccggggcatatcccaagtggtgttcgtcaacaaccccgtcagtggaatcctgattctggtaggacttcttgttcagaacccctggtgggctctcactggctggctgggaacagtggtctccactctgatggccctcttgctcagccaggacaggtcattaatagcatctgggctctatggctacaatgccaccctggtgggagtactcatggctgtcttttcggacaagggagactatttctggtggctgttactccctgtatgtgctatgtccatgacttgcccaattttctcaagtgcattgaattccatgctcagcaaatgggacctccccgtcttcaccctccctttcaacatggcgttgtcaatgtacctttcagccacaggacattacaatccattctttccagccaaactggtcatacctataactacagctccaaatatctcctggtctgacctcagtgccctggag

SEQ ID NO: 182919 - DNA, 552 bp, Homo sapiens
  Payload ID: 16035
  Gene Symbol: SLC14A1
  Gene Name: solute carrier family 14 (urea transporter), member 1 (Kidd blood group)
  ENST ID: ENST00000586056
  CDS Start-End: 145-552
aagtgttttaaccaggacacaggaatatctgacagcattttctttgtttccaattacagctttaaagaaaactgggcatctcctgctacttaaaatcaaaaactacctaaaataaagattatagagccagaggaagagatagccatggaggacagccccactatggttagagtggacagccccactatggttaggggtgaaaaccaggtttcgccatgtcaagggagaaggtgcttccccaaagctcttggctatgtcaccggtgacatgaaagaacttgccaaccagcttaaagacaaacccgtggtgctccagttcattgactggattctccggggcatatcccaagtggtgttcgtcaacaaccccgtcagtggaatcctgattctggtaggacttcttgttcagaacccctggtgggctctcactggctggctgggaacagtggtctccactctgatggccctcttgctcagccaggacaggtcattaatagcatctgggctctatggctacaatgccaccctggtgggagtactcatggctgtcttt

SEQ ID NO: 182920 - DNA, 2846 bp, Homo sapiens
  Payload ID: 16035
  Gene Symbol: SLC14A1
  Gene Name: solute carrier family 14 (urea transporter), member 1 (Kidd blood group)
  Uniprot ID: Q13336
  ENST ID: ENST00000586142
  CDS Start-End: 1293-2462
atttgttagctatggtaaatggaacaatgatggggccagaaatatccatgaggaccatttgatcacagcctggcaacacagagaagacaggctggtttctctatgtgggctttcagtgtttctttggtagtgtcttatgtggctgtggcttcaacattccacaattatgccttccagggtctgatgattttggcgtttccctgcttcccaattgacctggctgtgctgttggctgttcttgcacactcaaggtggttttgccattggcttcctccctcagcctgcctctgggattatgccactgctattcttttttatctaccatcagcacaatgaaatcatcatttttgtcttcaaggtaccaaattctggtgatattggtgctttcttgcagctacttatcatgagaagtgaatggtctcatagtgaacacagtcatggttatagtgttcatacgttccagagacatgtttcctataattatgccctgcacatttttctatcatacaatccttagattacagctctttggttttcaacagctttgtccaattccatctttcccagtttctctaccttgatgaaatatccttcttgcctggttttacatatttaaataacaaattccaaaagtaaagagtatctgaggcagtcacatgacataaggacaaattcaagccatcttggacttgcagagggtggggagaccgtgtcaacacacacaattttaaaaatttcttccctttcaatcttttaaaaacaaaactttttataaaataaaaatgtaatttaaaaaggctacctgtcttggcaagtagctgatcagcctgcattggtgagcaggccattccataacctggtttcttgctccttaattgacagcatggagctaacgtacttaatttcagctctttctacgtgatttgactcattctgttaacattaactgtttttcagtcttctcaactagactgaactccttaagtgcaagaaatacacgcttagtaaatgtttgttggaccagacactgcaccttatgaaattaaagaccagaacattctcatggtagcattacagacactgatggcaaaggtactgtgggatttgggtttggctaataagctctgtggtggtgtttcagaaggaaaatggtgctctcttagttctatggaacatagtggtccagatcttctactgtaaccaggcccaaagctggctaatctggagggctctgccttagggatacttataagctctgtccttccctcaaggagccagaggaagagatagccatggaggacagccccactatggttagagtggacagccccactatggttaggggtgaaaaccaggtttcgccatgtcaagggagaaggtgcttccccaaagctcttggctatgtcaccggtgacatgaaagaacttgccaaccagcttaaagacaaacccgtggtgctccagttcattgactggattctccggggcatatcccaagtggtgttcgtcaacaaccccgtcagtggaatcctgattctggtaggacttcttgttcagaacccctggtgggctctcactggctggctgggaacagtggtctccactctgatggccctcttgctcagccaggacaggtcattaatagcatctgggctctatggctacaatgccaccctggtgggagtactcatggctgtcttttcggacaagggagactatttctggtggctgttactccctgtatgtgctatgtccatgacttgcccaattttctcaagtgcattgaattccatgctcagcaaatgggacctccccgtcttcaccctccctttcaacatggcgttgtcaatgtacctttcagccacaggacattacaatccattctttccagccaaactggtcatacctataactacagctccaaatatctcctggtctgacctcagtgccctggagttgttgaaatctataccagtgggagttggtcagatctatggctgtgataatccatggacagggggcattttcctgggagccatcctactctcctccccactcatgtgcctgcatgctgccataggatcattgctgggcatagcagcgggactcagtctttcagccccatttgaggacatctactttggactctggggtttcaacagctctctggcctgcattgcaatgggaggaatgttcatggcgctcacctggcaaacccacctcctggctcttggctgtgccctgttcacggcctatcttggagtcggcatggcaaactttatggctgaggttggattgccagcttgtacctggcccttctgtttggccacgctattgttcctcatcatgaccacaaaaaattccaacatctacaagatgcccctcagtaaagttacttatcctgaagaaaaccgcatcttctacctgcaagccaagaaaagaatggtggaaagccctttgtgagaacaagccccatttgcagccatggtcacgagtcatttctgcctgactgctccagctaacttccagggtctcagcaaactgctgtttttcacgagtatcaactttcatactgacgcgtctgtaatctgttcttatgctcattttgtattttcctttcaactccaggaatatccttgagcatatgagagtcacatccaggtgatgtgctctggtatggaatttgaaaccccaatggggccttggcactaagactggaatgtatataaagtcaaagtgctccaacagaaggaggaagtgaaaacaaactattagtatttattgatattcttggtgtttagctggctcgatgatgttaacagtattaaaaattaaaccccataaacc

SEQ ID NO: 182921 - DNA, 3823 bp, Homo sapiens
  Payload ID: 16035
  Gene Symbol: SLC14A1
  Gene Name: solute carrier family 14 (urea transporter), member 1 (Kidd blood group)
  ENST ID: ENST00000619403
  CDS Start-End: 233-1141
acacagagcagagtggggctctgagtatataactgttaggtgcctccctccagcaccatctcctgagaagcactctcccttgtcgtggaggtgggcaaatctttatcagccactgccttctgctgccaggaagccagctagagtggtctttaaagaaaactgggcatctcctgctacttaaaatcaaaaactacctaaaataaagattatagagccagaggaagagatagccatggaggacagccccactatggttagagtggacagccccactatggttaggggtgaaaaccaggtttcgccatgtcaagggagaaggtgcttccccaaagctcttggctatgtcaccggtgacatgaaagaacttgccaaccagcttaaagacaaacccgtggtgctccagttcattgactggattctccggggcatatcccaagtggtgttcgtcaacaaccccgtcagtggaatcctgattctggtaggacttcttgttcagaacccctggtgggctctcactggctggctgggaacagtggtctccactctgatggccctcttgctcagccaggacaggtcattaatagcatctgggctctatggctacaatgccaccctggtgggagtactcatggctgtcttttcggacaagggagactatttctggtggctgttactccctgtatgtgctatgtccatgacttgcccaattttctcaagtgcattgaattccatgctcagcaaatgggacctccccgtcttcaccctccctttcaacatggcgttgtcaatgtacctttcagccacaggacattacaatccattctttccagccaaactggtcatacctataactacagctccaaatatctcctggtctgacctcagtgccctggaggactcagtctttcagccccatttgaggacatctactttggactctggggtttcaacagctctctggcctgcattgcaatgggaggaatgttcatggcgctcacctggcaaacccacctcctggctcttggctgtgccctgttcacggcctatcttggagtcggcatggcaaactttatggctgaggttggattgccagcttgtacctggcccttctgtttggccacgctattgttcctcatcatgaccacaaaaaattccaacatctacaagatgcccctcagtaaagttacttatcctgaagaaaaccgcatcttctacctgcaagccaagaaaagaatggtggaaagccctttgtgagaacaagccccatttgcagccatggtcacgagtcatttctgcctgactgctccagctaacttccagggtctcagcaaactgctgtttttcacgagtatcaactttcatactgacgcgtctgtaatctgttcttatgctcattttgtattttcctttcaactccaggaatatccttgagcatatgagagtcacatccaggtgatgtgctctggtatggaatttgaaaccccaatggggccttggcactaagactggaatgtatataaagtcaaagtgctccaacagaaggaggaagtgaaaacaaactattagtatttattgatattcttggtgtttagctggctcgatgatgttaacagtattaaaaattaaaccccataaaccaactaagccttatggaattcacagtcacaaaatcgaagttaatccagaattctgtgataagcagcttggctttttttttaaatcaatgcaagttacacattatagccagaatctgtatcacagaggtgcaagctgacagcagagctcagtccccacttcctgcaaacaatggcctgcaccctatcccttgtgtgtgtgacattctctcatgggacaatgttggggtttttcagactgacaggactgcaagagggagaaaggaattttgtcaatcaaaattattctgtattgcaacttttctcagagattgcaaaggattttttaggtagagattatttttccttatgaaaaatgatctgttttaaatgagataaaataggagaagttcctggcttaacctgttcttacatattaaagaaaagttacttactgtatttatgaaatactcagcttaggcatttttactttaacccctaaattgattttgtaaatgccacaaatgcatagaattgttaccaacctccaaagggctctttaaaatcatattttttattcatttgaggatgtcttataaagactgaaggcaaaggtcagattgcttacgggtgttatttttataagttgttgaattccttaatttaaaaaagctcattattttttgcacactcacaatattctctctcagaaatcaatggcatttgaaccaccaaaaagaaataaagggctgagtgcggtggctcacgcctgtaatcccagcactttggggagcccaggcgggcagattgcttgaacccaggagttcaagaccagcctgggcagcatggtgaaaccctgtatctacaaaaaatacaaaaattagccaggcatggtggtgggtgcctgtagttccagctacttgggaggctgaggtgggaaaatgacttgagcccaggaggaggaggctgcagtgagctaagattgcaccactgcactccaacctgggcgacaagagtgaaactgtgtctctcaaaaaaaaaaaaaaacaaacaaaaacaaaaacaaaacaaaacaaaacaaaacaaaacaggtaaggattcccctgttttcctctctttaattttaaagttatcagttccgtaaagtctctgtaaccaaacatactgaagacagcaacagaagtcacgttcagggactggctcacacctgtaatcccagcactttgggagatggaggtaaaaggatctcttgagcccaggagttcaagaccagcttgggcaacatagcaagactccatctcttaaaaaataaaaatagtaacattagccaggtgtagcagcacacatctgcagcagctactcaggaggctgaggtggaaagatcgcttgtgcacagaagttcgaggctgcagtgagctatatgatcatgtcactgcactccagcctgtgtgaccgagcaagaccctatctcaaaaaaattaattaattaattaattaattaatttaaaaaggaagtcatgttcatttactttccacttcagtgtgtatcgtgtagtattttggaggttggaaagtgaaacgtaggaatcctgaagattttttccacttctagtttgcagtgctcagtgcacaatatacattttgctgaatgaataaacagaaatagggaagtaaacctacaaatattttagggagaagctcacttcttccttttctcaggaaaccaagcaagcaaacatatcgttccaattttaaaacccagtgaccaaagcctttggaactatgaatttgcaactgtcataggtttatggatattgctgtggagaagctcaattttcagtgtttgaactgaaccctttcttgttagggaacgtgtgaaagaagaattgtggggaaaaaaaagcaagcataaccaaagatcatcagcagtgaagaatctaggctgtggctgagagaaccagaggcctctaaaatggacccgagtcgatcttcagaacagggatctaccatgcaggagcttcttgtgctcacacaaatctgtaaatgggaacattgtacattgtcgaatttaaatgatattaattttctcaagctatttttgttactattttcctaaaattgaatatttgcagggagcacttatactttttcctaatgtctgtataacaaatttctatgcaagtacatgaataaattatgctcacagctca

SEQ ID NO: 182922 - DNA, 4746 bp, Homo sapiens
  Payload ID: 16036
  Gene Symbol: SLC14A2
  Gene Name: solute carrier family 14 (urea transporter), member 2
  Uniprot ID: Q15849
  ENST ID: ENST00000255226
  CDS Start-End: 817-3579
ttttttttttttttttgagacacagtttgctctgtcacccaggctggagtacattggcactatcttggctcactgcaacctccacctcccaggttcaagagattcttctgtctcagcctcccagtagctaggactacaagtgtgtgccaccacaccctgctaatttttgtatttttagtagagacagggtttcaccacattggccaggctggtctcgaacttctgacgtcaagtgatccacccgactcggcctctcaaagtgctgggattacaggcgtgggccgccgcacccggccatttgcttttgattttactggctcataggtggaagggacttgccttgcctcagatgaaactttggactttgactttcaagttaatactggaataagttaagactttgggggactgttgctaaggcacaattttgttttgaaatgtataaagaacataatatctgggaggggccaggggcagaatgatatggtttggctctgtgtccacacctgaatatcatctcaaattgtaatcccagtaatccccatatgttgagggcaggacccagggcaaggtgactggatcatgggagcggtttcccccatgctgttctcgtgatagtgagtgaattctcacaagatctgatggttttataagtgtttggcaagttcctgctccacaccatctctctcttctgccgccatttgagaaggtccaagtttgcttccccttcgccttccaccatgactgtaagtttcctgaggcctccccagcaatgtggaagttccatcgatagaagagtggctgtgacccgaaggaatgtctgacccccacagcagtcctctcctgccagagccactttccagcagatacaaactctacgaggcagagtttaccagcccgagctggccctcgacatccccggatactcacccagctctgcccctcctggaaatgcctgaagaaaaggatctccggtcttccaatgaagacagtcacattgtgaagatcgaaaagctcaatgaaaggagtaaaaggaaagacgacggggtggcccatcgggactcagcaggccaaaggtgcatctgcctctccaaagcagtgggctacctcacgggcgacatgaaggagtacaggatctggctgaaagacaagcaccttgccctccagttcatagactgggtcctgagagggaccgctcaggtgatgttcatcaacaatcctctcagcggcctcatcatcttcatagggctgctgatccagaatccctggtggacaatcactgggggcctggggacagtggtctcgaccttaacagctctcgccttgggccaagacaggtctgccattgcctcaggactccatgggtacaacgggatgctggtgggactgctgatggccgtgttctcggagaagttagactactactggtggcttctgtttcctgtgaccttcacagccatgtcctgcccagttctttctagtgccttgaattccatcttcagcaagtgggacctcccggtcttcactctgcccttcaacattgcagtcaccttgtaccttgcagccacaggccactacaacctcttcttccccacaacactggtagagcctgtgtcttcagtgcccaatatcacctggacagagatggaaatgcccctgctgttacaagccatccctgttggggtcggccaggtgtatggctgtgacaatccctggacaggcggcgtgttcctggtggctctgttcatctcctcgccactcatctgcttgcatgcagccattggctcaatcgtggggctgctagcagccctgtcagtggccacacccttcgagaccatctacacaggcctctggagctacaactgcgtcctctcctgcatcgccatcggaggcatgttctatgccctcacctggcagactcacctgctggccctcatctgtgccctgttctgtgcatacatggaagcagccatctccaacatcatgtcagtggtgggcgtgccaccaggcacctgggccttctgccttgccaccatcatcttcctgctcctgacgacaaacaacccagccatcttcagactcccactcagcaaagtcacctaccccgaggccaaccgcatctactacctgacagtgaaaagcggtgaagaagagaaggcccccagcggaggcggtggggagcatccacccacagcaggcccaaaggtggaggagggctcggaggctgtgctctccaagcacaggagtgtatttcacatcgagtggtcatccattcggaggaggagcaaagtgtttggaaaaggcgaacaccaggaaagacaaaacaaagacccatttccctatcgataccggaagcccacagtcgagctgcttgatctggacaccatggaggagagctctgagataaaagtggaaacaaacatttccaagacatcctggattcggagttccatggctgccagtgggaaaagggtcagcaaagccctcagctacatcacaggagagatgaaggagtgtggagagggacttaaagacaagtccccagtgttccagttctttgactgggtcctccgaggcacatctcaagtgatgtttgtgaacaaccccctcagcggcatcctcatcatcctcggcctcttcatccagaacccctggtgggcgatctcaggctgcctgggtaccatcatgtccaccttgacagccctcatcctgagtcaggacaagtcggccatcgctgcaggatttcacggctacaatggggtgctggtggggctgctgatggccgtgttctcagacaaaggtgactactactggtggctgttgctacccgtcatcatcatgtccatgtcttgccccatcctctccagtgccctgggtaccatcttcagcaagtgggacctcccagtcttcacactgcccttcaatatcactgtgactttgtacctggcagccacgggccactacaaccttttcttccccacaacgctgctgcagcctgcatccgccatgcccaacatcacctggtcagaggtccaagtgcccttgcttttgagagccatccccgttggaattggccaagtgtacggctgtgataacccctggactggaggcatcttcctcatagctctgttcatatcctcacctctcatttgcttgcatgcagcaattggatccaccatggggatgctagcagcactcactattgcgacgccctttgactccatctacttcggcctgtgtggcttcaacagcaccctcgcatgcatagcgataggaggcatgttctacgtcatcacctggcagacgcacctcctcgccatcgcctgcgcactgtttgctgcctacctgggtgctgccctggctaacatgttatctgtgtttggattgccgccctgcacttggcccttctgtctctcagctctcaccttcctgctcctgacgaccaataaccccgccatctacaagctcccgctcagcaaagtcacctacccagaggccaaccgcatctactacctgtcccaggagagaaacagaagggcatcaatcataacaaagtatcaggcctacgatgtctcctaagtttccctgtctaaaacacatcagtgtaaattcaggcttcagcacgccgtccagatccccaggataagagaccacttagccttccctttggtctgttctgtgactctctccccaaacacaaagaagcgtgtatgtagtcaccattccagaacctctcttttctaagatgcacaacacttatcaaagatatgtttagtttagactttatacccttagctttcccataagagctccctttgtggggaacttgccctcttctgcgaaataagcctcatccttaaagagaagtcaccggccgggcacggtggctcacgcctgtaatcccagcactttgggaggccgaggcgggtggatcacgaggtcaggagatcgagaccatcctggcgaacatggtgagaccccatctctactaaaaatacaaaaaattagccaggcatggtggcgggcacctgtagtcccagctacttgggaggctgaggcaggagaatggcgtgaacccgggaggtggagcttgcagtgagccaagatcacgccactgcactccagcctgggcaacggagtgagactctgtctcaaaaaaaaaaaaaaggggaagtcaccaagaaagggatagaggtcagtgacatggtcatcacacaactcggtcatttaatatggcaaaacacaataccaagaactgtgcattagcccggaaggcaagagggttggttctgccccagctctgctgctaatgagcccctaccaggttgagcaagtctttccccactctccacctccatttcttaatcagtttcatgacagggaaggatttgaaagtcctttccacctcagaagtgttgattattctctctctcctataatctgatgaaatcagcatgacaacaagtaatttaagtaaaggacagaagggttacccaagaagaggcaggaaaatgttaacgttctataaagttttattcttgagtcataggaaaatgctctccagacgtggggttaggaacctaaattcactgaaaatgccaatgtgctttcctttacattacagaaatatttctggaagtgtcagatgaaaactgatctttatcaacactcaaatcatattataaacaaatgtgtttccctttgtaatattcataatcatactgtcattaaactgtttaagtttgc

SEQ ID NO: 182923 - DNA, 1729 bp, Homo sapiens
  Payload ID: 16036
  Gene Symbol: SLC14A2
  Gene Name: solute carrier family 14 (urea transporter), member 2
  ENST ID: ENST00000323329
  CDS Start-End: 101-808
atctctctcttctgccgccatttgagaaggtccaagtttgcttccccttcgccttccaccatgacttccatcgatagaagagtggctgtgacccgaaggaatgtctgacccccacagcagtcctctcctgccagagccactttccagcagatacaaactctacgaggcagagtttaccagcccgagctggccctcgacatccccggatactcacccagctctgcccctcctggaaatgcctgaagaaaaggatctccggtcttccaatgaagacagtcacattgtgaagatcgaaaagctcaatgaaaggagtaaaaggaaagacgacggggtggcccatcgggactcagcaggccaaaggtgcatctgcctctccaaagcagtgggctacctcacgggcgacatgaaggagtacaggatctggctgaaagacaagcaccttgccctccagttcatagactgggtcctgagagggaccgctcaggtgatgttcatcaacaatcctctcagcggcctcatcatcttcatagggctgctgatccagaatccctggtggacaatcactgggggcctggggacagtggtctcgaccttaacagctctcgccttgggccaagacaggtctgccattgcctcaggactccatgggtacaacgggatgctggtgggactgctgatggccgtgttctcggagaagttagactactactggtggcttctgtttcctgtgaccttcacagccatgtcctggatggagacggattttaactggagtaagagtggatgctggaagcatctgctacaataatccacaattgtctgctacaaaaccccacagagatgacagtgtttagattagagtgatatccatgaacatgccacaggccactacaacctcttcttccccacaacactggtagagcctgtgtcttcagtgcccaatatcacctggacagagatggaaatgcccctgctgttacaagccatccctgttggggtcggccaggtgtatggctgtgacaatccctggacaggcggcgtgttcctggtggctctgttcatctcctcgccactcatctgcttgcatgcagccattggctcaatcgtggggctgctagcagccctgtcagtggccacacccttcgagaccatctacacaggcctctggagctacaactgcgtcctctcctgcatcgccatcggaggcatgttctatgccctcacctggcagactcacctgctggccctcatctgtgccctgttctgtgcatacatggaagcagccatctccaacatcatgtcagtggtgggcgtgccaccaggcacctgggccttctgccttgccaccatcatcttcctgctcctgacgacaaacaacccagccatcttcagactcccactcagcaaagtcacctaccccgaggccaaccgcatctactacctgacagtgaaaagcggtgaagaagagaaggcccccagcggtgaatagccatgttcggggaagaaacgctctttgcctgacctgatgtcctctccctgtgttctctgctctggttcaatcagttgcagcactcaccttctttgcctctccttgcacctgtgtagaaccaagcacacctgtaactttctttccctgaagctgattttcattctctgccagaatctccataactatctattgtgcgacattaagggatgttggtattacagtaaaatttccggagttagc

SEQ ID NO: 182924 - DNA, 3461 bp, Homo sapiens
  Payload ID: 16036
  Gene Symbol: SLC14A2
  Gene Name: solute carrier family 14 (urea transporter), member 2
  Uniprot ID: Q15849
  ENST ID: ENST00000589658
  CDS Start-End: 125-2887
gattgtttcttgcttactacttgtggtcaactaagtagagattcataagacctttatagaaccactgacaacactgtgaccaaggaaacttccatcgatagaagagtggctgtgacccgaaggaatgtctgacccccacagcagtcctctcctgccagagccactttccagcagatacaaactctacgaggcagagtttaccagcccgagctggccctcgacatccccggatactcacccagctctgcccctcctggaaatgcctgaagaaaaggatctccggtcttccaatgaagacagtcacattgtgaagatcgaaaagctcaatgaaaggagtaaaaggaaagacgacggggtggcccatcgggactcagcaggccaaaggtgcatctgcctctccaaagcagtgggctacctcacgggcgacatgaaggagtacaggatctggctgaaagacaagcaccttgccctccagttcatagactgggtcctgagagggaccgctcaggtgatgttcatcaacaatcctctcagcggcctcatcatcttcatagggctgctgatccagaatccctggtggacaatcactgggggcctggggacagtggtctcgaccttaacagctctcgccttgggccaagacaggtctgccattgcctcaggactccatgggtacaacgggatgctggtgggactgctgatggccgtgttctcggagaagttagactactactggtggcttctgtttcctgtgaccttcacagccatgtcctgcccagttctttctagtgccttgaattccatcttcagcaagtgggacctcccggtcttcactctgcccttcaacattgcagtcaccttgtaccttgcagccacaggccactacaacctcttcttccccacaacactggtagagcctgtgtcttcagtgcccaatatcacctggacagagatggaaatgcccctgctgttacaagccatccctgttggggtcggccaggtgtatggctgtgacaatccctggacaggcggcgtgttcctggtggctctgttcatctcctcgccactcatctgcttgcatgcagccattggctcaatcgtggggctgctagcagccctgtcagtggccacacccttcgagaccatctacacaggcctctggagctacaactgcgtcctctcctgcatcgccatcggaggcatgttctatgccctcacctggcagactcacctgctggccctcatctgtgccctgttctgtgcatacatggaagcagccatctccaacatcatgtcagtggtgggcgtgccaccaggcacctgggccttctgccttgccaccatcatcttcctgctcctgacgacaaacaacccagccatcttcagactcccactcagcaaagtcacctaccccgaggccaaccgcatctactacctgacagtgaaaagcggtgaagaagagaaggcccccagcggaggcggtggggagcatccacccacagcaggcccaaaggtggaggagggctcggaggctgtgctctccaagcacaggagtgtatttcacatcgagtggtcatccattcggaggaggagcaaagtgtttggaaaaggcgaacaccaggaaagacaaaacaaagacccatttccctatcgataccggaagcccacagtcgagctgcttgatctggacaccatggaggagagctctgagataaaagtggaaacaaacatttccaagacatcctggattcggagttccatggctgccagtgggaaaagggtcagcaaagccctcagctacatcacaggagagatgaaggagtgtggagagggacttaaagacaagtccccagtgttccagttctttgactgggtcctccgaggcacatctcaagtgatgtttgtgaacaaccccctcagcggcatcctcatcatcctcggcctcttcatccagaacccctggtgggcgatctcaggctgcctgggtaccatcatgtccaccttgacagccctcatcctgagtcaggacaagtcggccatcgctgcaggatttcacggctacaatggggtgctggtggggctgctgatggccgtgttctcagacaaaggtgactactactggtggctgttgctacccgtcatcatcatgtccatgtcttgccccatcctctccagtgccctgggtaccatcttcagcaagtgggacctcccagtcttcacactgcccttcaatatcactgtgactttgtacctggcagccacgggccactacaaccttttcttccccacaacgctgctgcagcctgcatccgccatgcccaacatcacctggtcagaggtccaagtgcccttgcttttgagagccatccccgttggaattggccaagtgtacggctgtgataacccctggactggaggcatcttcctcatagctctgttcatatcctcacctctcatttgcttgcatgcagcaattggatccaccatggggatgctagcagcactcactattgcgacgccctttgactccatctacttcggcctgtgtggcttcaacagcaccctcgcatgcatagcgataggaggcatgttctacgtcatcacctggcagacgcacctcctcgccatcgcctgcgcactgtttgctgcctacctgggtgctgccctggctaacatgttatctgtgtttggattgccgccctgcacttggcccttctgtctctcagctctcaccttcctgctcctgacgaccaataaccccgccatctacaagctcccgctcagcaaagtcacctacccagaggccaaccgcatctactacctgtcccaggagagaaacagaagggcatcaatcataacaaagtatcaggcctacgatgtctcctaagtttccctgtctaaaacacatcagtgtaaattcaggcttcagcacgccgtccagatccccaggataagagaccacttagccttccctttggtctgttctgtgactctctccccaaacacaaagaagcgtgtatgtagtcaccattccagaacctctcttttctaagatgcacaacacttatcaaagatatgtttagtttagactttatacccttagctttcccataagagctccctttgtggggaacttgccctcttctgcgaaataagcctcatccttaaagagaagtcaccggccgggcacggtggctcacgcctgtaatcccagcactttgggaggccgaggcgggtggatcacgaggtcaggagatcgagaccatcctggcgaacatggtgagaccccatctctactaaaaatacaaaaaattagccaggcatggtggcgggcacctgtagtcccagctacttgggaggctgaggcaggagaatggcgtgaacccgggaggtggagcttgcagtgagccaagatcacgccactgcactccagcctgggcaacggagtgagactctgtctc

SEQ ID NO: 182925 - DNA, 3540 bp, Homo sapiens
  Payload ID: 16036
  Gene Symbol: SLC14A2
  Gene Name: solute carrier family 14 (urea transporter), member 2
  Uniprot ID: Q15849
  ENST ID: ENST00000586448
  CDS Start-End: 322-3084
gtaagctgcctccatcatcctaaaaaacgaccatgctgaaagagctcctctgtatttcttggcagaccctttccagttttcatcctgggtgtttctgaacaggaacatatctcattgaagtatttgcacctctacctacagacaaggaaaaggcttggagcacctccattcattgtgccaacaggacctgaatgaccgattgtttcttgcttactacttgtggtcaactaagtagagattcataagacctttatagaaccactgacaacactgtgaccaaggaaacttccatcgatagaagagtggctgtgacccgaaggaatgtctgacccccacagcagtcctctcctgccagagccactttccagcagatacaaactctacgaggcagagtttaccagcccgagctggccctcgacatccccggatactcacccagctctgcccctcctggaaatgcctgaagaaaaggatctccggtcttccaatgaagacagtcacattgtgaagatcgaaaagctcaatgaaaggagtaaaaggaaagacgacggggtggcccatcgggactcagcaggccaaaggtgcatctgcctctccaaagcagtgggctacctcacgggcgacatgaaggagtacaggatctggctgaaagacaagcaccttgccctccagttcatagactgggtcctgagagggaccgctcaggtgatgttcatcaacaatcctctcagcggcctcatcatcttcatagggctgctgatccagaatccctggtggacaatcactgggggcctggggacagtggtctcgaccttaacagctctcgccttgggccaagacaggtctgccattgcctcaggactccatgggtacaacgggatgctggtgggactgctgatggccgtgttctcggagaagttagactactactggtggcttctgtttcctgtgaccttcacagccatgtcctgcccagttctttctagtgccttgaattccatcttcagcaagtgggacctcccggtcttcactctgcccttcaacattgcagtcaccttgtaccttgcagccacaggccactacaacctcttcttccccacaacactggtagagcctgtgtcttcagtgcccaatatcacctggacagagatggaaatgcccctgctgttacaagccatccctgttggggtcggccaggtgtatggctgtgacaatccctggacaggcggcgtgttcctggtggctctgttcatctcctcgccactcatctgcttgcatgcagccattggctcaatcgtggggctgctagcagccctgtcagtggccacacccttcgagaccatctacacaggcctctggagctacaactgcgtcctctcctgcatcgccatcggaggcatgttctatgccctcacctggcagactcacctgctggccctcatctgtgccctgttctgtgcatacatggaagcagccatctccaacatcatgtcagtggtgggcgtgccaccaggcacctgggccttctgccttgccaccatcatcttcctgctcctgacgacaaacaacccagccatcttcagactcccactcagcaaagtcacctaccccgaggccaaccgcatctactacctgacagtgaaaagcggtgaagaagagaaggcccccagcggaggcggtggggagcatccacccacagcaggcccaaaggtggaggagggctcggaggctgtgctctccaagcacaggagtgtatttcacatcgagtggtcatccattcggaggaggagcaaagtgtttggaaaaggcgaacaccaggaaagacaaaacaaagacccatttccctatcgataccggaagcccacagtcgagctgcttgatctggacaccatggaggagagctctgagataaaagtggaaacaaacatttccaagacatcctggattcggagttccatggctgccagtgggaaaagggtcagcaaagccctcagctacatcacaggagagatgaaggagtgtggagagggacttaaagacaagtccccagtgttccagttctttgactgggtcctccgaggcacatctcaagtgatgtttgtgaacaaccccctcagcggcatcctcatcatcctcggcctcttcatccagaacccctggtgggcgatctcaggctgcctgggtaccatcatgtccaccttgacagccctcatcctgagtcaggacaagtcggccatcgctgcaggatttcacggctacaatggggtgctggtggggctgctgatggccgtgttctcagacaaaggtgactactactggtggctgttgctacccgtcatcatcatgtccatgtcttgccccatcctctccagtgccctgggtaccatcttcagcaagtgggacctcccagtcttcacactgcccttcaatatcactgtgactttgtacctggcagccacgggccactacaaccttttcttccccacaacgctgctgcagcctgcatccgccatgcccaacatcacctggtcagaggtccaagtgcccttgcttttgagagccatccccgttggaattggccaagtgtacggctgtgataacccctggactggaggcatcttcctcatagctctgttcatatcctcacctctcatttgcttgcatgcagcaattggatccaccatggggatgctagcagcactcactattgcgacgccctttgactccatctacttcggcctgtgtggcttcaacagcaccctcgcatgcatagcgataggaggcatgttctacgtcatcacctggcagacgcacctcctcgccatcgcctgcgcactgtttgctgcctacctgggtgctgccctggctaacatgttatctgtgtttggattgccgccctgcacttggcccttctgtctctcagctctcaccttcctgctcctgacgaccaataaccccgccatctacaagctcccgctcagcaaagtcacctacccagaggccaaccgcatctactacctgtcccaggagagaaacagaagggcatcaatcataacaaagtatcaggcctacgatgtctcctaagtttccctgtctaaaacacatcagtgtaaattcaggcttcagcacgccgtccagatccccaggataagagaccacttagccttccctttggtctgttctgtgactctctccccaaacacaaagaagcgtgtatgtagtcaccattccagaacctctcttttctaagatgcacaacacttatcaaagatatgtttagtttagactttatacccttagctttcccataagagctccctttgtggggaacttgccctcttctgcgaaataagcctcatccttaaagagaagtcaccggccgggcacggtggctcacgcctgtaatcccagcactttgggaggccgaggcgggtggatcacgaggtcaggagatcgagaccatcctggcgaacatggtgagaccccatctctactaaaaatacaaaaaattagccaggcatggtggcgggcacctgtagt

SEQ ID NO: 182926 - DNA, 3106 bp, Homo sapiens
  Payload ID: 16037
  Gene Symbol: SLC15A1
  Gene Name: solute carrier family 15 (oligopeptide transporter), member 1
  Uniprot ID: P46059
  ENST ID: ENST00000376503
  CDS Start-End: 57-2183
cacctgccaggagcacgtcccgccggcaggtcgcaggagccctgggagccgccgccatgggaatgtccaaatcacacagtttctttggttatcccctgagcatcttcttcatcgtggtcaatgagttttgcgaaagattttcctactatggaatgcgagcaatcctgattctgtacttcacaaatttcatcagctgggatgataacctgtccaccgccatctaccatacgtttgtggctctgtgctacctgacgccaattctcggagctcttatcgccgactcgtggctgggaaagttcaagaccattgtgtcgctctccattgtctacacaattggacaagcagtcacctcagtaagctccattaatgacctcacagaccacaaccatgatggcacccccgacagccttcctgtgcacgtggtgctgtccttgatcggcctggccctgatagctctcgggactggaggaatcaaaccctgtgtgtctgcgtttggtggagatcagtttgaagagggccaggagaaacaaagaaacagatttttttccatcttttacttggctattaatgctggaagtttgctttccacaatcatcacacccatgctcagagttcaacaatgtggaattcacagtaaacaagcttgttacccactggcctttggggttcctgctgctctcatggctgtagccctgattgtgtttgtccttggcagtgggatgtacaagaagttcaagccacagggcaacatcatgggtaaagtggccaagtgcatcggttttgccatcaaaaatagatttaggcatcggagtaaggcatttcccaagagggagcactggctggactgggctaaagagaaatacgatgagcggctcatctcccaaattaagatggttacgagggtgatgttcctgtatattccactcccaatgttctgggccttgtttgaccagcagggctccaggtggacactgcaggcaacaactatgtccgggaaaatcggagctcttgaaattcagcccgatcagatgcagaccgtgaacgccatcctgatcgtgatcatggtcccgatcttcgatgctgtgctgtaccctctcattgcaaaatgtggcttcaatttcacctccttgaagaagatggcagttggcatggtcctggcctccatggcctttgtggtggctgccatcgtgcaggtggaaatcgataaaactcttccagtcttccccaaaggaaacgaagtccaaattaaagttttgaatataggaaacaataccatgaatatatctcttcctggagagatggtgacacttggcccaatgtctcaaacaaatgcatttatgacttttgatgtaaacaaactgacaaggataaacatttcttctcctggatcaccagtcactgctgtaactgacgacttcaagcagggccaacgccacacgcttctagtgtgggcccccaatcactaccaggtggtaaaggatggtcttaaccagaagccagaaaaaggggaaaatggaatcagatttgtaaatacttttaacgagctcatcaccatcacaatgagtgggaaagtttatgcaaacatcagcagctacaatgccagcacataccagttttttccttctggcataaaaggcttcacaataagctcaacagagattccgccacaatgtcaacctaatttcaatactttctaccttgaatttggtagtgcttatacctatatagtccaaaggaagaatgacagctgccctgaagtgaaggtgtttgaagatatttcagccaacacagttaacatggctctgcaaatcccgcagtattttcttctcacctgtggcgaagtggtcttctctgtcacgggattggaattctcatattctcaggctccttccaacatgaagtcggtgcttcaggcaggatggctgctgaccgtggctgttggcaacatcattgtgctcatcgtggcaggggcaggccagttcagcaaacagtgggccgagtacattctatttgccgcgttgcttctggtcgtctgtgtaatttttgccatcatggctcggttctatacttacatcaacccagcggagatcgaagctcaatttgatgaggatgaaaagaaaaacagactggaaaagagtaacccatatttcatgtcaggggccaattcacagaaacagatgtgaaggtcaggaggcaagtggaggatggactgggcccgcagatgccctgacctctgcccccaggtagcaggacactccattggatggcccctgatgaggaagacttcagaattgggaactaaaccatgaatgctattttcttttttctttttcttttctttttttttttttttttttttttgagacagagttttgctcttgttgtccaggctggagtgcaatggcacgatctcagctcactgcaacctccgcctcccaggttcaagtaattctcctgcctcagcctcccgagtggctgggattagcggcatgcaccaccacgcccagctatttttgtatttttagtagagatggggtttcaccatgttggccaggatggtctcgatctcttgacctggtgatctgcccacctcggcctgccaaagtgctgggattacaggcttgagctaccgcgcccggccgtgaacgctattttctaagcagccagcagtgaatctaaaactctggaagaagtcttctgtttgaaaggcttatttaagccacacgtacacacactgtcttagagtactgtgagcccaccccacattggtcatcttccctatcacacaaatgatgttattttggactagcttaattttgaaatggtaacaaagtttcctattccatactgttcatttctaatactcttacgaaaactattctaaaggaggcaggagccaaggccaaaagtgaacgtacaggtttgaaatggctgtgataaggaccagctggtattaactgataactttacctttgggtttttgttattttgtttttctagtccctacctgtgtttaaattatggataactcgaaagacagctcaggtgaaggccagtaatgatttttttgaagtttcaatggtgtgaaataaatttctgttcttaa

SEQ ID NO: 182927 - DNA, 2270 bp, Homo sapiens
  Payload ID: 16037
  Gene Symbol: SLC15A1
  Gene Name: solute carrier family 15 (oligopeptide transporter), member 1
  ENST ID: ENST00000618992
  CDS Start-End: 57-2177
cacctgccaggagcacgtcccgccggcaggtcgcaggagccctgggagccgccgccatgggaatgtccaaatcacacagtttctttggttatcccctgagcatcttcttcatcgtggtcaatgagttttgcgaaagattttcctactatggaatgcgagcaatcctgattctgtacttcacaaatttcatcagctgggatgataacctgtccaccgccatctaccatacgtttgtggctctgtgctacctgacgccaattctcggagctcttatcgccgactcgtggctgggaaagttcaagaccattgtgtcgctctccattgtctacacaattggacaagcagtcacctcagtaagctccattaatgacctcacagaccacaaccatgatggcacccccgacagccttcctgtgcacgtggtgctgtccttgatcggcctggccctgatagctctcgggactggaggaatcaaaccctgtgtgtctgcgtttggtggagatcagtttgaagagggccaggagaaacaaagaaacagatttttttccatcttttacttggctattaatgctggaagtttgctttccacaatcatcacacccatgctcagagttcaacaatgtggaattcacagtaaacaagcttgttacccactggcctttggggttcctgctgctctcatggctgtagccctgattgtgtttgtccttggcagtgggatgtacaagaagttcaagccacagggcaacatcatgggtaaagtggccaagtgcatcggttttgccatcaaaaatagatttaggcatcggagtaaggcatttcccaagagggagcactggctggactgggctaaagagaaatacgatgagcggctcatctcccaaattaagatggttacgagggtgatgttcctgtatattccactcccaatgttctgggccttgtttgaccagcagggctccaggtggacactgcaggcaacaactatgtccgggaaaatcggagctcttgaaattcagcccgatcagatgcagaccgtgaacgccatcctgatcgtgatcatggtcccgatcttcgatgctgtgctgtaccctctcattgcaaaatgtggcttcaatttcacctccttgaagaagatggcagttggcatggtcctggcctccatggcctttgtggtggctgccatcgtgcaggtggaaatcgataaaactcttccagtcttccccaaaggaaacgaagtccaaattaaagttttgaatataggaaacaataccatgaatatatctcttcctggagagatggtgacacttggcccaatgtctcaaacaaatgcatttatgacttttgatgtaaacaaactgacaaggataaacatttcttctcctggatcaccagtcactgctgtaactgacgacttcaagcagggccaacgccacacgcttctagtgtgggcccccaatcactaccaggtggtaaaggatggtcttaaccagaagccagaaaaaggggaaaatggaatcagatttgtaaatacttttaacgagctcatcaccatcacaatgagtgggaaagtttatgcaaacatcagcagctaccagcacataccagtttttccttctggcataaaaggcttcacaataagctcaacagagattccgccacaatgtcaacctaatttcaatactttctaccttgaatttggtagtgcttatacctatatagtccaaaggaagaatgacagctgccctgaagtgaaggtgtttgaagatatttcagccaacacagttaacatggctctgcaaatcccgcagtattttcttctcacctgtggcgaagtggtcttctctgtcacgggattggaattctcatattctcaggctccttccaacatgaagtcggtgcttcaggcaggatggctgctgaccgtggctgttggcaacatcattgtgctcatcgtggcaggggcaggccagttcagcaaacagtgggccgagtacattctatttgccgcgttgcttctggtcgtctgtgtaatttttgccatcatggctcggttctatacttacatcaacccagcggagatcgaagctcaatttgatgaggatgaaaagaaaaacagactggaaaagagtaacccatatttcatgtcaggggccaattcacagaaacagatgtgaaggtcaggaggcaagtggaggatggactgggcccgcagatgccctgacctctgcccccaggtagcaggacactccattggatggcccctgatg

SEQ ID NO: 182928 - DNA, 1619 bp, Homo sapiens
  Payload ID: 16037
  Gene Symbol: SLC15A1
  Gene Name: solute carrier family 15 (oligopeptide transporter), member 1
  ENST ID: ENST00000613008
  CDS Start-End: 67-693
cagtcaccggtaagttactgaatctgcgttggctgcctttcatgccactggtgctcctttgtggctatggaccagtggggggtgtatttcaatcctgtgcttgtttctttttgtcagagtttctttggttatcccctgagcatcttcttcatcgtggtcaatgagttttgcgaaagattttcctactatggaatgcgagcaatcctgattctgtacttcacaaatttcatcagctgggatgataacctgtccaccgccatctaccatacgtttgtggctctgtgctacctgacgccaattctcggagctcttatcgccgactcgtggctgggaaagttcaagaccattgtgtcgctctccattgtctacacaattggacaagcagtcacctcagtaagctccattaatgacctcacagaccacaaccatgatggcacccccgacagccttcctgtgcacgtggtgctgtccttgatcggcctggccctgatagctctcgggactggaggaatcaaaccctgtgtgtctgcgtttggtggagatcagtttgaagagggccaggagaaacaaagaaacagatttttttccatcttttacttggctattaatgctggaagtttgctttccacaatcatcacacccatgctcagaggtaagagatacctgaaaggaacttctgttggtcttttttagtaaggccaagtccgtgtcttcttcgttttgttctgttcttcccttctgccctgttttctagctgtcagctacatgctgggatgcacgttggaatctggagtaagtgcttccttccctgtgagtttcacctcctttttgtcttatttaaatcccttatcccagtgaccactggagagtctaagccatccttagcatgggcatccatcttcctaaactgttattcatgcaaagtcatgctcgtggtaagaggtaagaggcaagagaggtgccttggaagccaagctggtggccgtagctgccattttagccttcaagctttgctccccagtgatatttctgtgacttaggaagagtttactgggcaaaattgtattgattttttgtttgttttgttttgtttttagaaggagtcttgctctgtcacccacgctggagcgcagtggcgtgatcttggctcactgcaacctccacctcctgggttcaagcaattctcctgcctcagcctcctgagtagctgggacaacaggcgcctgccaccatgcccggataatattttttgtatttttagtagagatgggatttcaccatgttagccaggatggtctcgatctcctgccctcgtgatctgcctgccttggcctcccaaagtgctgggattacaggtgtgagccaccacgcctggctaaggcaaagtttttttctttgctttcccatcatctcaagtatttccaaaagaactgctcagataaagagaatgggacagtgtcagtaactatcagaggtttgtgcttgctaatgctccatagagagtttgtgaatttcccatgtggaagggaatatgtggtgttactggtgacaaactaacaagaccatcctgtccacatttgaatcagattagattatgaaataaagatttcagggggatt

SEQ ID NO: 182929 - DNA, 2379 bp, Homo sapiens
  Payload ID: 16038
  Gene Symbol: SLC15A2
  Gene Name: solute carrier family 15 (oligopeptide transporter), member 2
  Uniprot ID: Q16348
  ENST ID: ENST00000295605
  CDS Start-End: 38-2134
aaatgcttgaggagagagagagagtaaggagccagccatgaatcctttccagaaaaatgagtccaaggaaactcttttttcacctgtctccattgaagaggtaccacctcgaccacctagccctccaaagaagccatctccgacaatctgtggctccaactatccactgagcattgccttcattgtggtgaatgaattctgcgagcgcttttcctattatggaatgaaagctgtgctgatcctgtatttcctgtatttcctgcactggaatgaagatacctccacatctatataccatgccttcagcagcctctgttattttactcccatcctgggagcagccattgctgactcgtggttgggaaaattcaaagtcctatcattgatcggcctgagtctaatagctttggggacaggaggcatcaaaccctgtgtggcagcttttggtggagaccagtttgaagaaaaacatgcagaggaacggactagatacttctcagtcttctacctgtccatcaatgcagggagcttgatttctacatttatcacacccatgctgagaggagatgtgcaatgttttggagaagactgctatgcattggcttttggagttccaggactgctcatggtaattgcacttgttgtgtttgcaatgggaagcaaaatatacaataaaccaccccctgaaggaaacatagtggctcaagttttcaaatgtatctggtttgctatttccaatcgtttcaagaaccgttctggagacattccaaagcgacagcactggctagactgggcggctgagaaatatccaaagcagctcattatggatgtaaaggcactgaccagggtactattcctttatatcccattgcccatgttctgggctcttttggatcagcagggttcacgatggactttgcaagccatcaggatgaataggaatttggggttttttgtgcttcagccggaccagatgcaggttctaaatccccttctggttcttatcttcatcccgttgtttgactttgtcatttatcgtctggtctccaagtgtggaattaacttctcatcacttaggaaaatggctgttggtatgatcctagcatgcctggcatttgcagttgcggcagctgtagagataaaaataaatgaaatggccccagcccagccaggtccccaggaggttttcctacaagtcttgaatctggcagatgatgaggtgaaggtgacagtggtgggaaatgaaaacaattctctgttgatagagtccatcaaatcctttcagaaaacaccacactattccaaactgcacctgaaaacaaaaagccaggattttcacttccacctgaaatatcacaatttgtctctctacactgagcattctgtgcaggagaagaactggtacagtcttgtcattcgtgaagatgggaacagtatctccagcatgatggtaaaggatacagaaagcagaacaaccaatgggatgacaaccgtgaggtttgttaacactttgcataaagatgtcaacatctccctgagtacagatacctctctcaatgttggtgaagactatggtgtgtctgcttatagaactgtgcaaagaggagaataccctgcagtgcactgtagaacagaagataagaacttttctctgaatttgggtcttctagactttggtgcagcatatctgtttgttattactaataacaccaatcagggtcttcaggcctggaagattgaagacattccagccaacaaaatgtccattgcgtggcagctaccacaatatgccctggttacagctggggaggtcatgttctctgtcacaggtcttgagttttcttattctcaggctccctctagcatgaaatctgtgctccaggcagcttggctattgacaattgcagttgggaatatcatcgtgcttgttgtggcacagttcagtggcctggtacagtgggccgaattcattttgttttcctgcctcctgctggtgatctgcctgatcttctccatcatgggctactactatgttcctgtaaagacagaggatatgcggggtccagcagataagcacattcctcacatccaggggaacatgatcaaactagagaccaagaagacaaaactctgatgactccctagattctgtcctgaccccaattcctggccctgtcttgaagcattttttttcttctactggattagacaagagagatagcagcatatcagagctgatctcctccacctttctccaatgacagaagttccaggactggttttccagtacatctttaaacaaggccccagagactctatgtctgcccgtccatcagtgaactcattaaaacttgtgcagtgttgctggagctggcctgg

SEQ ID NO: 182930 - DNA, 5673 bp, Homo sapiens
  Payload ID: 16038
  Gene Symbol: SLC15A2
  Gene Name: solute carrier family 15 (oligopeptide transporter), member 2
  Uniprot ID: Q16348
  ENST ID: ENST00000489711
  CDS Start-End: 389-2578
attatatgcgtgaaccaccgcgcctgaccatggaatcagtttttcaatctgtgctcgaggtgttgtgttcttaactatcttctactcctttgcaaagataatctttcttaaacatagactttctaatcagttctctagcattgtttcattctgtctttggcatgttttcactttgctgtgctgtacttttacacattctttttaactatagcttcctgctttgctctggatcaggaagctattgaagctgacacccacagagttaaactgagttgctgaagccaccagctccccctcccagtccttcttttcagagtaggctggcagctgtcctaactgcctactaaagccaaatgcttgaggagagagagagagtaaggagccagccatgaatcctttccagaaaaatgagtccaaggaaactcttttttcacctgtctccattgaagaggtaccacctcgaccacctagccctccaaagaagccatctccgacaatctgtggctccaactatccactgagcattgccttcattgtggtgaatgaattctgcgagcgcttttcctattatggaatgaaagctgtgctgatcctgtatttcctgtatttcctgcactggaatgaagatacctccacatctatataccatgccttcagcagcctctgttattttactcccatcctgggagcagccattgctgactcgtggttgggaaaattcaagacaatcatctatctctccttggtgtatgtgcttggccatgtgatcaagtccttgggtgccttaccaatactgggaggacaagtggtacacacagtcctatcattgatcggcctgagtctaatagctttggggacaggaggcatcaaaccctgtgtggcagcttttggtggagaccagtttgaagaaaaacatgcagaggaacggactagatacttctcagtcttctacctgtccatcaatgcagggagcttgatttctacatttatcacacccatgctgagaggagatgtgcaatgttttggagaagactgctatgcattggcttttggagttccaggactgctcatggtaattgcacttgttgtgtttgcaatgggaagcaaaatatacaataaaccaccccctgaaggaaacatagtggctcaagttttcaaatgtatctggtttgctatttccaatcgtttcaagaaccgttctggagacattccaaagcgacagcactggctagactgggcggctgagaaatatccaaagcagctcattatggatgtaaaggcactgaccagggtactattcctttatatcccattgcccatgttctgggctcttttggatcagcagggttcacgatggactttgcaagccatcaggatgaataggaatttggggttttttgtgcttcagccggaccagatgcaggttctaaatccccttctggttcttatcttcatcccgttgtttgactttgtcatttatcgtctggtctccaagtgtggaattaacttctcatcacttaggaaaatggctgttggtatgatcctagcatgcctggcatttgcagttgcggcagctgtagagataaaaataaatgaaatggccccagcccagccaggtccccaggaggttttcctacaagtcttgaatctggcagatgatgaggtgaaggtgacagtggtgggaaatgaaaacaattctctgttgatagagtccatcaaatcctttcagaaaacaccacactattccaaactgcacctgaaaacaaaaagccaggattttcacttccacctgaaatatcacaatttgtctctctacactgagcattctgtgcaggagaagaactggtacagtcttgtcattcgtgaagatgggaacagtatctccagcatgatggtaaaggatacagaaagcagaacaaccaatgggatgacaaccgtgaggtttgttaacactttgcataaagatgtcaacatctccctgagtacagatacctctctcaatgttggtgaagactatggtgtgtctgcttatagaactgtgcaaagaggagaataccctgcagtgcactgtagaacagaagataagaacttttctctgaatttgggtcttctagactttggtgcagcatatctgtttgttattactaataacaccaatcagggtcttcaggcctggaagattgaagacattccagccaacaaaatgtccattgcgtggcagctaccacaatatgccctggttacagctggggaggtcatgttctctgtcacaggtcttgagttttcttattctcaggctccctctagcatgaaatctgtgctccaggcagcttggctattgacaattgcagttgggaatatcatcgtgcttgttgtggcacagttcagtggcctggtacagtgggccgaattcattttgttttcctgcctcctgctggtgatctgcctgatcttctccatcatgggctactactatgttcctgtaaagacagaggatatgcggggtccagcagataagcacattcctcacatccaggggaacatgatcaaactagagaccaagaagacaaaactctgatgactccctagattctgtcctgaccccaattcctggccctgtcttgaagcattttttttcttctactggattagacaagagagatagcagcatatcagagctgatctcctccacctttctccaatgacagaagttccaggactggttttccagtacatctttaaacaaggccccagagactctatgtctgcccgtccatcagtgaactcattaaaacttgtgcagtgttgctggagctggcctggtgtctccaaatgaccatgaaaatacacacgtataatggagatcattctctgtgggtatgcaaagttatgggaattcctttataggtaactgccatttaggactgatggccctaatttttgaggtgctgatttagaggcaaaattgcagaataacaaagaaatggtatttcaagtttttttttttataagcaatgtaattatgctattcacaggggcctcaagaattggtatgtatgatgtgatctggtccagccagggcctggcttgtcagctctctaggtttgatatgactttagtaaatttgtcaatatagatggtaggaagcagaatgccattttattaaaacacaggagaagttatatctctctgattatgatagtattttatttacttatccaaaccctcctttctcagtatggatagatcatggaaaccagattagagatagtaagcattagtaaacattgttctggagaacaggaacaggtgtaagttgtagaaatcctgaagagccagtcattcttttacagagtacattcttcttagcctctatggcgctggtctatgcccttcagtgaacagttgtataaacaataattataatttgcaaccttgtcttgtcaaccttgctgatccagctttttcttattattacaccttgtcttgcttattgcagcaaatattcaataacaacaatgtttctataagtccaacttcctttattaatgtttccatttagcctcaaaaatatcaaagtagttcctttttgatgttgttttcctgatttacttttcccataagttttaaataccatttctgccttgaagcctagaaattttctttttattcaaaaaaagttacattaatgctctaggtttgaggttctaaaatggaaatgtcaatagaggagcatggtcctatgtgaggttcctatcaaaatttgtgggagtagggatggtagagcatgagggttttgtttgtgtatgtgtatggtcatgaaaaaaaattgagaaacattacctcatacacaatgaatgaatcagaggacagacacgggaatggcacgactgtgcagtgtgttactaggaaaaaagttcagaatcactgttctagagagcttcatttccattggttttaaaacattattctcatgtagaacagtgttgggtctcatactgttaatgttaatacgtaacaatgttcatgttaacaggcacctgttaatattaacagataatgttactgttaacaggtaagagaaattgctctaagtgcccaaactttatatacttcagttttaatgacaagcatttcagaaatataagagcggcagccagaccaaccagtttttccagatatcttgatgtgaacctgaccctactcctttagaagacagcctgttcatttttaaatagctttaacccaaactgttctatgaccattgtttcaagagacattaacacagttctgtaaatagaagtgtctatggacaaataagtttgggaaatgtggcatactgtatccttttcttaacatttgcatattaaagactctgagatatcctgcagtaaagacacaagataccttgtttaaattaacatgtacgctgcagaacattggtttggaaaaaactgttgagcagttcttccttgtaagtgctgagcttcctctctgaaacctcctaccattgttttttttcccctgtagctaacaagaataagtataacagccggccaggcacagtggctcatgcctgtaatcccagcactttgggaggctgagacaggtggatcacctgaggtcaggagttcgagaccagcctggccaacatggtgaaaccgtgtctctactaaaagtacaaaaattagccaggtgtgatggcaggtgcctgtaatcccagctactcgggaggctgaagcagaagaattgcttgaacccgggaggcagaggttgcaatgagccgagatcacgccatcacactctagcctgggggacaagagtgagacttcatctaaaaaaaaaaagaaaagaatatgtataccccctttttcatgtggcagatgtttagctatttggggagaactttcatggctcttccctaatcatcaagtattcaaggtaaagattctcggttcctgtaatggttcctcaccaggcataatttgtccttttaccatcctactttctgtcttctgaaaaacattctttatctgaaatacagcaattaatattaagatatcttaatatgaagtgcctggagtcaaatataacattccaaagtagtctgactggaagaactagcacctgcctttcttcaaacaatgcacttctgttaatgcagtgtaaggtaacatgagttgtttttggaaactacatcataatgtgggcttacattctagcacttatcacttaatgacagggatacatttgaggaatgcattgttaggcaattttgtcattatgcaaacatcatagagtgtacttacacaaacctatggtatagcctactacacatctaagttatatggtatagactgtttctccagctatatggtgtagactgtttctcctaggctacaaacctgcacagcatgttactgtattaaatgctgtaggcaattgtaacacaatggtatttttatacttaaacatatctaaacatagaaacggtacaaaaaactttacacattatatagatgtatcaaattattcatatgtgctctgaaaatgtctatatctgttatgtatcaattttttaaaaagtgaatgacataattcatttgaaaaaatgtggacacacaaattggaaaagaggtataaatgcagtattataatctaatgggaccacca

SEQ ID NO: 182931 - DNA, 572 bp, Homo sapiens
  Payload ID: 16038
  Gene Symbol: SLC15A2
  Gene Name: solute carrier family 15 (oligopeptide transporter), member 2
  ENST ID: ENST00000469013
  CDS Start-End: 116-572
agattgcataattctcaagctgtgagctgcaaagacaatctgtggctccaactatccactgagcattgccttcattgtggtgaatgaattctgcgagcgcttttcctattatggaatgaaagctgtgctgatcctgtatttcctgtatttcctgcactggaatgaagatacctccacatctatataccatgccttcagcagcctctgttattttactcccatcctgggagcagccattgctgactcgtggttgggaaaattcaagacaatcatctatctctccttggtgtatgtgcttggccatgtgatcaagtccttgggtgccttaccaatactgggaggacaagtggtacacacagtcctatcattgatcggcctgagtctaatagctttggggacaggaggcatcaaaccctgtgtggcagcttttggtggagaccagtttgaagaaaaacatgcagaggaacggactagatacttctcagtcttctacctgtccatcaatgcagggagcttgatttctacatttatcacacccatgctgagaggagatgtgcaatgttttggagaag

SEQ ID NO: 182932 - DNA, 2115 bp, Homo sapiens
  Payload ID: 16039
  Gene Symbol: SLC15A3
  Gene Name: solute carrier family 15 (oligopeptide transporter), member 3
  Uniprot ID: Q8IY34
  ENST ID: ENST00000227880
  CDS Start-End: 235-1980
ggagttgagaattagggaggaggtggtagagtccgggtagtgagcggagggacaggaagggtagggcaagaaagggagaggggacaggagggaagggtgggccaaagcggtgagaaaggagggccagccagttgggtgggggagagggccgaggcccgggggcaggagtgcagggctctgaggcggggagaggagaggagagaagagccgcggggggcccagcccggagccaggatgcccgcgccgcgcgcccgggagcagccccgcgtgcccggggagcgccagccgctgctgcctcgcggtgcgcggggccctcgacggtggcggcgggcggcgggcgcggccgtgctgctggtggagatgctggagcgcgccgccttcttcggcgtcaccgccaacctcgtgctgtacctcaacagcaccaacttcaactggaccggcgagcaggcgacgcgcgccgcgctggtattcctgggcgcctcctacctgctggcgcccgtgggcggctggctggccgacgtgtacctgggccgctaccgcgcggtcgcgctcagcctgctgctctacctggccgcctcgggcctgctgcccgccaccgccttccccgacggccgcagctccttctgcggagagatgcccgcgtcgccgctgggacctgcctgcccctcggccggctgcccgcgctcctcgcccagcccctactgcgcgcccgtcctctacgcgggcctgctgctactcggcctggccgccagctccgtccggagcaacctcacctccttcggtgccgaccaggtgatggatctcggccgcgacgccacccgccgcttcttcaactggttttactggagcatcaacctgggtgctgtgctgtcgctgctggtggtggcgtttattcagcagaacatcagcttcctgctgggctacagcatccctgtgggctgtgtgggcctggcatttttcatcttcctctttgccacccccgtcttcatcaccaagcccccgatgggcagccaagtgtcctctatgcttaagctcgctctccaaaactgctgcccccagctgtggcaacgacactcggccagagaccgtcaatgtgcccgcgtgctggccgacgagaggtctccccagccaggggcttccccgcaagaggacatcgccaacttccaggtgctggtgaagatcttgcccgtcatggtgaccctggtgccctactggatggtctacttccagatgcagtccacctatgtcctgcagggtcttcacctccacatcccaaacattttcccagccaacccggccaacatctctgtggccctgagagcccagggcagcagctacacgatcccggaagcctggctcctcctggccaatgttgtggtggtgctgattctggtccctctgaaggaccgcttgatcgaccctttactgctgcggtgcaagctgcttccctctgctctgcagaagatggcgctggggatgttctttggttttacctccgtcattgtggcaggagtcctggagatggagcgcttacactacatccaccacaacgagaccgtgtcccagcagattggggaggtcctgtacaacgcggcaccactgtccatctggtggcagatccctcagtacctgctcattgggatcagtgagatctttgccagcatcccaggcctggagtttgcctactcagaggccccgcgctccatgcagggcgccatcatgggcatcttcttctgcctgtcgggggtgggctcactgttgggctccagcctagtggcactgctgtccttgcccgggggctggctgcactgccccaaggactttgggaacatcaacaattgccggatggacctctacttcttcctgctggctggcattcaggccgtcacggctctcctatttgtctggatcgctggacgctatgagagggcgtcccagggcccagcctcccacagccgtttcagcagggacaggggctgaacaggccctattccagcccccttgcttcactctaccggacagacggcagcagtcccagctctggtttccttctcggtttattctgttagaatgaaatggttcccataaataaggggcatgagcccttcctcacga

SEQ ID NO: 182933 - DNA, 801 bp, Homo sapiens
  Payload ID: 16039
  Gene Symbol: SLC15A3
  Gene Name: solute carrier family 15 (oligopeptide transporter), member 3
  ENST ID: ENST00000537307
  CDS Start-End: 1-743
agccaggggcttccccgcaagaggacatcgccaacttccaggtgctggtgaagatcttgcccgtcatggtgaccctggtgccctactggatggtctacttccagatcccggaagcctggctcctcctggccaatgttgtggtggtgctgattctggtccctctgaaggaccgcttgatcgaccctttactgctgcggtgcaagctgcttccctctgctctgcagaagatggcgctggggatgttctttggttttacctccgtcattgtggcaggagtcctggagatggagcgcttacactacatccaccacaacgagaccgtgtcccagcagattggggaggtcctgtacaacgcggcaccactgtccatctggtggcagatccctcagtacctgctcattgggatcagtgagatctttgccagcatcccaggcctggagtttgcctactcagaggccccgcgctccatgcagggcgccatcatgggcatcttcttctgcctgtcgggggtgggctcactgttgggctccagcctagtggcactgctgtccttgcccgggggctggctgcactgccccaaggactttgggaacatcaacaattgccggatggacctctacttcttcctgctggctggcattcaggccgtcacggctctcctatttgtctggatcgctggacgctatgagagggcgtcccagggcccagcctcccacagccgtttcagcagggacaggggctgaacaggccctattccagcccccttgcttcactctaccggacagacggcagcagtcccag

SEQ ID NO: 182934 - DNA, 676 bp, Homo sapiens
  Payload ID: 16039
  Gene Symbol: SLC15A3
  Gene Name: solute carrier family 15 (oligopeptide transporter), member 3
  ENST ID: ENST00000536491
  CDS Start-End: 49-676
gaaggggcctggggcctggctgttgctgattgatccaaattctgggtgatggatctcggccgcgacgccacccgccgcttcttcaactggttttactggagcatcaacctgggtgctgtgctgtcgctgctggtggtggcgtttattcagcagaacatcagcttcctgctgggctacagcatccctgtgggctgtgtgggcctggcatttttcatcttcctctttgccacccccgtcttcatcaccaagcccccgatgggcagccaagtgtcctctatgcttaagctcgctctccaaaactgctgcccccagctgtggcaacgacactcggccagagaccgtcaatgtgcccgcgtgctggccgacgagaggtctccccagccaggggcttccccgcaagaggacatcgccaacttccaggtgctggtgaagatcttgcccgtcatggtgaccctggtgccctactggatggtctacttccagatgcagtccacctatgtcctgcagggtcttcacctccacatcccaaacattttcccagccaacccggccaacatctctgtggccctgagagcccagggcagcagctacacgatcccggaagcctggctcctcctggccaatgttgtggtggtgctgattctggtccctctgaaggaccgcttgatcgaccctt

SEQ ID NO: 182935 - DNA, 691 bp, Homo sapiens
  Payload ID: 16039
  Gene Symbol: SLC15A3
  Gene Name: solute carrier family 15 (oligopeptide transporter), member 3
  ENST ID: ENST00000538739
  CDS Start-End: 245-691
gaaatggctgagtgtgaccaaatgatgcagcaccaacttcaactggaccggcgagcaggcgacgcgcgccgcgctggtattcctgggcgcctcctacctgctggcgcccgtgggcggctggctggccgacgtgtacctgggccgctaccgcgcggtcgcgctcagcctgctgctctacctggccgcctcgggcctgctgcccgccaccgccttccccgacggccgcagctccttctgcggagagatgcccgcgtcgccgctgggacctgcctgcccctcggccggctgcccgcgctcctcgcccagcccctactgcgcgcccgtcctctacgcgggcctgctgctactcggcctggccgccagctccgtccggagcaacctcacctccttcggtgccgaccaggtgatggatctcggccgcgacgccacccgccgcttcttcaactggttttactggagcatcaacctgggtgctgtgctgtcgctgctggtggtggcgtttattcagcagaacatcagcttcctgctgggctacagcatccctgtgggctgtgtgggcctggcatttttcatcttcctctttgccacccccgtcttcatcaccaagcccccgatgggcagccaagtgtcctctatgcttaagctcgctctccaaaactgctgcccccagctgtggcaacgacactcggcc

SEQ ID NO: 182936 - DNA, 456 bp, Homo sapiens
  Payload ID: 16039
  Gene Symbol: SLC15A3
  Gene Name: solute carrier family 15 (oligopeptide transporter), member 3
  ENST ID: ENST00000536784
  CDS Start-End: 1-132
ggcgccatcatgggcatcttcttctgcctgtcgggggtgggctcactgttgggctccagcctagtggcactgctgtccttgcccgggggctggctgcactgccccaaggactttgctgaagaggaattgtagacacccctggagatcttcaggaagtcaaacattaggaacatcaacaattgccggatggacctctacttcttcctgctggctggcattcaggccgtcacggctctcctatttgtctggatcgctggacgctatgagagggcgtcccagggcccagcctcccacagccgtttcagcagggacaggggctgaacaggccctattccagcccccttgcttcactctaccggacagacggcagcagtcccagctctggtttccttctcggtttattctgttagaatgaaatggttcccataaataaggggcatgagcccttcctcacga

SEQ ID NO: 182937 - DNA, 1807 bp, Homo sapiens
  Payload ID: 16039
  Gene Symbol: SLC15A3
  Gene Name: solute carrier family 15 (oligopeptide transporter), member 3
  ENST ID: ENST00000541505
  CDS Start-End: 96-1466
gggagagggccgaggcccgggggcaggagtgcagggctctgaggcggggagaggagaggagagaagagccgcggggggcccagcccggagccaggatgcccgcgccgcgcgcccgggagcagccccgcgtgcccggggagcgccagccgctgctgcctcgcggtgcgcggggccctcgacggtggcggcgggcggcgggcgcggccgtgctgctggtggagatgctggagcgcgccgccttcttcggcgtcaccgccaacctcgtgctgtacctcaacagcaccaacttcaactggaccggcgagcaggcgacgcgcgccgcgctggtattcctgggcgcctcctacctgctggcgcccgtgggcggctggctggccgacgtgtacctgggccgctaccgcgcggtcgcgctcagcctgctgctctacctggccgcctcgggcctgctgcccgccaccgccttccccgacggccgcagctccttctgcggagagatgcccgcgtcgccgctgggacctgcctgcccctcggccggctgcccgcgctcctcgcccagcccctactgcgcgcccgtcctctacgcgggcctgctgctactcggcctggccgccagctccgtccggagcaacctcacctccttcggtgccgaccaggtgatggatctcggccgcgacgccacccgccgcttcttcaactggttttactggagcatcaacctgggtgctgtgctgtcgctgctggtggtggcgtttattcagcagaacatcagcttcctgctgggctacagcatccctgtgggctgtgtgggcctggcatttttcatcttcctctttgccacccccgtcttcatcaccaagcccccgatgggcagccaagtgtcctctatgcttaagctcgctctccaaaactgctgcccccagctgtggcaacgacactcggccagagaccgtcaatgtgcccgcgtgctggccgacgagaggtctccccagccaggggcttccccgcaagaggacatcgccaacttccaggtgctggtgaagatcttgcccgtcatggtgaccctggtgccctactggatggtctacttccagatgcagtccacctatgtcctgcagggtcttcacctccacatcccaaacattttcccagccaacccggccaacatctctgtggccctgagagcccagggcagcagctacacggagtcctggagatggagcgcttacactacatccaccacaacgagaccgtgtcccagcagattggggaggtcctgtacaacgcggcaccactgtccatctggtggcagatccctcagtacctgctcattgggatcagtgagatctttgccagcatcccaggcctggagtttgcctactcagaggccccgcgctccatgcagggcgccatcatgggcatcttcttctgcctgtcgggggtgggctcactgttgggctccagcctagtggcactgctgtccttgcccgggggctggctgcactgccccaaggactttgggaacatcaacaattgccggatggacctctacttcttcctgctggctggcattcaggccgtcacggctctcctatttgtctggatcgctggacgctatgagagggcgtcccagggcccagcctcccacagccgtttcagcagggacaggggctgaacaggccctattccagcccccttgcttcactctaccggacagacggcagcagtcccagctctggtttccttctcggtttattctgttagaatgaaatggttcccataaataaggggcatgagcccttcctcacga

SEQ ID NO: 182938 - DNA, 2115 bp, Homo sapiens
  Payload ID: 16039
  Gene Symbol: SLC15A3
  Gene Name: solute carrier family 15 (oligopeptide transporter), member 3
  ENST ID: ENST00000618622
  CDS Start-End: 235-1176
ggagttgagaattagggaggaggtggtagagtccgggtagtgagcggagggacaggaagggtagggcaagaaagggagaggggacaggagggaagggtgggccaaagcggtgagaaaggagggccagccagttgggtgggggagagggccgaggcccgggggcaggagtgcagggctctgaggcggggagaggagaggagagaagagccgcggggggcccagcccggagccaggatgcccgcgccgcgcgcccgggagcagccccgcgtgcccggggagcgccagccgctgctgcctcgcggtgcgcggggccctcgacggtggcggcgggcggcgggcgcggccgtgctgctggtggagatgctggagcgcgccgccttcttcggcgtcaccgccaacctcgtgctgtacctcaacagcaccaacttcaactggaccggcgagcaggcgacgcgcgccgcgctggtattcctgggcgcctcctacctgctggcgcccgtgggcggctggctggccgacgtgtacctgggccgctaccgcgcggtcgcgctcagcctgctgctctacctggccgcctcgggcctgctgcccgccaccgccttccccgacggccgcagctccttctgcggagagatgcccgcgtcgccgctgggacctgcctgcccctcggccggctgcccgcgctcctcgcccagcccctactgcgcgcccgtcctctacgcgggcctgctgctactcggcctggccgccagctccgtccggagcaacctcacctccttcggtgccgaccaggtgatggatctcggccgcgacgccacccgccgcttcttcaactggtttactggagcatcaacctgggtgctgtgctgtcgctgctggtggtggcgtttattcagcagaacatcagcttcctgctgggctacagcatccctgtgggctgtgtgggcctggcatttttcatcttcctctttgccacccccgtcttcatcaccaagcccccgatgggcagccaagtgtcctctatgcttaagctcgctctccaaaactgctgcccccagctgtggcaacgacactcggccagagaccgtcaatgtgcccgcgtgctggccgacgagaggtctccccagccaggggcttccccgcaagaggacatcgccaacttccaggtgctggtgaagatcttgcccgtcatggtgaccctggtgccctactggatggtctacttccagatgcagtccacctatgtcctgcagggtcttcacctccacatcccaaacattttcccagccaacccggccaacatctctgtggccctgagagcccagggcagcagctacacgatcccggaagcctggctcctcctggccaatgttgtggtggtgctgattctggtccctctgaaggaccgcttgatcgaccctttactgctgcggtgcaagctgcttccctctgctctgcagaagatggcgctggggatgttctttggttttacctccgtcattgtggcaggagtcctggagatggagcgcttacactacatccaccacaacgagaccgtgtcccagcagattggggaggtcctgtacaacgcggcaccactgtccatctggtggcagatccctcagtacctgctcattgggatcagtgagatctttgccagcatcccaggcctggagtttgcctactcagaggccccgcgctccatgcagggcgccatcatgggcatcttcttctgcctgtcgggggtgggctcactgttgggctccagcctagtggcactgctgtccttgcccgggggctggctgcactgccccaaggactttgggaacatcaacaattgccggatggacctctacttcttcctgctggctggcattcaggccgtcacggctctcctatttgtctggatcgctggacgctatgagagggcgtcccagggcccagcctcccacagccgtttcagcagggacaggggctgaacaggccctattccagcccccttgcttcactctaccggacagacggcagcagtcccagctctggtttccttctcggtttattctgttagaatgaaatggttcccataaataaggggcatgagcccttcctcacgac

SEQ ID NO: 182939 - DNA, 1805 bp, Homo sapiens
  Payload ID: 16039
  Gene Symbol: SLC15A3
  Gene Name: solute carrier family 15 (oligopeptide transporter), member 3
  ENST ID: ENST00000621824
  CDS Start-End: 96-1037
gggagagggccgaggcccgggggcaggagtgcagggctctgaggcggggagaggagaggagagaagagccgcggggggcccagcccggagccaggatgcccgcgccgcgcgcccgggagcagccccgcgtgcccggggagcgccagccgctgctgcctcgcggtgcgcggggccctcgacggtggcggcgggcggcgggcgcggccgtgctgctggtggagatgctggagcgcgccgccttcttcggcgtcaccgccaacctcgtgctgtacctcaacagcaccaacttcaactggaccggcgagcaggcgacgcgcgccgcgctggtattcctgggcgcctcctacctgctggcgcccgtgggcggctggctggccgacgtgtacctgggccgctaccgcgcggtcgcgctcagcctgctgctctacctggccgcctcgggcctgctgcccgccaccgccttccccgacggccgcagctccttctgcggagagatgcccgcgtcgccgctgggacctgcctgcccctcggccggctgcccgcgctcctcgcccagcccctactgcgcgcccgtcctctacgcgggcctgctgctactcggcctggccgccagctccgtccggagcaacctcacctccttcggtgccgaccaggtgatggatctcggccgcgacgccacccgccgcttcttcaactggtttactggagcatcaacctgggtgctgtgctgtcgctgctggtggtggcgtttattcagcagaacatcagcttcctgctgggctacagcatccctgtgggctgtgtgggcctggcatttttcatcttcctctttgccacccccgtcttcatcaccaagcccccgatgggcagccaagtgtcctctatgcttaagctcgctctccaaaactgctgcccccagctgtggcaacgacactcggccagagaccgtcaatgtgcccgcgtgctggccgacgagaggtctccccagccaggggcttccccgcaagaggacatcgccaacttccaggtgctggtgaagatcttgcccgtcatggtgaccctggtgccctactggatggtctacttccagatgcagtccacctatgtcctgcagggtcttcacctccacatcccaaacattttcccagccaacccggccaacatctctgtggccctgagagcccagggcagcagctacacggagtcctggagatggagcgcttacactacatccaccacaacgagaccgtgtcccagcagattggggaggtcctgtacaacgcggcaccactgtccatctggtggcagatccctcagtacctgctcattgggatcagtgagatctttgccagcatcccaggcctggagtttgcctactcagaggccccgcgctccatgcagggcgccatcatgggcatcttcttctgcctgtcgggggtgggctcactgttgggctccagcctagtggcactgctgtccttgcccgggggctggctgcactgccccaaggactttgggaacatcaacaattgccggatggacctctacttcttcctgctggctggcattcaggccgtcacggctctcctatttgtctggatcgctggacgctatgagagggcgtcccagggcccagcctcccacagccgtttcagcagggacaggggctgaacaggccctattccagcccccttgcttcactctaccggacagacggcagcagtcccagctctggtttccttctcggtttattctgttagaatgaaatggttcccataaataaggggcatgagcccttcctcacg

SEQ ID NO: 182940 - DNA, 2779 bp, Homo sapiens
  Payload ID: 16040
  Gene Symbol: SLC15A4
  Gene Name: solute carrier family 15 (oligopeptide transporter), member 4
  Uniprot ID: Q8N697
  ENST ID: ENST00000266771
  CDS Start-End: 41-1774
aggtgacccggcggcggggcgaggcagctggcggcgtcgcatggagggctctgggggcggtgcgggcgagcgggcgccgctgctgggcgcgcggcgggcggcggcggccgcggcggcggctggggcgttcgcgggccggcgcgcggcgtgcggggccgtgctgctgacggagctgctggagcgcgccgctttctacggcatcacgtccaacctggtgctattcctgaacggggcgccgttctgctgggagggcgcgcaggccagcgaggcgctgctgctcttcatgggcctcacctacctgggctcgccgttcggaggctggctggccgacgcgcggctgggccgggcgcgcgccatcctgctgagcctggcgctctacctgctgggcatgctggccttcccgctgctggccgcgcccgccacgcgagccgcgctctgcggttccgcgcgcctgctcaactgcacggcgcctggtcccgacgccgccgcccgctgctgctcaccggccaccttcgcggggctggtgctggtgggcctgggcgtggccaccgtcaaggccaacatcacgcccttcggcgccgaccaggttaaagatcgaggtccggaagccactaggagattttttaattggttttattggagcattaacctgggagcgatcctgtcgttaggtggcattgcctatattcagcagaacgtcagctttgtcactggttatgcgatccccactgtctgcgtcggccttgcttttgtggtcttcctctgtggccagagcgttttcatcaccaagcctcctgatggcagtgccttcaccgacatgttcaagatactgacgtattcctgctgttcccagaagcgaagtggagagcgccagagtaatggtgaaggcattggagtctttcagcaatcttctaaacaaagtctgtttgattcatgtaagatgtctcatggtgggccatttacagaagagaaagtggaagatgtgaaagctctggtcaagattgtccctgttttcttggctttgataccttactggacagtgtatttccaaatgcagacaacatatgttttacagagtcttcatttgaggattccagaaatttcaaatattacaaccactcctcacacgctccctgcagcctggctgaccatgtttgatgctgtgctcatcctcctgctcatccctctgaaggacaaactggtcgatcccattttgagaagacatggcctgctcccatcctccctgaagaggatcgccgtgggcatgttctttgtcatgtgctcggcctttgctgcaggaattttggagagtaaaaggctgaaccttgttaaagagaaaaccattaatcagaccatcggcaacgtcgtctaccatgctgccgatctgtcgctgtggtggcaggtgccgcagtacttgctgattgggatcagcgagatctttgcaagtatcgcaggcctggaatttgcatactcagctgcccccaagtccatgcagagtgccataatgggcttgttctttttcttctctggcgtcgggtcgttcgtgggttctggactgctggcactggtgtctatcaaagccatcggatggatgagcagtcacacagactttggtaatattaacggctgctatttgaactattacttttttcttctggctgctattcaaggagctaccctcctgcttttcctcattatttctgtgaaatatgaccatcatcgagaccatcagcgatcaagagccaatggcgtgcccaccagcaggagggcctgaccttcctgaggccatgtgcggtttctgaggctgacatgtcagtaactgactggggtgcactgagaacaggcaagactttaaattcccataaaatgtctgacttcactgaaacttgcatgttgcctggattgatttcttctttccctctatccaaaggagcttggtaagtgccttactgcagcgtgtctcctggcacgctgggccctccgggaggagagctgcagatttcgagtatgtcgcttgtcattcaaggtctctgtgaatcctctagctgggttcccttttttacagaaactcacaaatggagattgcaaagtcttggggaactccacgtgttagttggcatcccagtttcttaaacaaatagtatcacctgcttcccatagccatatctcactgtaaaaaaaaaattaataaactgttacttatatttaagaaagtgaggatttttttttttttaaagataaaagcatggtcagatgctgcaaggattttacataaatgccatatttatggtttccttcctgagaacaatcttgctcttgccatgttctttgatttaggctggtagtaaacacatttcatctgctgcttcaaaaagtacttactttttaaaccatcaacattacttttctttcttaaggcaaggcatgcataagagtcatttgagaccatgtgtcccatctcaagccacagagcaactcacggggtacttcacaccttacctagtcagagtgcttatatatagctttattttggtacgattgagactaaagactgatcatggttgtatgtaaggaaaacattcttttgaacagaaatagtgtaattaaaaataattgaaagtgttaaatgtgaacttgagctgtttgaccagtcacatttttgtattgttactgtacgtgtatctggggcttctccgtttgttaatactttttctgtatttgttgctgtatttttggcataactttattataaaaagcatctcaaatgcgaaatccatga

SEQ ID NO: 182941 - DNA, 761 bp, Homo sapiens
  Payload ID: 16040
  Gene Symbol: SLC15A4
  Gene Name: solute carrier family 15 (oligopeptide transporter), member 4
  ENST ID: ENST00000376740
  CDS Start-End: 1-467
gcacggcgcctggtcccgacgccgccgcccgctgctgctcaccggccaccttcgcggggctggtgctggtgggcctgggcgtggccaccgtcaaggccaacatcacgcccttcggcgccgaccaggttaaagatcgaggtccggaagccactaggagattttttaattggttttattggagcattaacctgggagcgatcctgtcgttaggtggcattgcctatattcagcagaacgtcagctttgtcactggttatgcgatccccactgtctgcgtcggccttgcttttgtggtcttcctctgtggccagagcgttttcatcaccaagcctcctgatggcagtgccttcaccgacatgttcaagatactgacgtattcctgctgttcccagaagcgaagtggagagcgccagagtaatggatgtctcatggtgggccatttacagaagagaaagtggaagatgtgaaagctctggtcaagattgtccctgttttcttggctttgataccttactggacagtgtatttccaaatgcagacaacatatgttttacagagtcttcatttgaggattccagaaatttcaaatattacaaccactcctcacacgctccctgcagcctggctgaccatgtttgatgctgtgctcatcctcctgctcatccctctgaaggacaaactggtcgatcccattttgagaagacatggcctgctcccatcctccctgaagaggatcgccgtgggcatgttctttgtcatgt

SEQ ID NO: 182942 - DNA, 2402 bp, Homo sapiens
  Payload ID: 16040
  Gene Symbol: SLC15A4
  Gene Name: solute carrier family 15 (oligopeptide transporter), member 4
  ENST ID: ENST00000376744
  CDS Start-End: 1-715
gtccaacctggtgctattcctgaacggggcgccgttctgctgggagggcgcgcaggccagcgaggcgctgctgctcttcatgggcctcacctacctgggctcgccgttcggaggctggctggccgacgcgcggctgggccgggcgcgcgccatcctgctgagcctggcgctctacctgctgggcatgctggccttcccgctgctggccgcgcccgccacgcgagccgcgctctgcggttccgcgcgcctgctcaactgcacggcgcctggtcccgacgccgccgcccgctgctgctcaccggccaccttcgcggggctggtgctggtgggcctgggcgtggccaccgtcaaggccaacatcacgcccttcggcgccgaccaggttaaagatcgaggtccggaagccactaggagattttttaattggttttattggagcattaacctgggagcgatcctgtcgttaggtggcattgcctatattcagcagaacgtcagctttgtcactggttatgcgatccccactgtctgcgtcggccttgcttttgtggtcttcctctgtggccagagcgttttcatcaccaagcctcctgatggcagtgccttcaccgacatgttcaagatactgacgtattcctgctgttcccagaagcgaagtggagagcgccagagtaatggatgcagacaacatatgttttacagagtcttcatttgaggattccagaaatttcaaatattacaaccactcctcacacgctccctgcagcctggctgaccatgtttgatgctgtgctcatcctcctgctcatccctctgaaggacaaactggtcgatcccattttgagaagacatggcctgctcccatcctccctgaagaggatcgccgtgggcatgttctttgtcatgtgctcggcctttgctgcaggaattttggagagtaaaaggctgaaccttgttaaagagaaaaccattaatcagaccatcggcaacgtcgtctaccatgctgccgatctgtcgctgtggtggcaggtgccgcagtacttgctgattgggatcagcgagatctttgcaagtatcgcaggcctggaatttgcatactcagctgcccccaagtccatgcagagtgccataatgggcttgttctttttcttctctggcgtcgggtcgttcgtgggttctggactgctggcactggtgtctatcaaagccatcggatggatgagcagtcacacagactttggtaatattaacggctgctatttgaactattacttttttcttctggctgctattcaaggagctaccctcctgcttttcctcattatttctgtgaaatatgaccatcatcgagaccatcagcgatcaagagccaatggcgtgcccaccagcaggagggcctgaccttcctgaggccatgtgcggtttctgaggctgacatgtcagtaactgactggggtgcactgagaacaggcaagactttaaattcccataaaatgtctgacttcactgaaacttgcatgttgcctggattgatttcttctttccctctatccaaaggagcttggtaagtgccttactgcagcgtgtctcctggcacgctgggccctccgggaggagagctgcagatttcgagtatgtcgcttgtcattcaaggtctctgtgaatcctctagctgggttcccttttttacagaaactcacaaatggagattgcaaagtcttggggaactccacgtgttagttggcatcccagtttcttaaacaaatagtatcacctgcttcccatagccatatctcactgtaaaaaaaaaattaataaactgttacttatatttaagaaagtgaggatttttttttttttaaagataaaagcatggtcagatgctgcaaggattttacataaatgccatatttatggtttccttcctgagaacaatcttgctcttgccatgttctttgatttaggctggtagtaaacacatttcatctgctgcttcaaaaagtacttactttttaaaccatcaacattacttttctttcttaaggcaaggcatgcataagagtcatttgagaccatgtgtcccatctcaagccacagagcaactcacggggtacttcacaccttacctagtcagagtgcttatatatagctttattttggtacgattgagactaaagactgatcatggttgtatgtaaggaaaacattcttttgaacagaaatagtgtaattaaaaataattgaaagtgttaaatgtgaacttgagctgtttgaccagtcacatttttgtattgttactgtacgtgtatctggggcttctccgtttgttaatactttttctgtatttgttgctgtatttttggcataactttattataaaaagcatctcaaatgcgaaatcc

SEQ ID NO: 182943 - DNA, 1901 bp, Homo sapiens
  Payload ID: 16040
  Gene Symbol: SLC15A4
  Gene Name: solute carrier family 15 (oligopeptide transporter), member 4
  ENST ID: ENST00000614634
  CDS Start-End: 186-749
gtcagctttgtcactggttatgcgatccccactgtctgcgtcggccttgcttttgtggtcttcctctgtggccagagcgttttcatcaccaagcctcctgatggcagtgccttcaccgacatgttcaagatactgacgtattcctgctgttcccagaagcgaagtggagagcgccagagtaatggatgcagacaacatatgttttacagagtcttcatttgaggattccagaaatttcaaatattacaaccactcctcacacgctccctgcagcctggctgaccatgtttgatgctgtgctcatcctcctgctcatccctctgaaggacaaactggtcgatcccattttgagaagacatggcctgctcccatcctccctgaagaggatcgccgtgggcatgttctttgtcatgtgctcggcctttgctgcaggaattttggagagtaaaaggctgaaccttgttaaagagaaaaccattaatcagaccatcggcaacgtcgtctaccatgctgccgatctgtcgctgtggtggcaggtgccgcagtacttgctgattgggatcagcgagatctttgcaagtatcgcaggcctggaatttgcatactcagctgcccccaagtccatgcagagtgccataatgggcttgttctttttcttctctggccgggtcgttcgtgggttctggactgctggcactggtgtctatcaaagccatcggatggatgagcagtcacacagactttggtaatattaacggctgctatttgaactattacttttttcttctggctgctattcaaggagctaccctcctgcttttcctcattatttctgtgaaatatgaccatcatcgagaccatcagcgatcaagagccaatggcgtgcccaccagcaggagggcctgaccttcctgaggccatgtgcggtttctgaggctgacatgtcagtaactgactggggtgcactgagaacaggcaagactttaaattcccataaaatgtctgacttcactgaaacttgcatgttgcctggattgatttcttctttccctctatccaaaggagcttggtaagtgccttactgcagcgtgtctcctggcacgctgggccctccgggaggagagctgcagatttcgagtatgtcgcttgtcattcaaggtctctgtgaatcctctagctgggttcccttttttacagaaactcacaaatggagattgcaaagtcttggggaactccacgtgttagttggcatcccagtttcttaaacaaatagtatcacctgcttcccatagccatatctcactgtaaaaaaaaaattaataaactgttacttatatttaagaaagtgaggatttttttttttttaaagataaaagcatggtcagatgctgcaaggattttacataaatgccatatttatggtttccttcctgagaacaatcttgctcttgccatgttctttgatttaggctggtagtaaacacatttcatctgctgcttcaaaaagtacttactttttaaaccatcaacattacttttctttcttaaggcaaggcatgcataagagtcatttgagaccatgtgtcccatctcaagccacagagcaactcacggggtacttcacaccttacctagtcagagtgcttatatatagctttattttggtacgattgagactaaagactgatcatggttgtatgtaaggaaaacattcttttgaacagaaatagtgtaattaaaaataattgaaagtgttaaatgtgaacttgagctgtttgaccagtcacatttttgtattgttactgtacgtgtatctggggcttctccgtttgttaatactttttctgtatttgttgctgtatttttggcataactttattataaaaagcatctcaaatgcg

SEQ ID NO: 182944 - DNA, 2923 bp, Homo sapiens
  Payload ID: 16041
  Gene Symbol: SLC15A5
  Gene Name: solute carrier family 15, member 5
  Uniprot ID: A6NIM6
  ENST ID: ENST00000344941
  CDS Start-End: 1-1740
atgtctgttacaggctttaccataactgatgagaaagtacacttatatcacagcattgagaaggagaaaactgtaagacatattggcgatttgtgttcctcacactctgtgaaaaaaattcaggttggaatctgcttgcttctggtggagctgtgtgagaggttcacgttctttgaagtcgtctgcaacatgatccccttttgcactatcaagcttggctatcacaattgccaagcagccatcttaaacttgtgttttattggaacttcaatacttacccctgtgtttgtcagatggctcactgatgtctatttaggaagaaacaaactggtgtacatttgcttgtttctacattttctaggcactgctttgttatctgtggtggcttttcccttggaagatttctatctgggcacttaccatgcagttaacaacataccaaaaacagagcagcacaggctgttttatgtagcactgctgaccatttgccttggcattggaggcgtaagagccatcgtctgtccactgggtgcttttggccttcaggagtatggatcacaaaaaacgatgtctttttttaactggttttattggctcatgaacctaaatgcaactattgtgtttctgggaatatcttacatccagcactcacaggcctgggcccttgttttacttattccttttatgtctatgcttatggctgtgataactcttcatatgatatactacaacctaatttatcagtcagaaaaacgttgttctctcctgacaggcgttggggtgttggttagtgcactgaaaacatgccacccgcaatactgccatcttggcagagacgtgacaagccagttagaccatgccaaagaaaaaaatggtggctgctacagtgagctccatgtagaagacacaacatttttcctcacccttctccctctcttcatttttcagctcctatacagaatgtgcattatgcagattccttcaggatattatctgcaaactatgaattccaacctgaatttggatggatttcttctgccgattgcagtaatgaatgccatcagcagcctaccattactaattctggctccttttctggagtatttcagcacctgcctgtttccctctaagagagttggatcatttctgtcaacatgcatcattgctggaaatctttttgctgcattgtctgtgatgatagctggcttctttgaaatacaccgaaaacatttccctgcagtggagcagcccctttcaggaaaagttctcactgtttcctccatgccctgtttctacctgattcttcagtatgttttacttggagtggcggaaacactggtaaacccagccctctctgtaatatcatacagatttgttccaagcaatgtcagaggaacctccatgaattttctgacactgttcaatggatttggctgtttcacaggggcactgctggtgaagttggtatatctcatctcagatggcaattggtttccaaacacattaaacaaaggcaatttagaaagcttcttcttcttcctggcatcattaacattgttgaacgtcctgggattctgcagtgtttcacaaagatattgtaatctaaatcattttaatgcccagaacatccgtggaagtaatcttgaagaaacacttctcctccacgaaaaatctctgaaattttatggcagtatacaggaattttcttcaagtattgatctttgggagacagccctatgaaactgtgtttgagtctacctgtcttatgagaacagtattcattgttttcttcttcagttgagcattttatgtgttttagtgtaaaagccaatatatacagaggtgattttacaaatatcatctgtatactttatttacaaagactaattatgaattttctagtaaactgtcatgcttttgcattaacatgttatagcattagaattaataaaataatttcaaagtctcagtgattactctatgacaaaaaaaatgacagttttctatacaccaataataccttacagctttctacaatggttcagccattgaaagcgtatgaccttttttttggagttttaatgagtcattagaagcaaaatgacagtattttaatatactctctttcaatacacttagtgatcccttattacacgtgaccttattacattgtgaccatatactgtatataactgagtaaataataaacatatacatgattttctatatttgctgttaatattatgctatcaaaatatgacttcattaaggacattttctctgaatttaaaagcagtattactaaaatagatgtccttaacaaagagaatgtccgcatactaaaaaagttgaaaaataaatgtaagttatggaattattggaattaaaagaaagaaggaaattagggaagataaaatgagggggctgagaggagggtaagtgaccaaaccaaatagagatgcttaaaggaattatatgaataacatctttcggtctccactgccaattcagatgcattcagaaaattatcttctaagagtttcttctttcataagcaaaaatatgtggaaactcattttttaaaaaatcaaataaaattaaagtctgtttctcagtagcagtatttgtcaacatttggttgaggacaacttgctacaggtgaatctttctggcccctatacagactgccttaactcaaatctttttttgagattggggtccagcaattggtggttttaataagcacacccaaatcattctcatgttccctaaggtttaaaagccattgctttccaggacaattcatgttggataggacaggtgagtttatcagctgactgcaaattattctgcaattatgcacctcccttgtgtatacataaaatattttaggtctgtagaataaaagatttactcaacttga

SEQ ID NO: 182945 - DNA, 10051 bp, Homo sapiens
  Payload ID: 16042
  Gene Symbol: SLC16A10
  Gene Name: solute carrier family 16 (aromatic amino acid transporter), member 10
  ENST ID: ENST00000368850
  CDS Start-End: 487-1092
ttccatcgagcctctgtaccttacctatggaatcatatttgcctgcggctgctcctttgcataccagccttcattggtcattttgggacactatttcaagaagcgccttggactggtgaatggcattgtcactgctggcagcagtgtcttcacaatcctgctgcctttgctcttaagggttctgattgacagcgtgggcctcttttacacattgagggtgctctgcatcttcatgtttgttctctttctggctggctttacttaccgacctcttgctaccagtaccaaagataaagagagtggaggtagcggatcctccctcttttccaggaaaaagttcagtcctccaaaaaaaattttcaattttgccatcttcaaggtgacagcttatgcagtgtgggcagttggaataccacttgcactttttggatactttgtgccttatgttcacttgatctcaacatctgctgcaatttgactgttcagatgaaacatgtaaatgaaagatttcaagatgaaaaaaataaagaggttgttctcatgtgcattggcgtcacttcaggagttggacgactgctctttggccggattgcagattatgtgcctggtgtgaagaaggtttatctacaggtactctcctttttcttcattggtctgatgtccatgatgattcctctgtgtagcatctttggggccctcattgctgtgtgcctcatcatgggtctcttcgatggatgcttcatttccattatggctcccatagcctttgagttagttggtgcccaggatgtctcccaagcaattggatttctgctcggattcatgtctatacccatgactgttggcccacccattgcagggttacttcgtgacaaactgggctcctatgatgtggcattctacctcgctggagtccctccccttattggaggtgctgtgctttgttttatcccgtggatccatagtaagaagcaaagagagatcagtaaaaccactggaaaagaaaagatggagaaaatgttggaaaaccagaactctctgctgtcaagttcatctggaatgttcaagaaagaatctgactctattatttaatatcttacatacctccaccagactggacttgctttttgaattttaagcaagtttcctttccttttatacaaattgcaaatttcatatttttttaatcacatcctaggaatagcacaataattgggaaatagaacccttatcactagaagaaccattttctgccactaaatatctctgatgtttccatgagtctgagggcagagactctggtatatgaaaacgtctgaaagtcacatattgtgaaaatttgaagctatctcagtaaaaagcagctttggaaactgtgaatgatctttagcttgtacaaatgtttaaaaatacctcaggctatactgaaagggttgcagtttggttaggagtggaaatattttgtttgttaatgatgtcttcagttctggtacctctgttttactttcttatgctctttggaaactttttgcaaaatttaagcctgggttctagataataccagatctacctaaacctcaagtctatgttaaagttgctttcctgctgttaaataagctatgatattaagatattctgacttgctccagtgtcaagggaccttctgggagcaggtgctaacatagtgttcagaatcaatatgtgagatgaaaaggatcccctccaggaggatcctgagctgttcagaaatcatttaagtttacagcgttgttccctttgcgtttgcagtgcgttttactcaagtagccagaaacaccccacgtttctgaatttgtttaaactgtaacaataaagtaaaatagaatgcatgaaagatattctggcgattgtaacttagaatttttctgacttctggatttgttggcactagaacctgatatttaaagtcttactgagcagctatcaagtggcagttacaggcacaaattggtggaggctggaggatggggaggggagcaaaaccctttatatttgtgaagaaaatatctgtagctgatagaaataattgcttaaattggtttatgaaattaatgagtctgaaaaggttaaaagcacttataaaaagaaccaagtcctacatttccagaactttctggcaaaaatttgcactcatattatttatcctatgaacattcccattgtttttttttgctatttatatacagattatcataagaaagctctcagtttgaggacccaaaataaaaccaaagtcatgccatgacccatactcatttacaaaaacaagaacactttcctctatccctaaaattatgctttagtacttgaggcctttaaaagttagtgcttttgattgtgaagacattcagcaacttactttgtcatacatgcagttgcaccttaccacttctaatagtgtcatatttcatattcaggggacttagataatttgcctgtggatggttcttttgcaggaaaaaaaatctacattttgaccatactaccctttcatgtccttattataagcttttagaaaatgatttcattcagtcatgtccagttatataaaacgttactttctcatttttgagaagttcaacaaaacatactactaagaccaatcatcaaacccactattataaatgttaattttggctgggtaaggtggcttgcgcctataatcccagcactttgggaggctgaggagggaagattgcttgagcccaggagtttgagaccagcctgggcaacatagcaagatcctgtctctactaaaaataaaaaaaaaaattaggccaagcatagtggctcatgcctgtaatcctagcactttggtagtccaaggcagggggatcacttgagcccagaagttcaagaccagcttgggtaacataatgagaccctgtgtctacaaaaaatttaaaaattagccaggcatgatggtgcccacctgtagccccagctactcagaggctgaggtagtggaaggattgcttgagccttgagatggaggctgcagtgagctatgccactgtactctagcctgttcaactgagcagaaccctgtctgtaaaagaaaatcaaaaacaaaaaataaatgttaaattttgttttaagttttagcacagactcccctcaaaacaccttctccccaattttacagaaagtaatttaaaaatgaaaactttactctgtaaagacctctacagtgtttttcttttcaaaatttggctgattttaggaaaaaagtgatcatctgaaactaaaagaaattgcttggttagtttccatattaaaacagcagtgacaagtatatataacttagatctcagcatatgtgtttgtatattaaacttcacatatgtagttttcagtttaatggaatgaatcaaactggatctataacactgaaaaagttctattgtaatagactcatacggagaatactctgctataataatataaaattaagaagaaaaagtataaacgtaagatgctaaattccataaatgcatatttagtactatgttttttgtgggaaaagttctaaaagtttaaaatgcacaaagaaaatgaaaaatactaatataaaaatttgtgctttaatctagtcaaactaaatcctttctaatttctgaatgaagtgttactgctgcaataaagtgacctgataagcctaaattttttgtgttcaatccagacacttttctgagagtctgaaaagaatacagagtcagaactctgtttttatctcctcatcctgtttttgataagactcagaaaattctcaaattcgaaaggttctggcatttgaggccaaaaaaagcatgaaagggagtaacattcctttttatagatactctagattggatactattgtaacagatggccaagaaacttccagaaacattttggttaaattttattgcaatggatattgctgggatccatccatttaagcagtaatataccacccagattattgatactttatgcaagatgtgttcatctctttgatcatatttacaatgcttactccatagccctgctacaagacttaaaatttccactgaaaattgcatagttcttgtattaagattcaaattctggctgggcgcagtggctcacgcttgtaatcccagcactttgggaggctgaggcaggcggattgcctgagctcaggagttcgcaaccagcctgggaaacacggtgaagctccatctctactaaaatacaaaaaaattagccaggcgtgtcggcatgcacctgtagtcccagctactcgggaagctgaggcaggagaagaatccaggaggcagaggttgcagtgaggcgagattgcgccactgcactccagcctgggcgacagagcgagactccatctcaaaaaaaaaaaaaaaaagtaaaagtacacacagtttaaaagtaaacatgtttacttcggataattctaatccttttagctgcatttaagaatattttaatttatacgaatgttacttgaaattggcctatgtccagatgacttttgatgttaaatcaatggaaaactgaatagaaaatatgacacgagatcggggagggggaaggcaacctatagcatgggtggctctgaggagttcctgctggtgcactttcatgccctttcttatgtaccttttgtcttactcttcttacattattcttatcctcatcattttttcatttccctttacttcctcctatccttcaaaaacctcctgaagagtccattaacatccatgcttagttccactggttgcatggctgtatttcctactgatccctgtagtttcactgaatggatccccacccaatttcgtgtatcctggtgaatggctttctctcagccttcgacttagttctaatgatctacattgaatttaaattacatgactgaaatatttaagggaagaaataaatttcatacaaattagtatcttttatgctaacatttaaaactgtatttaaatttttaaggtaaatgctttggggaaaaaaaaaaccattgccaagtctttagcatattttcagagagcgtaattttttactttgatttccagtttcactaaggtttcattaaatcttagttccgagagcccagcatgaagggtgactgggaatgtagtgtgcctctctgatgcagttcctaatgattgttcttcagggaccttccttaggttaggttacattttctggtgaatggtgttagagtaaattcccagagtttagagatacaagtagaaatgcataagctaattagctccaattttataatatgtaaacaatttaaacaagtatttaaaactttttaggaagtctctaacactgaaaaaaaggtcattgttgctggtataaacattaaggagcaacttttacattaggtcaaagattgttgcttttccagtgtgttgtcttaaaaatagaaggaaataaaactattaccttctttttacatctatatgtttttataatttgaaaggcaagtagtatcttggtgaataagaaatgcatcatccataacaatttaattaactcttaaaaagaccagctttttgtcttgttatgaaaacaaaacgcaatttgtcattcataatggtaatgtggaataagaatacatcgtagaaggaagacttgctactttactgacttaatcattagttctaaggccatgtgtggcggctcacgcctgtaatcccagcactttgggagtccaaggcggtaggatcaccagagcccagggttcaagactcagcctgggcaacatagtgagatttcgtctctacaaaaaaaatttagccagcttggtggcacatgcctgtagtcccagctactcaggaggctgaggcaagaggattgcttgagcatagcaggtcaagtctgcagtgagctgtggttgcaccactgcactccagcctgggtgacaaaatgagaccttgtctacaaaaaggaaaaaaaaatttgttctgctctactatacatgctgacttttgttgatagcttggtctaaaaagactgtctagagctgaatttaagaatggttctggagcaaataataacaaggtagacaagcaggccctgggctcactataatttcatagccacgacctgtttattattagttggcagagattaatgctttgtgttataaatatactatagaacaataggtcacgattctcaagaacaaagccgaatgctcgcagttaagtgtgaagcttgcataagtgtcggaaccacaattatggacccaccatcaatgtgcattttatcagatgactcctcctgagacagtaaagactcctggaaaattcatgacatctttgaatcactcagaaaaatcttgaaactcaggacgtagtttacttagcttgccttttttaaaattatcaaattttaaatcgtaaactttgtcttcacttccacacgttcaaggacacctcttttaaagttcagtgttccatactaaaggggtgtaatcttgctttctggggaaataaaattccccatggtactatattcctgacagatataaaataacatgaggctacctcatttttgaaatagatttcaatatttttattagtaagttggaaagacagtaggaacaaaatgaaacctttctaagtacttgatgacacccacttgatcatgacaattcatctacctccgctttccgtgtccagctgaaagcccagctgagtcaactcctgcttcatcagaagggagctaatggtgattctgggattaaaaagcaaggggggtgcaaattgttagtggggtcaaaatatcagtaaaatttcttaagtgctttgttctgataaacggatgtaaaagtaacaaaaaaggaataacaactaatatggcctgtggatctgacaaagaaaaacctgaagaaattcagaatctagatacacttagattctaaattagacacactcagattctaatgaacacttagaatgcttcgccagtggcttttcaagttacactggaagcttgattatgaaaaagttttgttttcattggcaagagggtagatgatcagtgatgacagattgtacagctgtgcccaaacctgacaacttacacattaaactcctgtaagagacactccttcctagtagaacaaggactgggacaatgaatttttgactcactggagttttttaaaatgctgttcttgagtgtggcaatagtgtaggagttaacccagtctacccaaagaagttgctttgcctttcaatatgagtgctataaaaagagtattttggagttcaatgtccctaaacatgtatgcgataggaactaccaatataaaataacacttagaactcaaattagattggtaatactattttggagcctgtgatgtatgacttttattctttactagatatttttcagtatccgtcattagaagagtcagtttgttaaatattttaaatgtgtaaacacaaaacctttctactgtgatcttccctaatgagtcaaagtatctttcataattcagtctatattgaaatgttatttcaggaatggagggtttgttattaatagtgctgggccgggcacggtgactcatgcctgtaatcccagcactttgggaggccgagacaggcgaatcacctgaggtcagatgttggagaccagcctgaccaacatggagaaaccccatctctaccaaaaatacaaaattagccgggcgtggtggctccatgctgtaatcccagctactcgggaggctgaggcaggagaattgcttgaacccaggaggtggaggttgcagtgagccaagattgcaccatagcactccagcctgggcaacaagagcaaaactctgtctcaaaaaaaaaaaaaaaaaaaatagtgctgcattttgaccctggactatgaacagactgtatagttggtgcctcttttttttctaccaaagattattagatcaagattggtgctatacttcatgttcctttcaaaattatttttcttttaaaaatattaatatacaacacaatagaaaatgtatacagccagcaacgttatgcatgttgcatgttatatacatgactgaggaaaaaagctcacctatacagtgattattgagttccagtatctagttagaggtatgcaatttttgttaacatataagactttaaattacgaaactcacaagaaaatgatcaccaaatgagaatgttctaatgaacacaacctcccaaggtaataattttaaagaaaaagtcccttgtcaatgtttctagcacaaagtgagggatttaaatatattctgtaactttgaggcaatgtgaaaaagttatatataatagcttcctattgagctggcttatgtagacatttggacatttgaaactatttcgcaactttcaggctaaaatcagagttttgagagtcatcaatcttaaaacatggataatgagttatttgcacagttatatttttataattatttgaaatttatcactgaaagtatcattgtttgtctttcagatttaacataaacaataagtactgcggctgggtcactgtcagcaaatctcaggtctatgatttatcaagggctctcagcaccatcgttggtctgattgtgtaacacctaagtaaaataacatatgggtctccttggccaggcgccgtggctcacacctgtaatcccagcactttgggaggccaaggcaggcggattgcttgaggccaggagttcgagacatacgggtctctttaatgttctgtaggtaggattcagatgaattgagaatgacaggtttctttttctttctttgtttcttttttttttttttttttgagatggagtcttgctctattgccaggctccatatagtggcgcgatctcagctcactgcaacctccgcctcccgggctcaagtgattctcgtgcctcagtcttctgagtagctgggactacaggtgcccactaccacaccggctaatttttgtatttttggtagagatggagtttcaccatgttggccagactggccttaagtgatccacctgcctcagcctccccaagtgctggaattacaggcatgagccaccatgcccggctagagaatgacaggtttcagttgaattcttctcttttaaaagaccctgacttaactgtattttatgaggattttataaatgtaaattaagaagacaatacacactctcattttcctaattagaaagactatgcattcacaatccagtacactggatttgctctggtaactaatgataacacttttctacgttaacatgagttatatttggcagagagaatggaagcttgctaatcagaagttacattagggtgagattaaacatcactctaataataacttctgatgtaacttaatgtggtttgagatgtgtaagattgtagaggcattgcacaatgcttgataaaagttgcattttgcttttgttcttccaccagtttattttagccttaaagttatagctacaacaaattgaaccctgtagttattactgaaagagagtgtggatattttaagtatctcctagtataatatgacattgttcatgtggacttattttaatgtttatttgaaaattaattttttaattattttgtatattttgagttagaaaaacacactttatcttagacaccaaagccaaattattccaagtgtatgctatacaccgcagtgcagctctgcttctctcccaacctaccctggggccatttttggcacaatagttgttcaaatgtagatcactatgctgaatgctcatgctggatttgaccagtatgcagtattttagtactttttaaaaaatgtatgcttctttttgaagactataatttacaatttttttaataatgtgcaatttaatatagataaccaaaatctttttaatgaaaagatctttacaattgcttggaggataagattattttactgtggaaaaatgtgatactcttagtaaatgcaataaaaactttttagcaaattcc

SEQ ID NO: 182946 - DNA, 2508 bp, Homo sapiens
  Payload ID: 16042
  Gene Symbol: SLC16A10
  Gene Name: solute carrier family 16 (aromatic amino acid transporter), member 10
  Uniprot ID: Q8TF71
  ENST ID: ENST00000368851
  CDS Start-End: 176-1723
gcggccgcctgcgcgctggccgcctgcgcgctgccagcccgcccgcccgccaggggctccgccgccctcgcctcggcctcgttagcccgccaggagccccgcagctcctccgggagcccgctggtaactcgcgtccctcgcgcttctccggcgcctgaggggcccgcctcgggccatggtgctctcccaggaggagccggactccgcgcggggcacgagcgaggcgcagccgctcggccccgcgcccacgggggccgctccgccgcccggcccgggaccctcggacagccccgaggcggctgtcgagaaggtggaggtggagctggcggggccggcgaccgcggagccccatgagccccccgaaccccccgagggcggctggggctggctggtgatgctggcggccatgtggtgcaacgggtcggtgttcggcatccagaacgcttgcggggtgctcttcgtgtccatgctggaaaccttcggctccaaagacgatgacaagatggtctttaagacagcatgggtaggttctctctccatggggatgattttcttttgctgcccaatagtcagcgtcttcacagacctatttggttgtcggaaaacagctgtcgtgggtgctgctgttggatttgttgggctcatgtccagttcttttgtaagttccatcgagcctctgtaccttacctatggaatcatatttgcctgcggctgctcctttgcataccagccttcattggtcattttgggacactatttcaagaagcgccttggactggtgaatggcattgtcactgctggcagcagtgtcttcacaatcctgctgcctttgctcttaagggttctgattgacagcgtgggcctcttttacacattgagggtgctctgcatcttcatgtttgttctctttctggctggctttacttaccgacctcttgctaccagtaccaaagataaagagagtggaggtagcggatcctccctcttttccaggaaaaagttcagtcctccaaaaaaaattttcaattttgccatcttcaaggtgacagcttatgcagtgtgggcagttggaataccacttgcactttttggatactttgtgccttatgttcacttgatgaaacatgtaaatgaaagatttcaagatgaaaaaaataaagaggttgttctcatgtgcattggcgtcacttcaggagttggacgactgctctttggccggattgcagattatgtgcctggtgtgaagaaggtttatctacaggtactctcctttttcttcattggtctgatgtccatgatgattcctctgtgtagcatctttggggccctcattgctgtgtgcctcatcatgggtctcttcgatggatgcttcatttccattatggctcccatagcctttgagttagttggtgcccaggatgtctcccaagcaattggatttctgctcggattcatgtctatacccatgactgttggcccacccattgcagggttacttcgtgacaaactgggctcctatgatgtggcattctacctcgctggagtccctccccttattggaggtgctgtgctttgttttatcccgtggatccatagtaagaagcaaagagagatcagtaaaaccactggaaaagaaaagatggagaaaatgttggaaaaccagaactctctgctgtcaagttcatctggaatgttcaagaaagaatctgactctattatttaatatcttacatacctccaccagactggacttgctttttgaattttaagcaagtttcctttccttttatacaaattgcaaatttcatatttttttaatcacatcctaggaatagcacaataattgggaaatagaacccttatcactagaagaaccattttctgccactaaatatctctgatgtttccatgagtctgagggcagagactctggtatatgaaaacgtctgaaagtcacatattgtgaaaatttgaagctatctcagtaaaaagcagctttggaaactgtgaatgatctttagcttgtacaaatgtttaaaaatacctcaggctatactgaaagggttgcagtttggttaggagtggaaatattttgtttgttaatgatgtcttcagttctggtacctctgttttactttcttatgctctttggaaactttttgcaaaatttaagcctgggttctagataataccagatctacctaaacctcaagtctatgttaaagttgctttcctgctgttaaataagctatgatattaagatattctgacttgctccagtgtcaagggaccttctgggagcaggtgctaacatagtgttcagaatcaatatgtgagatgaaaaggatcccctccaggaggatcctgagctgttcagaaatcatttaagtttacagcgttgttccctttgcgtttgcagtgcgttttactcaagtagccagaaacaccccacgtttctgaatttgtttaaactgtaacaataaagtaaaatagaatgcatgaaagata

SEQ ID NO: 182947 - DNA, 646 bp, Homo sapiens
  Payload ID: 16042
  Gene Symbol: SLC16A10
  Gene Name: solute carrier family 16 (aromatic amino acid transporter), member 10
  ENST ID: ENST00000439288
  CDS Start-End: 1-620
catgggtaggttctctctccatggggatgattttcttttgctgcccaatagtcagcgtcttcacagacctatttggttgtcggaaaacagctgtcgtgggtgctgctgttggatttgttgggctcatgtccagttcttttgtaagttccatcgagcctctgtaccttacctatggaatcatatttgcctgcggctgctcctttgcataccagccttcattggtcattttgggacactatttcaagaagcgccttggactggtgaatggcattgtcactgctggcagcagtgtcttcacaatcctgctgcctttgctcttaagggttctgattgacagcgtgggcctcttttacacattgagggtgctctgcatcttcatgtttgttctctttctggctggctttacttaccgacctcttgctaccagtaccaaagataaagagagtggaggtagcggatcctccctcttttccaggaaaaagttcagtcctccaaaaaaaattttcaattttgccatcttcaaggtgacagcttatgcagtgtgggcagttggaataccacttgcactttttggatactttgtgccttatgttcacttggtgagtatgctccttcactgatcatgaatattactatttaataaaga

SEQ ID NO: 182948 - DNA, 912 bp, Homo sapiens
  Payload ID: 16042
  Gene Symbol: SLC16A10
  Gene Name: solute carrier family 16 (aromatic amino acid transporter), member 10
  ENST ID: ENST00000419619
  CDS Start-End: 1-635
catgggtaggttctctctccatggggatgattttcttttgctgcccaatagtcagcgtcttcacagacctatttggttgtcggaaaacagctgtcgtgggtgctgctgttggatttgttgggctcatgtccagttcttttgtaagttccatcgagcctctgtaccttacctatggaatcatatttgcctgcggctgctcctttgcataccagccttcattggtcattttgggacactatttcaagaagcgccttggactggtgaatggcattgtcactgctggcagcagtgtcttcacaatcctgctgcctttgctcttaagggttctgattgacagcgtgggcctcttttacacattgagggtgctctgcatcttcatgtttgttctctttctggctggctttacttaccgacctcttgctaccagtaccaaagataaagagagtggaggtagcggatcctccctcttttccaggaaaaagttcagtcctccaaaaaaaattttcaattttgccatcttcaaggtgacagcttatgcagtgtgggcagttggaataccacttgcactttttggatactttgtgccttatgttcacttggcaaaattcagctttgttatactgaaatacgaataattaatgtctagactggggttggtgcctcacgcctgtaatcccaccactttggggggctgatgcaggagttcaagaccagcgtgggcaacataaggagacttcatccctacctggggaaggaaaaaaaaaaaagaaggaagaagcagtgtctaaagtatctgcccctggcaacgtttgttcaaaagtgttcattatgtttcttccttttttcttttgtggctgaaaatgtatttacaattcaccgtaaatgataaaaatggcattggcacacatattt

SEQ ID NO: 182949 - DNA, 1231 bp, Homo sapiens
  Payload ID: 16042
  Gene Symbol: SLC16A10
  Gene Name: solute carrier family 16 (aromatic amino acid transporter), member 10
  ENST ID: ENST00000612036
  CDS Start-End: 251-1231
agtcgggggtgcggggctgtgacctagaggcttcagtgtcgatccccgaggtgttcgcgcgcgccagctgtcctcgcggccgcctgcgcgctggccgcctgcgcgctgccagcccgcccgcccgccaggggctccgccgccctcgcctcggcctcgttagcccgccaggagccccgcagctcctccgggagcccgctggtaactcgcgtccctcgcgcttctccggcgcctgaggggcccgcctcgggccatggtgctctcccaggaggagccggactccgcgcggggcacgagcgaggcgcagccgctcggccccgcgcccacgggggccgctccgccgcccggcccgggaccctcggacagccccgaggcggctgtcgagaaggtggaggtggagctggcggggccggcgaccgcggagccccatgagccccccgaaccccccgagggcggctggggctggctggtgatgctggcggccatgtggtgcaacgggtcggtgttcggcatccagaacgcttgcggggtgctcttcgtgtccatgctggaaaccttcggctccaaagacgatgacaagatggtctttaagacagcatgggtaggttctctctccatggggatgattttcttttgctgcccaatagtcagcgtcttcacagacctatttggttgtcggaaaacagctgtcgtgggtgctgctgttggatttgttgggctcatgtccagttcttttgtaagttccatcgagcctctgtaccttacctatggaatcatatttgcctgcggctgctcctttgcataccagccttcattggtcattttgggacactatttcaagaagcgccttggactggtgaatggcattgtcactgctggcagcagtgtcttcacaatcctgctgcctttgctcttaagggttctgattgacagcgtgggcctcttttacacattgagggtgctctgcatcttcatgtttgttctctttctggctggctttacttaccgacctcttgctaccagtaccaaagataaagagagtggaggtagcggatcctccctcttttccaggaaaaagttcagtcctccaaaaaattttcaattttgccatcttcaaggtgacagcttatgcagtgtgggcagttggaataccacttgcactttttggatactttgtgccttatgttcacttggtgagtatgctccttcactgatcatgaatattactatttaa

SEQ ID NO: 182950 - DNA, 3910 bp, Homo sapiens
  Payload ID: 16043
  Gene Symbol: SLC16A1
  Gene Name: solute carrier family 16 (monocarboxylate transporter), member 1
  Uniprot ID: P53985
  ENST ID: ENST00000369626
  CDS Start-End: 364-1866
agagggcgcgcgcggctgaaagcgtgtggaggcgcgggctgcagttcggatgtctgtgtggcggggagggggcggcggccgggagagacgactccgccccctgcgcgcatgctccggccccggcgggttataaggcagcctcgctggcccggccagacaaagtggtgagctgcgacgtgactggctagctgcgtgggtactggaacaagcaaacgaggcagcgagcgaaggacgggagccggaccctgggccccgtggaactccagcctgcgccaccacgtcacgcacacgctcggcgctgcgatccgcgcatataacgatatttggatttgacctgcattttggaatttatctacacttaaaatgccaccagcagttggaggtccagttggatacacccccccagatggaggctggggctgggcagtggtaattggagctttcatttccatcggcttctcttatgcatttcccaaatcaattactgtcttcttcaaagagattgaaggtatattccatgccaccaccagcgaagtgtcatggatatcctccataatgttggctgtcatgtatggtggaggtcctatcagcagtatcctggtgaataaatatggaagtcgtatagtcatgattgttggtggctgcttgtcaggctgtggcttgattgcagcttctttctgtaacaccgtacagcaactatacgtctgtattggagtcattggaggtcttgggcttgccttcaacttgaatccagctctgaccatgattggcaagtatttctacaagaggcgaccattggccaacggactggccatggcaggcagccctgtgttcctctgtactctggcccccctcaatcaggttttcttcggtatctttggatggagaggaagctttctaattcttgggggcttgctactaaactgctgtgttgctggagccctcatgcgaccaatcgggcccaagccaaccaaggcagggaaagataagtctaaagcatcccttgagaaagctggaaaatctggtgtgaaaaaagatctgcatgatgcaaatacagatcttattggaagacaccctaaacaagagaaacgatcagtcttccaaacaattaatcagttcctggacttaaccctattcacccacagaggctttttgctatacctctctggaaatgtgatcatgttttttggactctttgcacctttggtgtttcttagtagttatgggaagagtcagcattattctagtgagaagtctgccttccttctttccattctggcttttgttgacatggtagcccgaccatctatgggacttgtagccaacacaaagccaataagacctcgaattcagtatttctttgcggcttccgttgttgcaaatggagtgtgtcatatgctagcacctttatccactacctatgttggattctgtgtctatgcgggattctttggatttgccttcgggtggctcagctccgtattgtttgaaacattgatggaccttgttggaccccagaggttctccagcgctgtgggattggtgaccattgtggaatgctgtcctgtcctcctggggccaccacttttaggtcggctcaatgacatgtatggagactacaaatacacatactgggcatgtggcgtcgtcctaattatttcaggtatctatctcttcattggcatgggcatcaattatcgacttttggcaaaagaacagaaagcaaacgagcagaaaaaggaaagtaaagaggaagagaccagtatagatgttgctgggaagccaaatgaagttaccaaagcagcagaatctccggaccagaaagacacagatggagggcccaaggaggaggaaagtccagtctgaatccatggggctgaagggtaaattgagcagttcatgacccaggatatctgaaaatattctactggcctgtaatctaccagtggtgctcaatgcaaatagtagacatttgtgtggaaatcataccagttgttcattgatgggatttttgtttgactccttaccaatagcctgaatttgaggagggaatgattggtagcaaaggatgggggaaagaagtaggttctgttttgttttgttttaatcttagcttttaatagtgtcataaagattataatatgtgccttaagttttagtctttagaactctagagagccttaacttcttaaaccatttttgctgaattcatctatttcgagtgttgtgttaaaaggaaaaataacaactaacttgtttgaggcaaatctaaaatttaaaattaatcttgcttcattgttacatgtaatatatttcagacattttcactggaagatttatgaacagaaatattggttgaaagttagagattttacaaaatgctgacaaaaatattttcctagcatcagtagatttctggcatatgtttctgctagctatatatttaggaaattcaaagcataaaactttggcaacatcttggctgttctagacacagtgtacttgtcaacccctctcaggtaccttttcttgggatgcttattagaagccaagtaaagtgcttaaggtttgttttcattaaattagctatttctgctcccctgttcaaagatgcattttgagtgtttatagatcactgccctttttgaaatcacctggtattatttttcttactggaaaagttagtattaaaatctacagaactacatatttgtgcctccttggtaaatacaacacatctaattaaatgtagacagatatttcaaacatcagctgaattcacttaagtttttccaaaacctcagttaaactgtgaagctattggaatttttttttcctggaatttttcccctttgattcacagtggtcccatttatatctgcttctagcttagtgctatgtgtgagatatgtgtgtgtttggtgtttttgtttttttgtttttttttttttaaggtttgcaaattaaaaagggccagaaaaatttggcaccaggcaaacgaataaagataggattgggaaagaagttgctaagtgtgcttagttttaataagtaattccttctcttttttcagagaaggccttacagaaaattgttgtgcttagaattgctggatgcatttttaccctccacacaaacctaaaaattttgtgacccctttcacttacctgaaaagtagagaaatggattcagtataaggataaggagggaaggtggaccagaatgaaaactgtaaatatttttttaacctaatatcacttaaatcgaggcagaaagatacagacattcaatgaattatattcaatgcatttaaaataccactgtaattgacagagtaaaagtatagatacaaaaccttgtgtaagaggctgacttttccaaataaacattttttaagaaaacatttcttctcccaaatgtctattttcttgaggaaaatattgctgtgtcttcattttcattaccaggtttcattttgggccttgctaaattgattgaattaaatcctccagcttttgaaccttgatatttgtgtatatgatttattttcatttgaatttctcctttcctcttctttgctgtaaggcaaggaggaggggaattttaaaaccatcttatttgaactgagagcatccagagcagttaaccttaaggaaacaatgaaaaactccctttgtatgcctgggcatcatggcagatagaggaagagtgttagaggagaaaactgctgctgagagtattggcaggcttggcctcagtttggactctgtaattttctttggacccaagtctgtaacctctgcgtacttcttctctcttaccttctataaaaatgaggattactgttggtgagggaataaggaatgtaagtaaaggaaatctgaaaaaataaaagtaaagcaagtataaa

SEQ ID NO: 182951 - DNA, 865 bp, Homo sapiens
  Payload ID: 16043
  Gene Symbol: SLC16A1
  Gene Name: solute carrier family 16 (monocarboxylate transporter), member 1
  ENST ID: ENST00000429288
  CDS Start-End: 220-865
tccacgtggccgaggtgcacaccccaacccactgggccagtctccccaccctcttacctgctcttctttcccgactcgtctttaatacccaccaggcgccaaccgccgcgggcctggctctatggtggcaagttgcatgggttctcccatcaggacctcccgatgagcctacgagatatttggatttgacctgcattttggaatttatctacacttaaaatgccaccagcagttggaggtccagttggatacacccccccagatggaggctggggctgggcagtggtaattggagctttcatttccatcggcttctcttatgcatttcccaaatcaattactgtcttcttcaaagagattgaaggtatattccatgccaccaccagcgaagtgtcatggatatcctccataatgttggctgtcatgtatggtggaggtcctatcagcagtatcctggtgaataaatatggaagtcgtatagtcatgattgttggtggctgcttgtcaggctgtggcttgattgcagcttctttctgtaacaccgtacagcaactatacgtctgtattggagtcattggaggtcttgggcttgccttcaacttgaatccagctctgaccatgattggcaagtatttctacaagaggcgaccattggccaacggactggccatggcaggcagccctgtgttcctctgtactctggcccccctcaatcaggttttcttcggtatctttggatggagaggaagctttctaattcttgggggcttgctactaaactgctgtgttgctggagccctcatgcgaccaatcgggcccaagccaaccaaggcagggaaagataagtctaaagcatcccttgaga

SEQ ID NO: 182952 - DNA, 1099 bp, Homo sapiens
  Payload ID: 16043
  Gene Symbol: SLC16A1
  Gene Name: solute carrier family 16 (monocarboxylate transporter), member 1
  ENST ID: ENST00000443580
  CDS Start-End: 210-1099
tccagaatgaagttcagagaaacaaaggaatgaatgataacatgacaacatagaagggagagtaagagagtagatagcatgggaaggtccaacccatatccagttggagtctgagaaaagtgaaaagagagaatgggggagaagcaatatttgaagacataatagatatttggatttgacctgcattttggaatttatctacacttaaaatgccaccagcagttggaggtccagttggatacacccccccagatggaggctggggctgggcagtggtaattggagctttcatttccatcggcttctcttatgcatttcccaaatcaattactgtcttcttcaaagagattgaaggtatattccatgccaccaccagcgaagtgtcatggatatcctccataatgttggctgtcatgtatggtggaggtcctatcagcagtatcctggtgaataaatatggaagtcgtatagtcatgattgttggtggctgcttgtcaggctgtggcttgattgcagcttctttctgtaacaccgtacagcaactatacgtctgtattggagtcattggaggtcttgggcttgccttcaacttgaatccagctctgaccatgattggcaagtatttctacaagaggcgaccattggccaacggactggccatggcaggcagccctgtgttcctctgtactctggcccccctcaatcaggttttcttcggtatctttggatggagaggaagctttctaattcttgggggcttgctactaaactgctgtgttgctggagccctcatgcgaccaatcgggcccaagccaaccaaggcagggaaagataagtctaaagcatcccttgagaaagctggaaaatctggtgtgaaaaaagatctgcatgatgcaaatacagatcttattggaagacaccctaaacaagagaaacgatcagtcttccaaacaattaatcagttcctggacttaaccctattcacccacagaggctttttgctatacctctctggaaatgtgatcatgttttttggactctttgcacctttggtgtttcttagtagttatgggaagagtcagcattattctagtgagaa

SEQ ID NO: 182953 - DNA, 2201 bp, Homo sapiens
  Payload ID: 16043
  Gene Symbol: SLC16A1
  Gene Name: solute carrier family 16 (monocarboxylate transporter), member 1
  ENST ID: ENST00000458229
  CDS Start-End: 833-2201
gctcggcgctgcgatccgcgcatataacggttagttgggtaacagccggcggcacgcggcgcggaccccacggtgccctcgctgccctggtggggtcggaggggacctccggggttgggagactttgtctccggcggagggaggcggcccagcagagggcatcgtggtcacaggcagccgcgtggcctcggactgcagtgctggtgaaggagaccttgaggcgctggggtcagcgcctctcttagccgagccgcgggccccgtgctaagatgccggtcccaggcctggccgaggagttgggtcgtggtgcccggtgacggtggggaagtcccttcccccctaagtcttcaataggctcctcgagagatgctttgatctggaaaagggataacatgaggctgctgcatgtggtacctccagactctcctggccgcttctgccccaagggaagggactcggggcagaagttatttatgattcgtgacattgtccgccccaaccttcttggcccgccgatccttgccccacctggtgacttgcgagagtggtgcggagagccgcattccccacagccaaggcgtgactgcagggttcgagtagactttgcggaggggacggggcagcccgcagactcctgggagtggtgctgacgggggctctttgtcattcaacctgtggctgccagcgtccgccgcagcgcccttctactcatggacttaaggcggccctgttgagagaaatctggaggatagcgttacacttggtccgatgcaagttttttgttccaaatatttggatttgacctgcattttggaatttatctacacttaaaatgccaccagcagttggaggtccagttggatacacccccccagatggaggctggggctgggcagtggtaattggagctttcatttccatcggcttctcttatgcatttcccaaatcaattactgtcttcttcaaagagattgaaggtatattccatgccaccaccagcgaagtgtcatggatatcctccataatgttggctgtcatgtatggtggaggtcctatcagcagtatcctggtgaataaatatggaagtcgtatagtcatgattgttggtggctgcttgtcaggctgtggcttgattgcagcttctttctgtaacaccgtacagcaactatacgtctgtattggagtcattggaggtcttgggcttgccttcaacttgaatccagctctgaccatgattggcaagtatttctacaagaggcgaccattggccaacggactggccatggcaggcagccctgtgttcctctgtactctggcccccctcaatcaggttttcttcggtatctttggatggagaggaagctttctaattcttgggggcttgctactaaactgctgtgttgctggagccctcatgcgaccaatcgggcccaagccaaccaaggcagggaaagataagtctaaagcatcccttgagaaagctggaaaatctggtgtgaaaaaagatctgcatgatgcaaatacagatcttattggaagacaccctaaacaagagaaacgatcagtcttccaaacaattaatcagttcctggacttaaccctattcacccacagaggctttttgctatacctctctggaaatgtgatcatgttttttggactctttgcacctttggtgtttcttagtagttatgggaagagtcagcattattctagtgagaagtctgccttccttctttccattctggcttttgttgacatggtagcccgaccatctatgggacttgtagccaacacaaagccaataagacctcgaattcagtatttctttgcggcttccgttgttgcaaatggagtgtgtcatatgctagcacctttatccactacctatgttggattctgtgtctatgcgggattctttggatttgccttcgggtggctcagctccgtattgtttgaaacattgatggaccttgttggaccccagaggttctccagcgctgtgggattggtgaccattgtggaatgctgtcctgtcctcctggggccaccacttttaggtcggctcaatgacatgtatggagactacaaatacacatactgggcatgtggcgtcgtcctaattatttcaggtatctatctcttcattggcatgggcatcaattatcgacttttggcaaaagaacagaaagcaaacgagc

SEQ ID NO: 182954 - DNA, 4374 bp, Homo sapiens
  Payload ID: 16043
  Gene Symbol: SLC16A1
  Gene Name: solute carrier family 16 (monocarboxylate transporter), member 1
  Uniprot ID: P53985
  ENST ID: ENST00000538576
  CDS Start-End: 833-2335
gctcggcgctgcgatccgcgcatataacggttagttgggtaacagccggcggcacgcggcgcggaccccacggtgccctcgctgccctggtggggtcggaggggacctccggggttgggagactttgtctccggcggagggaggcggcccagcagagggcatcgtggtcacaggcagccgcgtggcctcggactgcagtgctggtgaaggagaccttgaggcgctggggtcagcgcctctcttagccgagccgcgggccccgtgctaagatgccggtcccaggcctggccgaggagttgggtcgtggtgcccggtgacggtggggaagtcccttcccccctaagtcttcaataggctcctcgagagatgctttgatctggaaaagggataacatgaggctgctgcatgtggtacctccagactctcctggccgcttctgccccaagggaagggactcggggcagaagttatttatgattcgtgacattgtccgccccaaccttcttggcccgccgatccttgccccacctggtgacttgcgagagtggtgcggagagccgcattccccacagccaaggcgtgactgcagggttcgagtagactttgcggaggggacggggcagcccgcagactcctgggagtggtgctgacgggggctctttgtcattcaacctgtggctgccagcgtccgccgcagcgcccttctactcatggacttaaggcggccctgttgagagaaatctggaggatagcgttacacttggtccgatgcaagttttttgttccaaatatttggatttgacctgcattttggaatttatctacacttaaaatgccaccagcagttggaggtccagttggatacacccccccagatggaggctggggctgggcagtggtaattggagctttcatttccatcggcttctcttatgcatttcccaaatcaattactgtcttcttcaaagagattgaaggtatattccatgccaccaccagcgaagtgtcatggatatcctccataatgttggctgtcatgtatggtggaggtcctatcagcagtatcctggtgaataaatatggaagtcgtatagtcatgattgttggtggctgcttgtcaggctgtggcttgattgcagcttctttctgtaacaccgtacagcaactatacgtctgtattggagtcattggaggtcttgggcttgccttcaacttgaatccagctctgaccatgattggcaagtatttctacaagaggcgaccattggccaacggactggccatggcaggcagccctgtgttcctctgtactctggcccccctcaatcaggttttcttcggtatctttggatggagaggaagctttctaattcttgggggcttgctactaaactgctgtgttgctggagccctcatgcgaccaatcgggcccaagccaaccaaggcagggaaagataagtctaaagcatcccttgagaaagctggaaaatctggtgtgaaaaaagatctgcatgatgcaaatacagatcttattggaagacaccctaaacaagagaaacgatcagtcttccaaacaattaatcagttcctggacttaaccctattcacccacagaggctttttgctatacctctctggaaatgtgatcatgttttttggactctttgcacctttggtgtttcttagtagttatgggaagagtcagcattattctagtgagaagtctgccttccttctttccattctggcttttgttgacatggtagcccgaccatctatgggacttgtagccaacacaaagccaataagacctcgaattcagtatttctttgcggcttccgttgttgcaaatggagtgtgtcatatgctagcacctttatccactacctatgttggattctgtgtctatgcgggattctttggatttgccttcgggtggctcagctccgtattgtttgaaacattgatggaccttgttggaccccagaggttctccagcgctgtgggattggtgaccattgtggaatgctgtcctgtcctcctggggccaccacttttaggtcggctcaatgacatgtatggagactacaaatacacatactgggcatgtggcgtcgtcctaattatttcaggtatctatctcttcattggcatgggcatcaattatcgacttttggcaaaagaacagaaagcaaacgagcagaaaaaggaaagtaaagaggaagagaccagtatagatgttgctgggaagccaaatgaagttaccaaagcagcagaatctccggaccagaaagacacagatggagggcccaaggaggaggaaagtccagtctgaatccatggggctgaagggtaaattgagcagttcatgacccaggatatctgaaaatattctactggcctgtaatctaccagtggtgctcaatgcaaatagtagacatttgtgtggaaatcataccagttgttcattgatgggatttttgtttgactccttaccaatagcctgaatttgaggagggaatgattggtagcaaaggatgggggaaagaagtaggttctgttttgttttgttttaatcttagcttttaatagtgtcataaagattataatatgtgccttaagttttagtctttagaactctagagagccttaacttcttaaaccatttttgctgaattcatctatttcgagtgttgtgttaaaaggaaaaataacaactaacttgtttgaggcaaatctaaaatttaaaattaatcttgcttcattgttacatgtaatatatttcagacattttcactggaagatttatgaacagaaatattggttgaaagttagagattttacaaaatgctgacaaaaatattttcctagcatcagtagatttctggcatatgtttctgctagctatatatttaggaaattcaaagcataaaactttggcaacatcttggctgttctagacacagtgtacttgtcaacccctctcaggtaccttttcttgggatgcttattagaagccaagtaaagtgcttaaggtttgttttcattaaattagctatttctgctcccctgttcaaagatgcattttgagtgtttatagatcactgccctttttgaaatcacctggtattatttttcttactggaaaagttagtattaaaatctacagaactacatatttgtgcctccttggtaaatacaacacatctaattaaatgtagacagatatttcaaacatcagctgaattcacttaagtttttccaaaacctcagttaaactgtgaagctattggaatttttttttcctggaatttttcccctttgattcacagtggtcccatttatatctgcttctagcttagtgctatgtgtgagatatgtgtgtgtttggtgtttttgtttttttgtttttttttttttaaggtttgcaaattaaaaagggccagaaaaatttggcaccaggcaaacgaataaagataggattgggaaagaagttgctaagtgtgcttagttttaataagtaattccttctcttttttcagagaaggccttacagaaaattgttgtgcttagaattgctggatgcatttttaccctccacacaaacctaaaaattttgtgacccctttcacttacctgaaaagtagagaaatggattcagtataaggataaggagggaaggtggaccagaatgaaaactgtaaatatttttttaacctaatatcacttaaatcgaggcagaaagatacagacattcaatgaattatattcaatgcatttaaaataccactgtaattgacagagtaaaagtatagatacaaaaccttgtgtaagaggctgacttttccaaataaacattttttaagaaaacatttcttctcccaaatgtctattttcttgaggaaaatattgctgtgtcttcattttcattaccaggtttcattttgggccttgctaaattgattgaattaaatcctccagcttttgaaccttgatatttgtgtatatgatttattttcatttgaatttctcctttcctcttctttgctgtaaggcaaggaggaggggaattttaaaaccatcttatttgaactgagagcatccagagcagttaaccttaaggaaacaatgaaaaactccctttgtatgcctgggcatcatggcagatagaggaagagtgttagaggagaaaactgctgctgagagtattggcaggcttggcctcagtttggactctgtaattttctttggacccaagtctgtaacctctgcgtacttcttctctcttaccttctataaaaatgaggattactgttggtgagggaataaggaatgtaagtaaaggaaatctgaaaaaataaaagtaaagcaagt

SEQ ID NO: 182955 - DNA, 4374 bp, Homo sapiens; identical to SEQ ID NO: 182954
  Payload ID: 16043
  Gene Symbol: SLC16A1
  Gene Name: solute carrier family 16 (monocarboxylate transporter), member 1
  Uniprot ID: P53985
  ENST ID: ENST00000628110
  CDS Start-End: 833-2335

SEQ ID NO: 182956 - DNA, 865 bp, Homo sapiens; identical to SEQ ID NO: 182951
  Payload ID: 16043
  Gene Symbol: SLC16A1
  Gene Name: solute carrier family 16 (monocarboxylate transporter), member 1
  ENST ID: ENST00000626371
  CDS Start-End: 220-865

SEQ ID NO: 182957 - DNA, 3910 bp, Homo sapiens; identical to SEQ ID NO: 182950
  Payload ID: 16043
  Gene Symbol: SLC16A1
  Gene Name: solute carrier family 16 (monocarboxylate transporter), member 1
  Uniprot ID: P53985
  ENST ID: ENST00000630362
  CDS Start-End: 364-1866

SEQ ID NO: 182958 - DNA, 1099 bp, Homo sapiens; identical to SEQ ID NO: 182952
  Payload ID: 16043
  Gene Symbol: SLC16A1
  Gene Name: solute carrier family 16 (monocarboxylate transporter), member 1
  ENST ID: ENST00000629508
  CDS Start-End: 210-1099

SEQ ID NO: 182959 - DNA, 2201 bp, Homo sapiens; identical to SEQ ID NO: 182953
  Payload ID: 16043
  Gene Symbol: SLC16A1
  Gene Name: solute carrier family 16 (monocarboxylate transporter), member 1
  ENST ID: ENST00000629920
  CDS Start-End: 833-2201

SEQ ID NO: 182960 - DNA, 2074 bp, Homo sapiens
  Payload ID: 16044
  Gene Symbol: SLC16A3
  Gene Name: solute carrier family 16 (monocarboxylate transporter), member 3
  Uniprot ID: O15427
  ENST ID: ENST00000392339
  CDS Start-End: 155-1552
agtcagttaggtaacaggccacgggccccgggctcaggccactgcacggacccagggaacgggctgacagtccagcagaggcctcagcgaggcggcggcgctgcgcacaaacctgaggacctaggcgggtgaggcggaaccaaccctcctggccatgggaggggccgtggtggacgagggccccacaggcgtcaaggcccctgacggcggctggggctgggccgtgctcttcggctgtttcgtcatcactggcttctcctacgccttccccaaggccgtcagtgtcttcttcaaggagctcatacaggagtttgggatcggctacagcgacacagcctggatctcctccatcctgctggccatgctctacgggacaggtccgctctgcagtgtgtgcgtgaaccgctttggctgccggcccgtcatgcttgtggggggtctctttgcgtcgctgggcatggtggctgcgtccttttgccggagcatcatccaggtctacctcaccactggggtcatcacggggttgggtttggcactcaacttccagccctcgctcatcatgctgaaccgctacttcagcaagcggcgccccatggccaacgggctggcggcagcaggtagccctgtcttcctgtgtgccctgagcccgctggggcagctgctgcaggaccgctacggctggcggggcggcttcctcatcctgggcggcctgctgctcaactgctgcgtgtgtgccgcactcatgaggcccctggtggtcacggcccagccgggctcggggccgccgcgaccctcccggcgcctgctagacctgagcgtcttccgggaccgcggctttgtgctttacgccgtggccgcctcggtcatggtgctggggctcttcgtcccgcccgtgttcgtggtgagctacgccaaggacctgggcgtgcccgacaccaaggccgccttcctgctcaccatcctgggcttcattgacatcttcgcgcggccggccgcgggcttcgtggcggggcttgggaaggtgcggccctactccgtctacctcttcagcttctccatgttcttcaacggcctcgcggacctggcgggttctacggcgggcgactacggcggcctcgtggtcttctgcatcttctttggcatctcctacggcatggtgggggccctgcagttcgaggtgctcatggccatcgtgggcacccacaagttctccagtgccattggcctggtgctgctgatggaggcggtggccgtgctcgtcgggcccccttcgggaggcaaactcctggatgcgacccacgtctacatgtacgtgttcatcctggcgggggccgaggtgctcacctcctccctgattttgctgctgggcaacttcttctgcattaggaagaagcccaaagagccacagcctgaggtggcggccgcggaggaggagaagctccacaagcctcctgcagactcgggggtggacttgcgggaggtggagcatttcctgaaggctgagcctgagaaaaacggggaggtggttcacaccccggaaacaagtgtctgagtggctgggcggggccggcaggcacagggaggaggtacagaagccggcaacgcttgctatttattttacaaactggactggctcaggcagggccacggctgggctccagctgccggcccagcggatcgtcgcccgatcagtgttttgagggggaaggtggcggggtgggaaccgtgtcattccagagtggatctgcggtgaagccaagccgcaaggttacaaggcatcctcaccaggggccccgcctgctgctcccaggtggcctgcggccactgctatgctcaaggacctggaaacccatgcttcgagacaacgtgactttaatgggagggtgggtgggccgcagacaggctggcagggcaggtgctgcgtggggccctctccagcccgtcctaccctgggctcacatggggcctgtgcccacccctcttgagtgtcttggggacagctctttccacccctggaagatggaaataaacctgcgtgtgggtggagtgttaggaccaacggtttcctaggagt

SEQ ID NO: 182961 - DNA, 2086 bp, Homo sapiens
  Payload ID: 16044
  Gene Symbol: SLC16A3
  Gene Name: solute carrier family 16 (monocarboxylate transporter), member 3
  Uniprot ID: O15427
  ENST ID: ENST00000392341
  CDS Start-End: 167-1564
acctggggaaacggaagttcagggagggcgaggccgtgccccacatccaggcagcgcaggccgcgggccgctcccctagccaggaagagccgccgtccgcaccgggaccggagaggaagcggaggtctgaagggggacaggtgaggcggaaccaaccctcctggccatgggaggggccgtggtggacgagggccccacaggcgtcaaggcccctgacggcggctggggctgggccgtgctcttcggctgtttcgtcatcactggcttctcctacgccttccccaaggccgtcagtgtcttcttcaaggagctcatacaggagtttgggatcggctacagcgacacagcctggatctcctccatcctgctggccatgctctacgggacaggtccgctctgcagtgtgtgcgtgaaccgctttggctgccggcccgtcatgcttgtggggggtctctttgcgtcgctgggcatggtggctgcgtccttttgccggagcatcatccaggtctacctcaccactggggtcatcacggggttgggtttggcactcaacttccagccctcgctcatcatgctgaaccgctacttcagcaagcggcgccccatggccaacgggctggcggcagcaggtagccctgtcttcctgtgtgccctgagcccgctggggcagctgctgcaggaccgctacggctggcggggcggcttcctcatcctgggcggcctgctgctcaactgctgcgtgtgtgccgcactcatgaggcccctggtggtcacggcccagccgggctcggggccgccgcgaccctcccggcgcctgctagacctgagcgtcttccgggaccgcggctttgtgctttacgccgtggccgcctcggtcatggtgctggggctcttcgtcccgcccgtgttcgtggtgagctacgccaaggacctgggcgtgcccgacaccaaggccgccttcctgctcaccatcctgggcttcattgacatcttcgcgcggccggccgcgggcttcgtggcggggcttgggaaggtgcggccctactccgtctacctcttcagcttctccatgttcttcaacggcctcgcggacctggcgggttctacggcgggcgactacggcggcctcgtggtcttctgcatcttctttggcatctcctacggcatggtgggggccctgcagttcgaggtgctcatggccatcgtgggcacccacaagttctccagtgccattggcctggtgctgctgatggaggcggtggccgtgctcgtcgggcccccttcgggaggcaaactcctggatgcgacccacgtctacatgtacgtgttcatcctggcgggggccgaggtgctcacctcctccctgattttgctgctgggcaacttcttctgcattaggaagaagcccaaagagccacagcctgaggtggcggccgcggaggaggagaagctccacaagcctcctgcagactcgggggtggacttgcgggaggtggagcatttcctgaaggctgagcctgagaaaaacggggaggtggttcacaccccggaaacaagtgtctgagtggctgggcggggccggcaggcacagggaggaggtacagaagccggcaacgcttgctatttattttacaaactggactggctcaggcagggccacggctgggctccagctgccggcccagcggatcgtcgcccgatcagtgttttgagggggaaggtggcggggtgggaaccgtgtcattccagagtggatctgcggtgaagccaagccgcaaggttacaaggcatcctcaccaggggccccgcctgctgctcccaggtggcctgcggccactgctatgctcaaggacctggaaacccatgcttcgagacaacgtgactttaatgggagggtgggtgggccgcagacaggctggcagggcaggtgctgcgtggggccctctccagcccgtcctaccctgggctcacatggggcctgtgcccacccctcttgagtgtcttggggacagctctttccacccctggaagatggaaataaacctgcgtgtgggtggagtgttaggaccaacggtttcctaggagt

SEQ ID NO: 182962 - DNA, 2002 bp, Homo sapiens
  Payload ID: 16044
  Gene Symbol: SLC16A3
  Gene Name: solute carrier family 16 (monocarboxylate transporter), member 3
  Uniprot ID: O15427
  ENST ID: ENST00000582743
  CDS Start-End: 102-1499
ggagcggaccggcagaggcgggcagaggcggcgagaggcggcgagaggcgggctgaggcggcccagcggcggcaggtgaggcggaaccaaccctcctggccatgggaggggccgtggtggacgagggccccacaggcgtcaaggcccctgacggcggctggggctgggccgtgctcttcggctgtttcgtcatcactggcttctcctacgccttccccaaggccgtcagtgtcttcttcaaggagctcatacaggagtttgggatcggctacagcgacacagcctggatctcctccatcctgctggccatgctctacgggacaggtccgctctgcagtgtgtgcgtgaaccgctttggctgccggcccgtcatgcttgtggggggtctctttgcgtcgctgggcatggtggctgcgtccttttgccggagcatcatccaggtctacctcaccactggggtcatcacggggttgggtttggcactcaacttccagccctcgctcatcatgctgaaccgctacttcagcaagcggcgccccatggccaacgggctggcggcagcaggtagccctgtcttcctgtgtgccctgagcccgctggggcagctgctgcaggaccgctacggctggcggggcggcttcctcatcctgggcggcctgctgctcaactgctgcgtgtgtgccgcactcatgaggcccctggtggtcacggcccagccgggctcggggccgccgcgaccctcccggcgcctgctagacctgagcgtcttccgggaccgcggctttgtgctttacgccgtggccgcctcggtcatggtgctggggctcttcgtcccgcccgtgttcgtggtgagctacgccaaggacctgggcgtgcccgacaccaaggccgccttcctgctcaccatcctgggcttcattgacatcttcgcgcggccggccgcgggcttcgtggcggggcttgggaaggtgcggccctactccgtctacctcttcagcttctccatgttcttcaacggcctcgcggacctggcgggttctacggcgggcgactacggcggcctcgtggtcttctgcatcttctttggcatctcctacggcatggtgggggccctgcagttcgaggtgctcatggccatcgtgggcacccacaagttctccagtgccattggcctggtgctgctgatggaggcggtggccgtgctcgtcgggcccccttcgggaggcaaactcctggatgcgacccacgtctacatgtacgtgttcatcctggcgggggccgaggtgctcacctcctccctgattttgctgctgggcaacttcttctgcattaggaagaagcccaaagagccacagcctgaggtggcggccgcggaggaggagaagctccacaagcctcctgcagactcgggggtggacttgcgggaggtggagcatttcctgaaggctgagcctgagaaaaacggggaggtggttcacaccccggaaacaagtgtctgagtggctgggcggggccggcaggcacagggaggaggtacagaagccggcaacgcttgctatttattttacaaactggactggctcaggcagggccacggctgggctccagctgccggcccagcggatcgtcgcccgatcagtgttttgagggggaaggtggcggggtgggaaccgtgtcattccagagtggatctgcggtgaagccaagccgcaaggttacaaggcatcctcaccaggggccccgcctgctgctcccaggtggcctgcggccactgctatgctcaaggacctggaaacccatgcttcgagacaacgtgactttaatgggagggtgggtgggccgcagacaggctggcagggcaggtgctgcgtggggccctctccagcccgtcctaccctgggctcacatggggcctgtgcccacccctcttgagtgtcttggggacagctctttccacccctggaagatggaaataaacctgcgtgtgggtggagtgttagga

SEQ ID NO: 182963 - DNA, 808 bp, Homo sapiens
  Payload ID: 16044
  Gene Symbol: SLC16A3
  Gene Name: solute carrier family 16 (monocarboxylate transporter), member 3
  ENST ID: ENST00000583237
  CDS Start-End: 152-808
agttcagggagggcgaggccgtgccccacatccaggcagcgcaggccgcgggccgctcccctagccaggaagagccgccgtccgcaccgggaccggagaggaagcggaggtctgaagggggacaggtgaggcggaaccaaccctcctggccatgggaggggccgtggtggacgagggccccacaggcgtcaaggcccctgacggcggctggggctgggccgtgctcttcggctgtttcgtcatcactggcttctcctacgccttccccaaggccgtcagtgtcttcttcaaggagctcatacaggagtttgggatcggctacagcgacacagcctggatctcctccatcctgctggccatgctctacgggacaggtccgctctgcagtgtgtgcgtgaaccgctttggctgccggcccgtcatgcttgtggggggtctctttgcgtcgctgggcatggtggctgcgtccttttgccggagcatcatccaggtctacctcaccactggggtcatcacggggttgggtttggcactcaacttccagccctcgctcatcatgctgaaccgctacttcagcaagcggcgccccatggccaacgggctggcggcagcaggtagccctgtcttcctgtgtgccctgagcccgctggggcagctgctgcaggaccgctacggctggcggggcggcttcctcatcctgggcggcctgctgctcaactgctgcgtgtgtgccgcactcatgaggcccctggtggtcacggcccagccgggctcggggccgccgcgaccctcccggcgcctgctagac

SEQ ID NO: 182964 - DNA, 955 bp, Homo sapiens
  Payload ID: 16044
  Gene Symbol: SLC16A3
  Gene Name: solute carrier family 16 (monocarboxylate transporter), member 3
  ENST ID: ENST00000583025
  CDS Start-End: 1-921
ctcatcatgctgaaccgctacttcagcaagcggcgccccatggccaacgggctggcggcagcaggtagccctgtcttcctgtgtgccctgagcccgctggggcagctgctgcaggaccgctacggctggcggggcggcttcctcatcctgggcggcctgctgctcaactgctgcgtgtgtgccgcactcatgaggcccctggtggtcacggcccagccgggctcggggccgccgcgaccctcccggcgcctgctagacctgagcgtcttccgggaccgcggctttgtgctttacgccgtggccgcctcggtcatggtgctggggctcttcgtcccgcccgtgttcgtggtgagctacgccaaggacctgggcgtgcccgacaccaaggccgccttcctgctcaccatcctgggcttcattgacatcttcgcgcggccggccgcgggcttcgtggcggggcttgggaaggtgcggccctactccgtctacctcttcagcttctccatgttcttcaacggcctcgcggacctggcgggttctacggcgggcgactacggcggcctcgtggtcttctgcatcttctttggcatctcctacggcatggtgggggccctgcagttcgaggtgctcatggccatcgtgggcacccacaagttctccagtgccattggcctggtgctgctgatggaggcggtggccgtgctcgtcgggcccccttcgggaggggtcctgctgtcacccaggctggagggcagtggcaccatcacagctccctgcagccttaacctcccgaactctagccatcctcctgcctcagcctccagagtagctgagactacagatgtaagccactgcacctggcctgtttctttttcctccctaccccccaaatgtctcagcagaaatcaccccttttgttagctgtaagtaacaatgtaccccgtcatccatggca

SEQ ID NO: 182965 - DNA, 545 bp, Homo sapiens
  Payload ID: 16044
  Gene Symbol: SLC16A3
  Gene Name: solute carrier family 16 (monocarboxylate transporter), member 3
  ENST ID: ENST00000577650
  CDS Start-End: 74-545
cggcgagaggcggcgagaggcgggctgaggcggcccagcggcggcaggtgaggcggaaccaaccctcctggccatgggaggggccgtggtggacgagggccccacaggcgtcaaggccgtcagtgtcttcttcaaggagctcatacaggagtttgggatcggctacagcgacacagcctggatctcctccatcctgctggccatgctctacgggacaggtccgctctgcagtgtgtgcgtgaaccgctttggctgccggcccgtcatgcttgtggggggtctctttgcgtcgctgggcatggtggctgcgtccttttgccggagcatcatccaggtctacctcaccactggggtcatcacggggttgggtttggcactcaacttccagccctcgctcatcatgctgaaccgctacttcagcaagcggcgccccatggccaacgggctggcggcagcaggtagccctgtcttcctgtgtgccctgagcccgctggggcagctgctgcaggaccgctacggctggcggggcggcttcctcatcctgg

SEQ ID NO: 182966 - DNA, 535 bp, Homo sapiens
  Payload ID: 16044
  Gene Symbol: SLC16A3
  Gene Name: solute carrier family 16 (monocarboxylate transporter), member 3
  ENST ID: ENST00000578522
  CDS Start-End: 129-535
ctgctgctgcctcccagggcgctggttcacagcacggtcccagcagggagaggctgagccggttggactagaccacccaaggtctcaggttgcagctccctggtgaggcggaaccaaccctcctggccatgggaggggccgtggtggacgagggccccacaggcgtcaaggcccctgacggcggctggggctgggccgtgctcttcggctgtttcgtcatcactggcttctcctacgccttccccaaggccgtcagtgtcttcttcaaggagctcatacaggagtttgggatcggctacagcgacacagcctggatctcctccatcctgctggccatgctctacgggacaggtccgctctgcagtgtgtgcgtgaaccgctttggctgccggcccgtcatgcttgtggggggtctctttgcgtcgctgggcatggtggctgcgtccttttgccggagcatcatccaggtctacctcaccactggggtcatcacggggttgggtttggcactcaacttccagccctcgctcatcat

SEQ ID NO: 182967 - DNA, 859 bp, Homo sapiens
  Payload ID: 16044
  Gene Symbol: SLC16A3
  Gene Name: solute carrier family 16 (monocarboxylate transporter), member 3
  ENST ID: ENST00000580098
  CDS Start-End: 155-859
agtcagttaggtaacaggccacgggccccgggctcaggccactgcacggacccagggaacgggctgacagtccagcagaggcctcagcgaggcggcggcgctgcgcacaaacctgaggacctaggcgggtgaggcggaaccaaccctcctggccatgggaggggccgtggtggacgagggccccacaggcgtcaaggcccctgacggcggctggggctgggccgtgctcttcggctgtttcgtcatcactggcttctcctacgccttccccaaggccgtcagtgtcttcttcaaggagctcatacaggagtttgggatcggctacagcgacacagcctggatctcctccatcctgctggccatgctctacgggacaggtccgctctgcagtgtgtgcgtgaaccgctttggctgccggcccgtcatgcttgtggggggtctctttgcgtcgctgggcatggtggctgcgtccttttgccggagcatcatccaggtctacctcaccactggggtcatcacggggttgggtttggcactcaacttccagccctcgctcatcatgctgaaccgctacttcagcaagcggcgccccatggccaacgggctggcggcagcaggtagccctgtcttcctgtgtgccctgagcccgctggggcagctgctgcaggaccgctacggctggcggggcggcttcctcatcctgggcggcctgctgctcaactgctgcgtgtgtgccgcactcatgaggcccctggtggtcacggcccagccgggctcggggccgccgcgaccctcccggcgcctgctagacctgagcgtcttccgggaccgcggctttgtgctttacgccgtggccgcc

SEQ ID NO: 182968 - DNA, 866 bp, Homo sapiens
  Payload ID: 16044
  Gene Symbol: SLC16A3
  Gene Name: solute carrier family 16 (monocarboxylate transporter), member 3
  ENST ID: ENST00000578684
  CDS Start-End: 76-866
ggcggcgagaggcggcgagaggcgggctgaggcggcccagcggcggcaggtgaggcggaaccaaccctcctggccatgggaggggccgtggtggacgagggccccacaggcgtcaaggcccctgacggcggctggggctgggccgtgctcttcggctgtttcgtcatcactggcttctcctacgccttccccaaggccgtcagtgtcttcttcaaggagctcatacaggagtttgggatcggctacagcgacacagcctggatctcctccatcctgctggccatgctctacgggacagggttgggtttggcactcaacttccagccctcgctcatcatgctgaaccgctacttcagcaagcggcgccccatggccaacgggctggcggcagcaggtagccctgtcttcctgtgtgccctgagcccgctggggcagctgctgcaggaccgctacggctggcggggcggcttcctcatcctgggcggcctgctgctcaactgctgcgtgtgtgccgcactcatgaggcccctggtggtcacggcccagccgggctcggggccgccgcgaccctcccggcgcctgctagacctgagcgtcttccgggaccgcggctttgtgctttacgccgtggccgcctcggtcatggtgctggggctcttcgtcccgcccgtgttcgtggtgagctacgccaaggacctgggcgtgcccgacaccaaggccgccttcctgctcaccatcctgggcttcattgacatcttcgcgcggccggccgcgggcttcgtggcggggcttgggaaggtgcggccctactccgtctacctcttcagcttctccatgttcttcaacggcctcgcggacctggcggg

SEQ ID NO: 182969 - DNA, 4830 bp, Homo sapiens
  Payload ID: 16044
  Gene Symbol: SLC16A3
  Gene Name: solute carrier family 16 (monocarboxylate transporter), member 3
  Uniprot ID: O15427
  ENST ID: ENST00000581287
  CDS Start-End: 2323-3720
tccttggccttgcatggcctgtttatttttaaaagtgcaaacttgcaaccccaaacaagctggggccctgaggccgtcaacccctccagtctcccctgtgacccgcagtctgcgtcctgttcccagtttcattcctcaagtgcatatatttttatttttttattttttttttgagacagagtctcgctctgtggcccaggttggagcgcagtcgcgcgatctcggctcactgcaagctctgcctcctgggttcacgccattctcctgcctcagcctcccgagtagctgggactacaggcgcctgccactgcgcccagctaattttttttatttttagtagagacggggtttcaccgtgttagccaggatggtctcgatctcctgacctcgtgatccgcccgccttggccccccaaagtgctgggattacaggcgtgagccaccgcgcccggcctcagtgcatatatttttaatatcttgtagttaccctgctgtatactgtcatcttagggaccttttaaacaataccagtatgagcgggacctaccctgctgctcagtgaccccaggcagtgtgtcctaaggtggtgtgtcctgaggcgtgcgacactctgtcctgtcccaggcactgtggtgggggcatccggtgtccaggtgcagaggcaaaagctgctcccgggtttcccagaaatggttccgaggcctgggtcccagagagccagtgcaggttggggggtggacctctggctctgtgggggggtctgttctgctccagtgggccgtgtctgccttgtcatcatccagacagccacagctggctcctgggtcccctcgtcaagcagcatttcccagtaacagtgacttcgtggaacacttaggaagcccttaaaaaccatcctcggacctctgaggcagggactccagggggcacagcacctgtggtggggacaggcaggcaggctggatgcggggagggcccgggaggaggagtgaggagccacgcacggaactgctcagactctcccagcaaaggtcctggcccttgtgcatgcctttagttacatgtctgccttagaggcaaagacgagccgtcacgggggacccaccgggtcaggggtctgcggacacgcttgcaggaggaacccaaggaaagggggtgggggtggagccccacagattgcgtcgtgggtgggcgtggagcttgcacagcaggcctgctgctgcctcccagggcgctggttcacagcacggtcccagcagggagaggctgagccggttggactagaccacccaaggtctcaggttgcagctccctggtgaggagaggacaaggtgacttctgggtggggtggggcatgaagatggaagtctgacctcgggttccaacttgactcaaacgagctgagctcctggagtttagaaagggacaccagcttcagacatcgtgggggctggcatggtttgctctcgtgggctggatgggagcctccctagcccctcctgatttcaggctgcagcctatgggtcactccaggcacaggtggggtgagtcaagatctcactggaggagtcactgagcaagagggccggtgggaggcaagggggcatccagggacaaggggccagctctgcccccacttccccaccccacccactctaatactgcagcccctgtgcttccaactgccccctccagcctggggcccagcccctcaccgccagagactgcccgcctcctcttgggcaagctcctggtgggctccactgaagccaaagtgggcccttgggggcaggagagccagagcaaggcacgctccacctagatttagaccgggagagacctggaggatgccaaccccagaggtcctggggcgagctcagtgctggggaccggaggtgccgtctgctgccagaatcatggtgtgcgtggtccctgcccagcacgggtcagccagagcgagccagggcagaaatgacggccaggtcgatgttcctgtcgggggctgcttgtcccaggaggtaatctgagtcctggccgagcccaaaaaagccactgccctttagagccagctgtgagggtgcaggaggcagtgcagagggagtgggacccacagctgctagcctccctccaaaccctcctgcctccaccagacaccaggtcagggggccacaagtgtgggtgccgggcagctgcccctcagctgagctgccgggccacccagctcgtgtccctcccctgccaggctgcagctgggatggtcacccgggcagcctgagtcagcctgctttctctctcaggtgaggcggaaccaaccctcctggccatgggaggggccgtggtggacgagggccccacaggcgtcaaggcccctgacggcggctggggctgggccgtgctcttcggctgtttcgtcatcactggcttctcctacgccttccccaaggccgtcagtgtcttcttcaaggagctcatacaggagtttgggatcggctacagcgacacagcctggatctcctccatcctgctggccatgctctacgggacaggtccgctctgcagtgtgtgcgtgaaccgctttggctgccggcccgtcatgcttgtggggggtctctttgcgtcgctgggcatggtggctgcgtccttttgccggagcatcatccaggtctacctcaccactggggtcatcacggggttgggtttggcactcaacttccagccctcgctcatcatgctgaaccgctacttcagcaagcggcgccccatggccaacgggctggcggcagcaggtagccctgtcttcctgtgtgccctgagcccgctggggcagctgctgcaggaccgctacggctggcggggcggcttcctcatcctgggcggcctgctgctcaactgctgcgtgtgtgccgcactcatgaggcccctggtggtcacggcccagccgggctcggggccgccgcgaccctcccggcgcctgctagacctgagcgtcttccgggaccgcggctttgtgctttacgccgtggccgcctcggtcatggtgctggggctcttcgtcccgcccgtgttcgtggtgagctacgccaaggacctgggcgtgcccgacaccaaggccgccttcctgctcaccatcctgggcttcattgacatcttcgcgcggccggccgcgggcttcgtggcggggcttgggaaggtgcggccctactccgtctacctcttcagcttctccatgttcttcaacggcctcgcggacctggcgggttctacggcgggcgactacggcggcctcgtggtcttctgcatcttctttggcatctcctacggcatggtgggggccctgcagttcgaggtgctcatggccatcgtgggcacccacaagttctccagtgccattggcctggtgctgctgatggaggcggtggccgtgctcgtcgggcccccttcgggaggcaaactcctggatgcgacccacgtctacatgtacgtgttcatcctggcgggggccgaggtgctcacctcctccctgattttgctgctgggcaacttcttctgcattaggaagaagcccaaagagccacagcctgaggtggcggccgcggaggaggagaagctccacaagcctcctgcagactcgggggtggacttgcgggaggtggagcatttcctgaaggctgagcctgagaaaaacggggaggtggttcacaccccggaaacaagtgtctgagtggctgggcggggccggcaggcacagggaggaggtacagaagccggcaacgcttgctatttattttacaaactggactggctcaggcagggccacggctgggctccagctgccggcccagcggatcgtcgcccgatcagtgttttgagggggaaggtggcggggtgggaaccgtgtcattccagagtggatctgcggtgaagccaagccgcaaggttacaaggcatcctcaccaggggccccgcctgctgctcccaggtggcctgcggccactgctatgctcaaggacctggaaacccatgcttcgagacaacgtgactttaatgggagggtgggtgggccgcagacaggctggcagggcaggtgctgcgtggggccctctccagcccgtcctaccctgggctcacatggggcctgtgcccacccctcttgagtgtcttggggacagctctttccacccctggaagatggaaataaacctgcgtgtgggtggagtgttaggaccaacggtttcctaggagtatgtggttttgctgtgtggcctgtgtcctgactcgcacgtctgctgatggcctggctgttcctaccgtggctctgtcctcgccagctttccctgcagcggcatagcattcgtagcaggggcaggcgctgcatggagggggctgcggggcaggtgcctggaggccgctgtgccagggtggcctctgaaatgtgccagggagcccctacgtggtggttagatgggagctgaggtggaacaagccactttattcactgctgtgtttaagaaacaggaccctcctgccttccctttttcgcccctctgcctggctggcagtgtgcgtggtgtggtcagtgcccagggctggtctttgcaccctgtcctccatccagcccggcccagcgcttgggcttgtcctggacacctaacacccacctgccctcgtggccagcagtggcctgcgtggctgggagcccggtcagaggccgccggggccctcagtaggtgcgtcgtgggcgctggggacggcagcgggtgccctggcgggccgcgtgcagccggagagatgccatgtccctgctcctctgcaatgaaaagcaagcgaaaag

SEQ ID NO: 182970 - DNA, 872 bp, Homo sapiens
  Payload ID: 16044
  Gene Symbol: SLC16A3
  Gene Name: solute carrier family 16 (monocarboxylate transporter), member 3
  ENST ID: ENST00000580189
  CDS Start-End: 204-872
tctgacctcgggttccaacttgactcaaacgagctgagctcctggagtttagaaagggacaccagcttcagacatcgtgggggctggcatggtttgctctcgtgggctggatgggagcctccctagcccctcctgatttcaggctgcagcctatgggtcactccaggcacaggtggggtgaggcggaaccaaccctcctggccatgggaggggccgtggtggacgagggccccacaggcgtcaaggcccctgacggcggctggggctgggccgtgctcttcggctgtttcgtcatcactggcttctcctacgccttccccaaggccgtcagtgtcttcttcaaggagctcatacaggagtttgggatcggctacagcgacacagcctggatctcctccatcctgctggccatgctctacgggacaggtccgctctgcagtgtgtgcgtgaaccgctttggctgccggcccgtcatgcttgtggggggtctctttgcgtcgctgggcatggtggctgcgtccttttgccggagcatcatccaggtctacctcaccactggggtcatcacggggttgggtttggcactcaacttccagccctcgctcatcatgctgaaccgctacttcagcaagcggcgccccatggccaacgggctggcggcagcaggtagccctgtcttcctgtgtgccctgagcccgctggggcagctgctgcaggaccgctacggctggcggggcggcttcctcatcctgggcggcctgctgctcaactgctgcgtgtgtgccgcactcatgaggcccctggtggtcacggcccagccgggctcggggccgccgcgaccctcccggcgcctgctagacctgagcgtcttc

SEQ ID NO: 182971 - DNA, 279 bp, Homo sapiens
  Payload ID: 16044
  Gene Symbol: SLC16A3
  Gene Name: solute carrier family 16 (monocarboxylate transporter), member 3
  ENST ID: ENST00000582715
  CDS Start-End: 41-279
cccagcggcggcaggtgaggcggaaccaaccctcctggccatgggaggggccgtggtggacgagggccccacaggcgtcaaggcccctgacggcggctggggctgggccgtgctcttcggctgtttcgtcatcactggcttctcctacgccttccccaagcccgtcctaccctgggctcacatggggcctgtgcccacccctcttgagtgtcttggggacagctctttccacccctggaagatggaaataaacctgcgtgtgggtggagtgttaggacc

SEQ ID NO: 182972 - DNA, 586 bp, Homo sapiens
  Payload ID: 16044
  Gene Symbol: SLC16A3
  Gene Name: solute carrier family 16 (monocarboxylate transporter), member 3
  ENST ID: ENST00000582946
  CDS Start-End: 96-586
agtgcagagggagtgggacccacagctgctagcctccctccaaaccctcctgcctccaccagacaccaggtgaggcggaaccaaccctcctggccatgggaggggccgtggtggacgagggccccacaggcgtcaaggcccctgacggcggctggggctgggccgtgctcttcggctgtttcgtcatcactggcttctcctacgccttccccaaggccgtcagtgtcttcttcaaggagctcatacaggagtttgggatcggctacagcgacacagcctggatctcctccatcctgctggccatgctctacgggacaggtccgctctgcagtgtgtgcgtgaaccgctttggctgccggcccgtcatgcttgtggggggtctctttgcgtcgctgggcatggtggctgcgtccttttgccggagcatcatccaggtctacctcaccactggggtcatcacggggttgggtttggcactcaacttccagccctcgctcatcatgctgaaccgctacttcagcaagcggcgccccatggccaacgggctggcggcagcaggtagccctgtcttcctgtgtgccctgag

SEQ ID NO: 182973 - DNA, 1033 bp, Homo sapiens
  Payload ID: 16044
  Gene Symbol: SLC16A3
  Gene Name: solute carrier family 16 (monocarboxylate transporter), member 3
  ENST ID: ENST00000584689
  CDS Start-End: 160-1033
cgcggagccacctggggaaacggaagttcagggagggcgaggccgtgccccacatccaggcagcgcaggccgcgggccgctcccctagccaggaagagccgccgtccgcaccgggaccggagaggaagcggaggtgaggcggaaccaaccctcctggccatgggaggggccgtggtggacgagggccccacaggcgtcaaggcccctgacggcggctggggctgggccgtgctcttcggctgtttcgtcatcactggcttctcctacgccttccccaaggccgtcagtgtcttcttcaaggagctcatacaggagtttgggatcggctacagcgacacagcctggatctcctccatcctgctggccatgctctacgggacaggtccgctctgcagtgtgtgcgtgaaccgctttggctgccggcccgtcatgcttgtggggggtctctttgcgtcgctgggcatggtggctgcgtccttttgccggagcatcatccaggtctacctcaccactggggtcatcacggggttgggtttggcactcaacttccagccctcgctcatcatgctgaaccgctacttcagcaagcggcgccccatggccaacgggctggcggcagcaggtagccctgtcttcctgtgtgccctgagcccgctggggcagctgctgcaggaccgctacggctggcggggcggcttcctcatcctgggcggcctgctgctcaactgctgcgtgtgtgccgcactcatgaggcccctggtggtcacggcccagccgggctcggggccgccgcgaccctcccggcgcctgctagacctgagcgtcttccgggaccgcggctttgtgctttacgccgtggccgcctcggtcatggtgctggggctcttcgtcccgcccgtgttcgtggtgagctacgccaaggacctgggcgtgcccgacaccaaggccgccttcctgctcaccatcctgggcttcattgacatcttcgcgcggccggccgcgggcttcgtggcggggcttgggaaggtgcggc

SEQ ID NO: 182974 - DNA, 2015 bp, Homo sapiens
  Payload ID: 16044
  Gene Symbol: SLC16A3
  Gene Name: solute carrier family 16 (monocarboxylate transporter), member 3
  Uniprot ID: O15427
  ENST ID: ENST00000619321
  CDS Start-End: 96-1493
agtgcagagggagtgggacccacagctgctagcctccctccaaaccctcctgcctccaccagacaccaggtgaggcggaaccaaccctcctggccatgggaggggccgtggtggacgagggccccacaggcgtcaaggcccctgacggcggctggggctgggccgtgctcttcggctgtttcgtcatcactggcttctcctacgccttccccaaggccgtcagtgtcttcttcaaggagctcatacaggagtttgggatcggctacagcgacacagcctggatctcctccatcctgctggccatgctctacgggacaggtccgctctgcagtgtgtgcgtgaaccgctttggctgccggcccgtcatgcttgtggggggtctctttgcgtcgctgggcatggtggctgcgtccttttgccggagcatcatccaggtctacctcaccactggggtcatcacggggttgggtttggcactcaacttccagccctcgctcatcatgctgaaccgctacttcagcaagcggcgccccatggccaacgggctggcggcagcaggtagccctgtcttcctgtgtgccctgagcccgctggggcagctgctgcaggaccgctacggctggcggggcggcttcctcatcctgggcggcctgctgctcaactgctgcgtgtgtgccgcactcatgaggcccctggtggtcacggcccagccgggctcggggccgccgcgaccctcccggcgcctgctagacctgagcgtcttccgggaccgcggctttgtgctttacgccgtggccgcctcggtcatggtgctggggctcttcgtcccgcccgtgttcgtggtgagctacgccaaggacctgggcgtgcccgacaccaaggccgccttcctgctcaccatcctgggcttcattgacatcttcgcgcggccggccgcgggcttcgtggcggggcttgggaaggtgcggccctactccgtctacctcttcagcttctccatgttcttcaacggcctcgcggacctggcgggttctacggcgggcgactacggcggcctcgtggtcttctgcatcttctttggcatctcctacggcatggtgggggccctgcagttcgaggtgctcatggccatcgtgggcacccacaagttctccagtgccattggcctggtgctgctgatggaggcggtggccgtgctcgtcgggcccccttcgggaggcaaactcctggatgcgacccacgtctacatgtacgtgttcatcctggcgggggccgaggtgctcacctcctccctgattttgctgctgggcaacttcttctgcattaggaagaagcccaaagagccacagcctgaggtggcggccgcggaggaggagaagctccacaagcctcctgcagactcgggggtggacttgcgggaggtggagcatttcctgaaggctgagcctgagaaaaacggggaggtggttcacaccccggaaacaagtgtctgagtggctgggcggggccggcaggcacagggaggaggtacagaagccggcaacgcttgctatttattttacaaactggactggctcaggcagggccacggctgggctccagctgccggcccagcggatcgtcgcccgatcagtgttttgagggggaaggtggcggggtgggaaccgtgtcattccagagtggatctgcggtgaagccaagccgcaaggttacaaggcatcctcaccaggggccccgcctgctgctcccaggtggcctgcggccactgctatgctcaaggacctggaaacccatgcttcgagacaacgtgactttaatgggagggtgggtgggccgcagacaggctggcagggcaggtgctgcgtggggccctctccagcccgtcctaccctgggctcacatggggcctgtgcccacccctcttgagtgtcttggggacagctctttccacccctggaagatggaaataaacctgcgtgtgggtggagtgttaggaccaacggtttcctaggagt

SEQ ID NO: 182975 - DNA, 2048 bp, Homo sapiens
  Payload ID: 16044
  Gene Symbol: SLC16A3
  Gene Name: solute carrier family 16 (monocarboxylate transporter), member 3
  Uniprot ID: O15427
  ENST ID: ENST00000617373
  CDS Start-End: 129-1526
ctgctgctgcctcccagggcgctggttcacagcacggtcccagcagggagaggctgagccggttggactagaccacccaaggtctcaggttgcagctccctggtgaggcggaaccaaccctcctggccatgggaggggccgtggtggacgagggccccacaggcgtcaaggcccctgacggcggctggggctgggccgtgctcttcggctgtttcgtcatcactggcttctcctacgccttccccaaggccgtcagtgtcttcttcaaggagctcatacaggagtttgggatcggctacagcgacacagcctggatctcctccatcctgctggccatgctctacgggacaggtccgctctgcagtgtgtgcgtgaaccgctttggctgccggcccgtcatgcttgtggggggtctctttgcgtcgctgggcatggtggctgcgtccttttgccggagcatcatccaggtctacctcaccactggggtcatcacggggttgggtttggcactcaacttccagccctcgctcatcatgctgaaccgctacttcagcaagcggcgccccatggccaacgggctggcggcagcaggtagccctgtcttcctgtgtgccctgagcccgctggggcagctgctgcaggaccgctacggctggcggggcggcttcctcatcctgggcggcctgctgctcaactgctgcgtgtgtgccgcactcatgaggcccctggtggtcacggcccagccgggctcggggccgccgcgaccctcccggcgcctgctagacctgagcgtcttccgggaccgcggctttgtgctttacgccgtggccgcctcggtcatggtgctggggctcttcgtcccgcccgtgttcgtggtgagctacgccaaggacctgggcgtgcccgacaccaaggccgccttcctgctcaccatcctgggcttcattgacatcttcgcgcggccggccgcgggcttcgtggcggggcttgggaaggtgcggccctactccgtctacctcttcagcttctccatgttcttcaacggcctcgcggacctggcgggttctacggcgggcgactacggcggcctcgtggtcttctgcatcttctttggcatctcctacggcatggtgggggccctgcagttcgaggtgctcatggccatcgtgggcacccacaagttctccagtgccattggcctggtgctgctgatggaggcggtggccgtgctcgtcgggcccccttcgggaggcaaactcctggatgcgacccacgtctacatgtacgtgttcatcctggcgggggccgaggtgctcacctcctccctgattttgctgctgggcaacttcttctgcattaggaagaagcccaaagagccacagcctgaggtggcggccgcggaggaggagaagctccacaagcctcctgcagactcgggggtggacttgcgggaggtggagcatttcctgaaggctgagcctgagaaaaacggggaggtggttcacaccccggaaacaagtgtctgagtggctgggcggggccggcaggcacagggaggaggtacagaagccggcaacgcttgctatttattttacaaactggactggctcaggcagggccacggctgggctccagctgccggcccagcggatcgtcgcccgatcagtgttttgagggggaaggtggcggggtgggaaccgtgtcattccagagtggatctgcggtgaagccaagccgcaaggttacaaggcatcctcaccaggggccccgcctgctgctcccaggtggcctgcggccactgctatgctcaaggacctggaaacccatgcttcgagacaacgtgactttaatgggagggtgggtgggccgcagacaggctggcagggcaggtgctgcgtggggccctctccagcccgtcctaccctgggctcacatggggcctgtgcccacccctcttgagtgtcttggggacagctctttccacccctggaagatggaaataaacctgcgtgtgggtggagtgttaggaccaacggtttcctaggagt

SEQ ID NO: 182976 - DNA, 1934 bp, Homo sapiens
  Payload ID: 16045
  Gene Symbol: SLC16A5
  Gene Name: solute carrier family 16 (monocarboxylate transporter), member 5
  Uniprot ID: O15375
  ENST ID: ENST00000329783
  CDS Start-End: 288-1805
gcggtcctcgtcgcgaccggcccgggccgcaggacgccgcgctcgggggagctgagccacctctccgccaggcccgtgcgagcggtacaaagaaaagagcacttccctgctggggcagaggccaagccagagccctggccccatcacctctctgccctgcttgagtctggaatggacctccctgcctggaagctgcattgcccttggtcctgggcctgcctgccccctggggaacacaggcagcagccacattggcagtgaggccgtggcagcgtcggcagcagaggatgccccaggccctggagcgtgcagatggcagctgggcctgggtggtgctgctggccaccatggtgacccagggcctcaccctgggcttccccacgtgtatcggcatcttcttcactgaattgcaatgggagttccaggccagcaacagcgagacctcttggttcccctccatcctcacggctgtgctccacatggcagggcccctgtgcagcatcctggtgggacgcttcggctgccgagtgaccgtgatgctggggggcgtgctggccagcctgggcatggtggccagctccttctctcacaacctcagccagctctacttcacagcaggattcatcacaggcctgggcatgtgcttcagcttccagtcaagcatcacggtgctgggcttctactttgtccgccggcgggtgctggccaacgcgctggcctcgatgggcgtctccctgggcatcaccctctggccgctgctctcccgctaccttctggagaacctgggctggaggggtaccttccttgtcttcggcgggatctttctccactgctgcatctgcggggccatcataaggcctgtggccaccagtgtggcccctgagaccaaagaatgtcccccgccacctcccgagacacctgcacttggctgcctggctgcatgcggccggaccatccagcgccacctggccttcgacatcctgcggcacaacacaggctactgcgtgtacatactgggtgtgatgtggtccgtcctgggcttcccactgccacaagtcttcctggtgccatatgccatgtggcacagcgtggacgagcagcaggcagccctcctcatctccatcatcggcttcagcaacatcttcctgaggcccctagccgggctgatggcaggacggccggcctttgctagccaccgcaagtacctgttcagcctggcactcctgctcaatgggctcactaacctggtgtgtgcggcatcaggtgacttctgggtgctcgtgggctactgcctggcgtacagcgtgtccatgagtggcatcggcgccctcatcttccaggttctcatggacatcgtccccatggatcagttccccagagccctgggactcttcactgtcctggacggccttgctttcctcatctccccaccactggccgggttgctcctggacgccaccaacaactttagctatgttttctacatgtccagcttcttcctcatctcagctgccctcttcatgggtggcagcttctacgccctgcagaagaaggagcaaggcaagcaggctgtcgcggcggatgccctggagcgggatcttttcttggaagccaaagacggtcctgggaagcaacggtcccctgagatcatgtgccagtcttcccgccagccacgtccagctggcgtcaataagcatctttggggatgtcctgcctcctccaggaccagccatgagtggctcttatggccaaaggcggtactgcaggccaagcaaacggctctgggctggaatagccctacctgagtgccctgtttgactccgccactatctgccatgtgagttgggcaaattgttgaccacctctgagccttgaaaaagtaggaggttactttgttagagcaaaataataaaatttaattttaaaaaagaaaa

SEQ ID NO: 182977 - DNA, 2051 bp, Homo sapiens
  Payload ID: 16045
  Gene Symbol: SLC16A5
  Gene Name: solute carrier family 16 (monocarboxylate transporter), member 5
  Uniprot ID: O15375
  ENST ID: ENST00000450736
  CDS Start-End: 416-1933
gtctaaacttctccctgcccacacatccagcttcatggcactgtgctacaaagctggtctcattgggcctaggggtctttgagagctgagcttggcagcccctggggcccaacctcacccctagtcccagcaagtgagagcgaagcatcttgccctgtctacctccttgcccaaagcacacaccaggcagtgaccatgactcatggttcccagtacaaagaaaagagcacttccctgctggggcagaggccaagccagagccctggccccatcacctctctgccctgcttgagtctggaatggacctccctgcctggaagctgcattgcccttggtcctgggcctgcctgccccctggggaacacaggcagcagccacattggcagtgaggccgtggcagcgtcggcagcagaggatgccccaggccctggagcgtgcagatggcagctgggcctgggtggtgctgctggccaccatggtgacccagggcctcaccctgggcttccccacgtgtatcggcatcttcttcactgaattgcaatgggagttccaggccagcaacagcgagacctcttggttcccctccatcctcacggctgtgctccacatggcagggcccctgtgcagcatcctggtgggacgcttcggctgccgagtgaccgtgatgctggggggcgtgctggccagcctgggcatggtggccagctccttctctcacaacctcagccagctctacttcacagcaggattcatcacaggcctgggcatgtgcttcagcttccagtcaagcatcacggtgctgggcttctactttgtccgccggcgggtgctggccaacgcgctggcctcgatgggcgtctccctgggcatcaccctctggccgctgctctcccgctaccttctggagaacctgggctggaggggtaccttccttgtcttcggcgggatctttctccactgctgcatctgcggggccatcataaggcctgtggccaccagtgtggcccctgagaccaaagaatgtcccccgccacctcccgagacacctgcacttggctgcctggctgcatgcggccggaccatccagcgccacctggccttcgacatcctgcggcacaacacaggctactgcgtgtacatactgggtgtgatgtggtccgtcctgggcttcccactgccacaagtcttcctggtgccatatgccatgtggcacagcgtggacgagcagcaggcagccctcctcatctccatcatcggcttcagcaacatcttcctgaggcccctagccgggctgatggcaggacggccggcctttgctagccaccgcaagtacctgttcagcctggcactcctgctcaatgggctcactaacctggtgtgtgcggcatcaggtgacttctgggtgctcgtgggctactgcctggcgtacagcgtgtccatgagtggcatcggcgccctcatcttccaggttctcatggacatcgtccccatggatcagttccccagagccctgggactcttcactgtcctggacggccttgctttcctcatctccccaccactggccgggttgctcctggacgccaccaacaactttagctatgttttctacatgtccagcttcttcctcatctcagctgccctcttcatgggtggcagcttctacgccctgcagaagaaggagcaaggcaagcaggctgtcgcggcggatgccctggagcgggatcttttcttggaagccaaagacggtcctgggaagcaacggtcccctgagatcatgtgccagtcttcccgccagccacgtccagctggcgtcaataagcatctttggggatgtcctgcctcctccaggaccagccatgagtggctcttatggccaaaggcggtactgcaggccaagcaaacggctctgggctggaatagccctacctgagtgccctgtttgactccgccactatctgccatgtgagttgggcaaattgttgaccacctctgagccttgaaaaagtaggaggttactttgttagagcaaaataataaaatttaatttt

SEQ ID NO: 182978 - DNA, 1842 bp, Homo sapiens
  Payload ID: 16045
  Gene Symbol: SLC16A5
  Gene Name: solute carrier family 16 (monocarboxylate transporter), member 5
  Uniprot ID: O15375
  ENST ID: ENST00000538213
  CDS Start-End: 129-1631
agagacaattgtaccccattgcctggtgccacctgccctgccccgtcctgtccctcctatccctcctgtccctcctgtccttcctgccacctcctgccaggctggctctgggaagtgggtgaaaggagatgccaaggccaacgcgtgggcctctggccacctcccaggggtggtgcccctctgtgacacctggtacttgggcagcagccacattggcagtgaggccgtggcagcgtcggcagcagaggatgccccaggccctggagcgtgcagatggcagctgggcctgggtggtgctgctggccaccatggtgacccagggcctcaccctgggcttccccacgtgtatcggcatcttcttcactgaattgcaatgggagttccaggccagcaacagcgagacctcttggttcccctccatcctcacggctgtgctccacatggcagggcccctgtgcagcatcctggtgggacgcttcggctgccgagtgaccgtgatgctggggggcgtgctggccagcctgggcatggtggccagctccttctctcacaacctcagccagctctacttcacagcaggattcatcacaggcctgggcatgtgcttcagcttccagtcaagcatcacggtgctgggcttctactttgtccgccggcgggtgctggccaacgcgctggcctcgatgggcgtctccctgggcatcaccctctggccgctgctctcccgctaccttctggagaacctgggctggaggggtaccttccttgtcttcggcgggatctttctccactgctgcatctgcggggccatcataaggcctgtggccaccagtgtggcccctgagaccaaagaatgtcccccgccacctcccgagacacctgcacttggctgcctggctgcatgcggccggaccatccagcgccacctggccttcgacatcctgcggcacaacacaggctactgcgtgtacatactgggtgtgatgtggtccgtcctgggcttcccactgccacaagtcttcctggtgccatatgccatgtggcacagcgtggacgagcagcaggcagccctcctcatctccatcatcggcttcagcaacatcttcctgaggcccctagccgggctgatggcaggacggccggcctttgctagccaccgcaagtacctgttcagcctggcactcctgctcaatgggctcactaacctggtgtgtgcggcatcaggtgacttctgggtgctcgtgggctactgcctggcgtacagcgtgtccatgagtggcatcggcgccctcatcttccaggttctcatggacatcgtccccatggatcagttccccagagccctgggactcttcactgtcctggacggccttgctttcctcatctccccaccactggccgggttgctcctggacgccaccaacaactttagctatgttttctacatgtccagcttcttcctcatctcagctgccctcttcatgggtggcagcttctacgccctgcagaagaaggagcaaggcaagcaggctgtcgcggcggatgccctggagcgggatcttttcttggaagccaaagacggtcctgggaagcaacggtcccctgagatcatgtatgtaaccagcgtctaagacccagggttcatctgtgtgaccagtgtctgagtcctgggatcactgagtgaacactgtctcagcccagcccaggagggggacctctagctccttcaccaggggcttgggtgaagagtagcccaggaagcccgggctgtccaggctctgcaagctgggactctgccaggagctgggactttggaggctggcctctgaagatgccctgaga

SEQ ID NO: 182979 - DNA, 738 bp, Homo sapiens
  Payload ID: 16045
  Gene Symbol: SLC16A5
  Gene Name: solute carrier family 16 (monocarboxylate transporter), member 5
  ENST ID: ENST00000584207
  CDS Start-End: 130-738
tagtcttgaactcctgaccccaggtgagccgcctgcctcggcctcccaaaatgctgggattacaggtgtgagccaccgtgtctggcagggctgaattttgaaagaccagttgactggagaaaccgctcgatgggaggggaggctggagagccgactgggcatccataccgtgcagcagccacattggcagtgaggccgtggcagcgtcggcagcagaggatgccccaggccctggagcgtgcagatggcagctgggcctgggtggtgctgctggccaccatggtgacccagggcctcaccctgggcttccccacgtgtatcggcatcttcttcactgaattgcaatgggagttccaggccagcaacagcgagacctcttggttcccctccatcctcacggctgtgctccacatggcagggcccctgtgcagcatcctggtgggacgcttcggctgccgagtgaccgtgatgctggggggcgtgctggccagcctgggcatggtggccagctccttctctcacaacctcagccagctctacttcacagcaggattcatcacaggcctgggcatgtgcttcagcttccagtcaagcatcacggtgctgggcttctactttgtccgccggcgggtgctggccaacgcgctggcctcgatgggcgtctccctgggcatcaccctctggccgctgctctcccgctaccttctggagaacctgggctggaggggtaccttcctt

SEQ ID NO: 182980 - DNA, 562 bp, Homo sapiens
  Payload ID: 16045
  Gene Symbol: SLC16A5
  Gene Name: solute carrier family 16 (monocarboxylate transporter), member 5
  ENST ID: ENST00000578847
  CDS Start-End: 403-562
agaaagagggcatccgggttgtgcaaatttcagacacacggatatcccgtggcgcctgcgtccggagcccggccctgctgctggactgtccccggccacgcccgccgcccctcccgcatcctggccccttccccacccgacggaatcccggggaggctggaagcacacaccaggcagtgaccatgactcatggttcccagtacaaagaaaagagcacttccctgctggggcagaggccaagccagagccctggccccatcacctctctgccctgcttgagtctggaatggacctccctgcctggaagctgcattgcccttggtcctgggcctgcctgccccctggggaacacaggcagcagccacattggcagtgaggccgtggcagcgtcggcagcagaggatgccccaggccctggagcgtgcagatggcagctgggcctgggtggtgctgctggccaccatggtgacccagggcctcaccctgggcttccccacgtgtatcggcatcttcttcactgaattgcaatgggagttccaggccagcaacagcgagacctctt

SEQ ID NO: 182981 - DNA, 1688 bp, Homo sapiens
  Payload ID: 16045
  Gene Symbol: SLC16A5
  Gene Name: solute carrier family 16 (monocarboxylate transporter), member 5
  ENST ID: ENST00000578376
  CDS Start-End: 325-1688
gcggtcctcgtcgcgaccggcccgggccgcaggacgccgcgctcgggggagctgagccacctctccgccaggcccgtgcgagcggcacacaccaggcagtgaccatgactcatggttcccagtacaaagaaaagagcacttccctgctggggcagaggccaagccagagccctggccccatcacctctctgccctgcttgagtctggaatggacctccctgcctggaagctgcattgcccttggtcctgggcctgcctgccccctggggaacacaggcagcagccacattggcagtgaggccgtggcagcgtcggcagcagaggatgccccaggccctggagcgtgcagatggcagctgggcctgggtggtgctgctggccaccatggtgacccagggcctcaccctgggcttccccacgtgtatcggcatcttcttcactgaattgcaatgggagttccaggccagcaacagcgagacctcttggttcccctccatcctcacggctgtgctccacatggcagggcccctgtgcagcatcctggtgggacgcttcggctgccgagtgaccgtgatgctggggggcgtgctggccagcctgggcatggtggccagctccttctctcacaacctcagccagctctacttcacagcaggattcatcacaggcctgggcatgtgcttcagcttccagtcaagcatcacggtgctgggcttctactttgtccgccggcgggtgctggccaacgcgctggcctcgatgggcgtctccctgggcatcaccctctggccgctgctctcccgctaccttctggagaacctgggctggaggggtaccttccttgtcttcggcgggatctttctccactgctgcatctgcggggccatcataaggcctgtggccaccagtgtggcccctgagaccaaagaatgtcccccgccacctcccgagacacctgcacttggctgcctggctgcatgcggccggaccatccagcgccacctggccttcgacatcctgcggcacaacacaggctactgcgtgtacatactgggtgtgatgtggtccgtcctgggcttcccactgccacaagtcttcctggtgccatatgccatgtggcacagcgtggacgagcagcaggcagccctcctcatctccatcatcggcttcagcaacatcttcctgaggcccctagccgggctgatggcaggacggccggcctttgctagccaccgcaagtacctgttcagcctggcactcctgctcaatgggctcactaacctggtgtgtgcggcatcaggtgacttctgggtgctcgtgggctactgcctggcgtacagcgtgtccatgagtggcatcggcgccctcatcttccaggttctcatggacatcgtccccatggatcagttccccagagccctgggactcttcactgtcctggacggccttgctttcctcatctccccaccactggccgggttgctcctggacgccaccaacaactttagctatgttttctacatgtccagcttcttcctcatctcagctgccctcttcatgggtggcagcttctacgccctgcagaagaaggagcaaggcaagcaggctgtcgcggcggatgccctggagcgggatcttttcttggaagccaaagacggtcctgggaagcaacggtcccctgagatcat

SEQ ID NO: 182982 - DNA, 2019 bp, Homo sapiens
  Payload ID: 16045
  Gene Symbol: SLC16A5
  Gene Name: solute carrier family 16 (monocarboxylate transporter), member 5
  Uniprot ID: O15375
  ENST ID: ENST00000580123
  CDS Start-End: 373-1890
agaagctagaaagagggcatccgggttgtgcaaatttcagacacacggatatcccgtggcgcctgcgtccggagcccggccctgctgctggactgtccccggccacgcccgccgcccctcccgcatcctggccccttccccacccgacggaatcccggggaggctggaagtacaaagaaaagagcacttccctgctggggcagaggccaagccagagccctggccccatcacctctctgccctgcttgagtctggaatggacctccctgcctggaagctgcattgcccttggtcctgggcctgcctgccccctggggaacacaggcagcagccacattggcagtgaggccgtggcagcgtcggcagcagaggatgccccaggccctggagcgtgcagatggcagctgggcctgggtggtgctgctggccaccatggtgacccagggcctcaccctgggcttccccacgtgtatcggcatcttcttcactgaattgcaatgggagttccaggccagcaacagcgagacctcttggttcccctccatcctcacggctgtgctccacatggcagggcccctgtgcagcatcctggtgggacgcttcggctgccgagtgaccgtgatgctggggggcgtgctggccagcctgggcatggtggccagctccttctctcacaacctcagccagctctacttcacagcaggattcatcacaggcctgggcatgtgcttcagcttccagtcaagcatcacggtgctgggcttctactttgtccgccggcgggtgctggccaacgcgctggcctcgatgggcgtctccctgggcatcaccctctggccgctgctctcccgctaccttctggagaacctgggctggaggggtaccttccttgtcttcggcgggatctttctccactgctgcatctgcggggccatcataaggcctgtggccaccagtgtggcccctgagaccaaagaatgtcccccgccacctcccgagacacctgcacttggctgcctggctgcatgcggccggaccatccagcgccacctggccttcgacatcctgcggcacaacacaggctactgcgtgtacatactgggtgtgatgtggtccgtcctgggcttcccactgccacaagtcttcctggtgccatatgccatgtggcacagcgtggacgagcagcaggcagccctcctcatctccatcatcggcttcagcaacatcttcctgaggcccctagccgggctgatggcaggacggccggcctttgctagccaccgcaagtacctgttcagcctggcactcctgctcaatgggctcactaacctggtgtgtgcggcatcaggtgacttctgggtgctcgtgggctactgcctggcgtacagcgtgtccatgagtggcatcggcgccctcatcttccaggttctcatggacatcgtccccatggatcagttccccagagccctgggactcttcactgtcctggacggccttgctttcctcatctccccaccactggccgggttgctcctggacgccaccaacaactttagctatgttttctacatgtccagcttcttcctcatctcagctgccctcttcatgggtggcagcttctacgccctgcagaagaaggagcaaggcaagcaggctgtcgcggcggatgccctggagcgggatcttttcttggaagccaaagacggtcctgggaagcaacggtcccctgagatcatgtgccagtcttcccgccagccacgtccagctggcgtcaataagcatctttggggatgtcctgcctcctccaggaccagccatgagtggctcttatggccaaaggcggtactgcaggccaagcaaacggctctgggctggaatagccctacctgagtgccctgtttgactccgccactatctgccatgtgagttgggcaaattgttgaccacctctgagccttgaaaaagtaggaggttactttgttagagcaaaataataaaatttaattttaaaaaagaaaa

SEQ ID NO: 182983 - DNA, 989 bp, Homo sapiens
  Payload ID: 16045
  Gene Symbol: SLC16A5
  Gene Name: solute carrier family 16 (monocarboxylate transporter), member 5
  ENST ID: ENST00000584118
  CDS Start-End: 282-989
ccctcctgtccttcctgccacctcctgccaggctggctctgggaagtgggtgaaaggagatgccaaggccaacgcgtgggcctctggccacctcccaggggtggtgcccctctgtgacacctggtacttgggtatgaggaagggatggcttagctgcccagagaaggtggcaggtgggccaggagagacggacagcctgctgaccaccaggctccattctgtcccctccccaggcagcagccacattggcagtgaggccgtggcagcgtcggcagcagaggatgccccaggccctggagcgtgcagatggcagctgggcctgggtggtgctgctggccaccatggtgacccagggcctcaccctgggcttccccacgtgtatcggcatcttcttcactgaattgcaatgggagttccaggccagcaacagcgagacctcttggttcccctccatcctcacggctgtgctccacatggcagggcccctgtgcagcatcctggtgggacgcttcggctgccgagtgaccgtgatgctggggggcgtgctggccagcctgggcatggtggccagctccttctctcacaacctcagccagctctacttcacagcaggattcatcacaggcctgggcatgtgcttcagcttccagtcaagcatcacggtgctgggcttctactttgtccgccggcgggtgctggccaacgcgctggcctcgatgggcgtctccctgggcatcaccctctggccgctgctctcccgctaccttctggagaacctgggctggaggggtaccttccttgtcttcggcgggatctttctccactgctgcatctgcggggccatcataaggcctgtggccaccagtgtggcccctgagaccaaagaatgtcccccgccacctcccgagacacctgcacttggctgcctggctgcatgcggccggaccatccagcgccacctggccttcgacatcctgcggcacaacaca

SEQ ID NO: 182984 - DNA, 11777 bp, Homo sapiens
  Payload ID: 16046
  Gene Symbol: SLC16A7
  Gene Name: solute carrier family 16 (monocarboxylate transporter), member 7
  Uniprot ID: O60669
  ENST ID: ENST00000261187
  CDS Start-End: 165-1601
gtatgttcaggattctaaaaagagcaatggttcacaaggaaacttctgcctcaggtggggagaggagtccatagatcagggaaacttatgtcttggtgaaatggaagaccatgtttctaaacacctgtcgccaggttacttgaatttccactagaggagcagaaatgccaccaatgccaagtgccccacctgtgcatccacctccagatggaggatggggttggattgtggttggagcagcttttatctccattggattttcctatgcattccccaaagctgtcaccgtattcttcaaagaaattcagcaaatattccacactacctacagtgaaatagcatggatttcatccattatgctggctgttatgtacgcaggaggtcctgtaagtagtgttttggtgaataaatacggcagccggccggtggtgatagcaggaggcttattatgctgtcttggaatggtgttggcctcctttagtagcagcgtggtacagctgtacctcactatgggattcattacaggtttaggtttagccttcaacctgcaacccgccttaaccataattggcaaatacttctataggaagcgacccatggcaaatggattggccatggcaggaagtcctgttttcttaagttcattggctcctttcaatcagtacctttttaatacttttggctggaaaggaagcttcctgattttgggaagtctacttttgaatgcctgtgtggctggttccctcatgagaccccttggacccaatcaaaccacttctaagtctaaaaataagactggcaaaacagaagatgattcaagcccaaagaaaatcaaaacgaagaaatcaacttgggaaaaagttaataagtatttagatttctccctttttaagcatagaggatttctgatatatctgtctggaaatgtcattatgttcctaggtttttttgcccccattatattcttggctccatatgctaaagaccaaggaattgatgagtactcggcagcttttctgctatctgttatggctttcgttgatatgtttgctaggccttctgtaggattaattgcaaactccaaatatattcgacctcgaattcagtacttcttcagttttgcaatcatgttcaatggagtgtgtcacctcttgtgcccactggcacaggactacacaagcctggtattatatgctgtattttttggccttggatttgggagtgttagcagtgttctctttgaaactctcatggacctcgtgggtgcaccaagattttccagtgccgtcggacttgtcacaattgtggagtgtggcccagttcttcttggccctcctcttgcaggtaaattggtggatttaactggagaatataaatacatgtacatgtcctgtggggctattgtggtagcagcaagcgtgtggctgctcattggcaatgctatcaactatagattgcttgcaaaggaaaggaaggaggaaaatgcaaggcagaagaccagagaatctgaacccttgagcaaatctaaacattcggaagatgttaacgtcaaagtttcaaatgcacagagtgtaacctcagaaagagaaactaacatttaacaagaatcacatctctgatttcagtgtttatgactttatctaggagtttgtttttcattttgtttttttaaagtattagaaaaggttttagctgaaatgaggagtcacaattaaggatggaggtgatattttcctcaatggcaaattttaaattagtttttaaaaacttacttatttgggtagttaaattttgagattatgcatagaaagaatccatgctataggtttatttccatacctgactctgggtgtggtggttaaaatactaattttaaagtcttccagtgactttcggtcttggttatatggagaattctgaatcccaaacccctggtttaagtaggtagaaggaggatgcctaatcctacaaagtgaccctttatacatttcattttttatttgatattaaagtatgagatagagttgagagacaattaattatcccctcttacacacaaacacacatactcccacatacttacccacatgtacacagagtatctggagaataaaacccaaattcaaaaaaaaaaatgataatttatttttaaggtaaaaataatccatgaagataaaagaaacatatgtctgcgtgctactttacaatgttggttttaaagataagcacatgggtaaaaatgagggtgatccttattcaaaaataacatctgactactataaaaatatttgcatatataagtttgacaaagaaaagaaaatcaatgttaaaccattaaatctgagcactgttagacttgattaatccatgcacatgattttttttgagtagggagcattagtacctggtgctagagaatagaaccctcaaataatttttagaattcttacctaatatgtaaaagtctgcatgactcttaacaatgagtcacatccattgattttacagggattttagttcgtaatccagaaagtaataatcagggattttattttaatcaggcatcaatccagattcactgttatactgaaatatcaaagtaaaatcctagttggcaggattgtaagtagaccgaattctaatttttcccaacacatagtggtaattggaggttactgttatgaatactccatctgactacgactaagagagtgaggggtggttttaatgaaccctctaagctctctcagttccttcccttccacaaaatgcaagagcaaaagcaaactacaaacaggccttgtgctcaaccactggaaatgcctcctgggataagaatggcagcacttgaaaattctgccctctactgatgagacttcctgctgcctttggacataactaagccaggaaactttaaaagccttctagaaatagaggcactgtatgacttgcaatcgtaggtatagtttataacctgatagcaaaaaacttgaaatattgcagcccagtttaattcagcactttcccattttcataactatgtgaaaacatctgggaatttgaatcactcctgaatacagaggcatattctttttaaactataaataccattttgagtgagaaagtacttttaaacaagaaagaaattgtacattatgactaaagttataaatacaatatttatatctataaatctgaagtttaacatgattaatttaaaaagtatttagtgcttgacaaagtagtgtcactcttaagatgtcaaagggaattagccattttttttattgtaataaaggcaggtgctatttttttctggtgagattgcacctggataccaggcttttgtaatagttaacattaaacatttgattcataaagttaattcactgcttaagcatgtggctcatatttaggaagctatataaaattcagtttttcatttaacatttgctcttttgcatatgaagagatatttgtatttttcaaatgttaagtaaaacaagatgtgccaatatcataggtaaataaattagggaaaatgtgggactttatggctgtttttaatttagtttcacccgatcttgattcttgaattagctatgtttatatttttagttcttttttattcaactcagatttgtcaagaaatgtaacctctaaattgtgtagtacctctccaatcataaattttcaaaaaaaaattctactttccaaaaagtgtcttgaattctctgaaaaggcacattaaactaatatgaacatcagataccagggggaaataaatggcaaagtaataatcatgaggttttaggtcaaagactacattatatatattttttattaccttctagtagagacatcctcctgggtgcatttcagtggccttctccagggaggaggtttatttacttactgatgagtttctcgtcacgtcaaaaccagttcacatttgtctggctgctctttggttgtcttcattcgttatttatttctaacactgtattaaattgttagaaaagaaagtaaaacttgcacattcaaagcacatgatttgtacagtcacacctggcagtagcactgcacagttacaaatatgcacacacgttaactgctatgcataaatattgacagttaaaccagaacacaattgaaacagtgacataaatacctacaggattcagaattgttccagggtaatataaattattctacttgttcactctccccaccctcttgaacttgttagaagatttgctgctttagcagaatctttccaagattgagaaaagtgtatcaacctaggattttcattactatatagtcacataaatggaggaggagatatatttggcttctgcctctgcaacaattagtatgaacatatttctttctctagggaataataggttttaaacatttgagatatcatgaagcaaagtcagggtataccactacaatccccactaatctctattcccacattatgaaattgtacagaagaaagggtgtcattaaatcaaggtatccagataattcatggctactttaactattttttcattcgtgttaactgagccccccatattttttactacttaaccttaaatatgccatcactaatttatgaatagaacattgtgtttgcacttttcctgacctatcctcaccccctttcctgatcctttttgcattcacctagcacaccttaagagacaaaaaatcaggttttagtgtatttcacattggaagacatgatgttttctcagtataaatctacaggactcataaacaatcacttttttggtgccaagtttcaaccctttagctcatggactcattggcctcagcctaatactaagaaacaagtaaaataattagattttctatgtttgaatgtgcactttaaaaaatctagataatttatactcattcttttctggctgtacaacatgacaatcaagaatatagaaaagaagactaaaagatatatgatataaatgtaagtttttatgtagatgacataaatatgaagagatattcttggtcagttggttgaaacattttttatctaaaacacctttaaaaaatccctttcatatgtagaatgtggaaggcttttaataaaacaaaaattattatttttaggcttaatttaatagggagattggatgcatagtggaaagggaactaatatttatatgttatgcattttgcttatgtaatgcctttcaatatgaaaaccaaaaccatggcagaattattactagcttgatatgacagatgagtgaaaacaaaaaacaagctcagcagactacccaaagttaaaaggtagtatgaaccaaaattaaaactcaggtttacgtaaccagaaagatccccgaggtgttcactaccgtgctgcctcccaatagaggccagagaagcaaaggaagataaaatataggtacaaaaaagatacatcctatatagtaaaacaattaggtttaactgtaacttgtattatgatttatttagtgtttattagagaactgcatttgctagaacctgaatatgtaatttctttctttctttctttttttttttttttgagactgagtctcgttcttgtcgcccaggctggcgtgcagtggcacaatctcggcttactacaacctctgcctcccaggttcaagcaattctcctgcctcagcctcccgagtaactggaattacaggcatgtgccaccatgcccggctaattttgtggctttttttgttttgttttgttttgttttgttttagtagagatggggtttctccttgttggtcaggctggtcttgaactctgacctcaggtgattcactcgcctctgcctcccaaagtgctgggattacaggcgtgagccactgcgcccagccttgaatatgtaatttctgattgcctgcttttctccccaatgcaaattatctcaaataatgataattattacatatagacataattacttcaatatgactctttttctcataaaaataatgacatatttgagtcaggcataatacattttttctgaggttggagttagcaggaaaatgttatcttttatgaataaataattcccagattggttgctacatatcatgattcaaaaagtaaaataattacctggatgtggtgatgtgcacctgtagtcccagctactcgggaggctgagacgagagggtcatttgagcccaggaagttgaggcttcagtgagctataatggccccacttgcagtccagcctaggcaatagagtgagaatctgtctctattaaaaaaaaaataaaatgttcttactagaaaacattatatttagaattttagtgattattccatttataatattatccgtagctaccaaaaaaaagattataagatacaaatgatttggtttacccatacagttacatattaattttcatcatttaatacaacttaccctacaccgtagcttatttttcaagtttctctgaacatctttgttgtcattcacctctttgtctatttgttctgtagagaaaacaagtgtcattgcttttgtcttctccatctagacttttgcagtccttagactatagttctccttagctctattcaaatagtgcacttgcaaggcgctgcattcttctcaaagtcagccatgatgcacatatttataattacatacacatataattgaatatgattttagagtcttgaaaaactgatcttctttggcactatcctgaatgtttctgattttcttaaagtgcctgacaatattgagtaacaaagcttaccatcaccacattgcaccattatgtattattctgtctccatcaatgcagtgacatcactgatacatcataccaacaagatttctaaccacaaccattcagagcactaattagcatctatattgagaatataagattaatattacaaacttgactttactcatctctctttaagattttgatttctgcacaaccatatgcagaactcatgtttgagaaggcacttaaaagctgaaaggcccaattatcagtaattataatgcttgcatgatcaaaattacaaattatctttgttgatacaattaaaaatgagtaattttctgagcttatgtcacttttttatagttctgattttctcttctttcctatcagttgtttgtacactggagattttagctctttacagggtgctacaatctggtttattttagtcttctctcctctactgctttttcttcactttaattcatttatgtgcaaatcagggaagaattgctgtagtattgagaatggtcattttaaaagtctctaccttaagagcaaaattaatattgcaaaatgaatttttgattttacagaagcatatgggaatttagatcaaattacatctcccatcccaatctcctgcttcttcatcatctcctaaatgttttcctttctatgtttttataatatctaggtaaaacttgtttagcattttttatttaattatggacatatttagtatggacttttgtttctttggtatagttagttacacttgtttgcatgatctacatgtttttcagtctccatatatacttgttaataaggtgagcaatattcaggaatatttcagtaggcaattaatgatcataaatttattcacatttcagtaaatatttttcacatgatcaaacaggattttttgtttctttttaatttaaatatggcaaaataagctagagaatctcagtgtgaaaacactgatactgaacattctattaaaatagaataagttcgtgtagggacatggatgaaattagaaatcatcattctcagtaaactatcgcaagaacaaaaaaccaaacaccgcatattctcactcataggtgggaactgaacaatgagaacacatggacacaggaaggggaacatcacactctggggactgtggtggggtcgggggaggggggagggatagcattgggagatatacctaatgctaggtgacgagttagtgggtgcagcgcaccagcatggcacatgtatacatatgtaactaacctgcacattgtgcacatgtaccctaaaacttaaagtataataataataaataaaataaaataaaataataaaaataaaaataaaatagaataagttgataaaagctcctctgttcagaaaaacaaaagaatggcattttatctcacataaatttaggatgaaattttaaaacattcttttgactaagactttaattcttatatgcatctaaaataaatgttttgagttagactcagtttatatagcttcctcgttagagtacacattttttttctcatcctccgaatctcaagagtacatatttctgacaagcttttcaatggtacgatggattttatttttctatcatcaactttctatatttaactaaagcattagtatttctagatttagtgaaatagcaaatatgaattaaaatatttatttctaaacattagatctaattgtattttgatttgttttgatatatttatgtctcagaagatatgtttaatgaattcatttcatcctctcaaccctcagttttgataggtatccacatttttaccatataaaactagactggattaaggattttgcctaaacctataccaatactctgaataaatgcagggttggagatagaattcaggtcttttaacttctaacacacttttttctccattgcactacagaagccgtaaggtcataatgatgatctttgtagagtaaataaaatattttcctagaaatatatataacaaccctacttgatagtttatagcccaaatgaatatatttttccaatcatggtttgcaaaatcatgtttgcaaacttactttgaagactatttcctgattgccacggcagataattcgtggcaaatcagaaataatatttagtgagattaattattttgcacaatatatgttgttatagcaatatcaaaatcatttaaaacatcaatattgtattaatagaaaacatgtcaatatctcattaattccttttttattttatgttcctttttattttagaagcagtgttcatttttttctgaagtagaacgccagagcacagaacacacagttcaagtttaaattattaaattgtatgcaagaaattattgccatagcatagtcttgaggagaacacctctacagtatttcttgatctaagaacctgaacatatgttaatgaaattattagagtaagttctatctcaaaaatttcttattttatgaatgttttcttcacctaataaacaatactaaaatccataacagctgtctggcaacagtgtaattagagcttcttttatgttagagattccatctacctctgcatcttatctagctagatacagtctttctaaactttctcctttattcccatgtagagaacaaacaaaaatcacacctaaattaaagatctgtggtgaaggggaagaggggttgctattaggagttttcccggtaaaactgtaaaaacagtaatctgcattcagtatttgtttgcctagttcatcaagatatttaccctaaaaacacattttaataaaaatttgggtaaactcatgtatcgcagtaaaatcttttatgaattgggtgggccctaaaaacatctgtagtacgtgatgtgtttggttagattcagccaaaccgacacccgtatgctaagactgcattgtcattctgacaggaggcaggcctcagtagttgcagtgagtgcatttactaatataaggatccttctttgtagtgacaacaaaaatgagattgtaacttaatcaaatatgagtcagatatagtaattcctgatattgcagatgaaagagcagggtcttttcaagtgcttgctacaactgactaaatttgaagctttttatgtaaaagttcttctcccagatattttaaaccagtatgttaattatttcctagaatgaataattctccttttttgatagatttttgaaattgttttacttactacttacatactttgaacaaatatgtttttctaatcccagcattaaattgaaacaaatatttaaaataagattgttggaataaaagttatagatagtcacttgttgctaataaaagacattccttggcaacagccacatccagctaacttttgcaagaattttttaagggattagatttaggggttaatgtttagaattatttttaaaatataaattatattttaggctgtatttttgtgatttttaagtgaaaaaaataaaatgtagttgtcttgtttattctatagatatcttaatgaccactgaacaaatgatcatattgccacatggtctatcaactatggttactatgatagtgaaataaagaggatagttttgcttgacacctaaatgatccaaacagttgtttttacatgacttaaatcatggctgtattatttcatttttaaagaaaataaagtataaaataatacatttaaaatacctgtcaaagttttaaaatataagatagaaccttctttttttgccttcttacacatgaatgtacttaaagtattgttatgtgatcttgggatacttatttatttttgaaatttttgtatatatagcatttctgaacttagcaaataatatgtgtaaaggaattaaccaaaaatgaaagaactggcattttcatatggatacatattttgcttaaactaaataaaataacttagatttatttaaatcaggaatattttacgttgttgatcatttttaaagtatattttgttcaaatattcctaatttgtttttcagcacacttgtttaagttcttgcctttcaggtatactacagcgttatatgaacataatgttttaaaaaaatcttggttgtagtttctaattttcactgcataacaaatttgaaaccaaatgttgaatttctctgtgagggtacttattttgcctacagtttcaaatatattttcaaattcatctctttcttactagactgtgagctccttgtggacaaggatgttattttagttataatgacaactttaatatctagcaaagtgccaggcatagagtattcctttattgaaatgaattgatagatattgattattaaaatgctactacagtattctacgatgcaggctgaatgtatattacagtaattctctggctaattttaaaagtaagacatagaaaacaaaacacctgtagcattttctttatttaaaattgaaactctgttttgaatcctttttattttgtcaaacattctatgcaaatattgaaatatgcaacagctaaactttatggtacatattaattagttttattttcttttcaaaatcagaaatgctgtatttaagcttcctggaaatgtcgacaatcattttaatgaccaaaggtgctacttatttttcaacattgaccttgatcataagtgcttctatctgctgagctttatttattgtttttggacagaaagtttggtgggaaggttgcaataaaatcagaatctctcttgtctgaattatgcagtttaaccctgtccatgttcctctgtactctattcttactgtattttagttattgtttcttacttatcactaatttttactgcaggtctgtgctgtttcttagaaagtacatgcatatatatttctataatatgtaagaaaaaacctgtattgcttattaaattaaaattaaaataaaaaaattcatgttaaatttttgaaatgaaa

SEQ ID NO: 182985 - DNA, 1603 bp, Homo sapiens
  Payload ID: 16046
  Gene Symbol: SLC16A7
  Gene Name: solute carrier family 16 (monocarboxylate transporter), member 7
  ENST ID: ENST00000548610
  CDS Start-End: 298-1603
accttctttgacccatgatataatttaagccaagcttactttagactctgaaaagtatgaactaatagtgcacgtcaaagcaggttcttgaaaaagagaaataactaactttgccctatttgagagaagagagaggggagggcaaagcagagtctctggagatatgtatgtaagtttgcttgtggctaaaagttaatgatcagttgcctctcttcttagccctgagcctggagaaaagtgtcaaacgcaggttctctctctattcaggttacttgaatttccactagaggagcagaaatgccaccaatgccaagtgccccacctgtgcatccacctccagatggaggatggggttggattgtggttggagcagcttttatctccattggattttcctatgcattccccaaagctgtcaccgtattcttcaaagaaattcagcaaatattccacactacctacagtgaaatagcatggatttcatccattatgctggctgttatgtacgcaggaggtcctgtaagtagtgttttggtgaataaatacggcagccggccggtggtgatagcaggaggcttattatgctgtcttggaatggtgttggcctcctttagtagcagcgtggtacagctgtacctcactatgggattcattacaggtttaggtttagccttcaacctgcaacccgccttaaccataattggcaaatacttctataggaagcgacccatggcaaatggattggccatggcaggaagtcctgttttcttaagttcattggctcctttcaatcagtacctttttaatacttttggctggaaaggaagcttcctgattttgggaagtctacttttgaatgcctgtgtggctggttccctcatgagaccccttggacccaatcaaaccacttctaagtctaaaaataagactggcaaaacagaagatgattcaagcccaaagaaaatcaaaacgaagaaatcaacttgggaaaaagttaataagtatttagatttctccctttttaagcatagaggatttctgatatatctgtctggaaatgtcattatgttcctaggtttttttgcccccattatattcttggctccatatgctaaagaccaaggaattgatgagtactcggcagcttttctgctatctgttatggctttcgttgatatgtttgctaggccttctgtaggattaattgcaaactccaaatatattcgacctcgaattcagtacttcttcagttttgcaatcatgttcaatggagtgtgtcacctcttgtgcccactggcacaggactacacaagcctggtattatatgctgtattttttggccttggatttgggagtgttagcagtgttctctttgaaactctcatggacctcgtgggtgcaccaagattttccagtgccgtcggacttgtcacaattgtggagtgtggcccagttcttcttggccctcctcttgcaggtaaattggtggatttaactggagaatataaatacatgtacatgtcctgtggggctattgtggtagcagcaagcgtgtggctgctcattggcaatgctatcaactatagattgcttgcaaaggaaa

SEQ ID NO: 182986 - DNA, 1878 bp, Homo sapiens
  Payload ID: 16046
  Gene Symbol: SLC16A7
  Gene Name: solute carrier family 16 (monocarboxylate transporter), member 7
  ENST ID: ENST00000549033
  CDS Start-End: 149-574
aaaaagagcaatggttcacaaggaaacttctgcctcaggtggggagaggagtccatagatcagggaaacttatgtcttggtgaaatggaagaccatgtttctaaacacctgtcgccaggttacttgaatttccactagaggagcagaaatgccaccaatgccaagtgccccacctgtgcatccacctccagatggaggatggggttggattgtggttggagcagcttttatctccattggattttcctatgcattccccaaagctgtcaccgtattcttcaaagaaattcagcaaatattccacactacctacagtgaaatagcatggatttcatccattatgctggctgttatgtacgcaggaggtagaatatttgaaagctttttgatcttcacatccttgaggattcagtgcagctttactcaatcaggatcatgcctagctgccgtacataatgactcctctgatgaatctgggaaaaggagatggaaaatcttctggaaaggatttgctattctagataacatcacgatcattcactgttatgggaggaggtcaaaataccaacattaacagaagtttggaagaagtttatttcaatcctcatgggtgactttaagaggctcaggacttcagtgaagtcctgtaagtagtgttttggtgaataaatacggcagccggccggtggtgatagcaggaggcttattatgctgtcttggaatggtgttggcctcctttagtagcagcgtggtacagctgtacctcactatgggattcattacaggtttaggtttagccttcaacctgcaacccgccttaaccataattggcaaatacttctataggaagcgacccatggcaaatggattggccatggcaggaagtcctgttttcttaagttcattggctcctttcaatcagtacctttttaatacttttggctggaaaggaagcttcctgattttgggaagtctacttttgaatgcctgtgtggctggttccctcatgagaccccttggacccaatcaaaccacttctaagtctaaaaataagactggcaaaacagaagatgattcaagcccaaagaaaatcaaaacgaagaaatcaacttgggaaaaagttaataagtatttagatttctccctttttaagcatagaggatttctgatatatctgtctggaaatgtcattatgttcctaggtttttttgcccccattatattcttggctccatatgctaaagaccaaggaattgatgagtactcggcagcttttctgctatctgttatggctttcgttgatatgtttgctaggccttctgtaggattaattgcaaactccaaatatattcgacctcgaattcagtacttcttcagttttgcaatcatgttcaatggagtgtgtcacctcttgtgcccactggcacaggactacacaagcctggtattatatgctgtattttttggccttggatttgggagtgttagcagtgttctctttgaaactctcatggacctcgtgggtgcaccaagattttccagtgccgtcggacttgtcacaattgtggagtgtggcccagttcttcttggccctcctcttgcaggtaaattggtggatttaactggagaatataaatacatgtacatgtcctgtggggctattgtggtagcagcaagcgtgtggctgctcattggcaatgctatcaactatagattgcttgcaaaggaaaggaaggaggaaaatgcaaggcagaagaccagagaatctgaacccttgagcaaatctaaacattcggaagatgttaacgtcaaagtttcaaatgcacagagtgtaacctcagaaagagaaactaacatttaacaagaatcacatctctg

SEQ ID NO: 182987 - DNA, 537 bp, Homo sapiens
  Payload ID: 16046
  Gene Symbol: SLC16A7
  Gene Name: solute carrier family 16 (monocarboxylate transporter), member 7
  ENST ID: ENST00000549465
  CDS Start-End: 205-441
cagcgaggcgaatcggctgcggtttgctgggaacggagggctgcagcgcccaccctgcgccagagaccagataaagagtcaatcttaagatgtgatactttcctgtgaaacctgaaacaaggtgatctggggaaccaaagactctgggactcttggtgccaacagagttactctgttacttgaatttccactagaggagcagaaatgccaccaatgccaagtgccccacctgtgcatccacctccagatggaggatggggttggattgtggttggagcagcttttatctccattggattttcctatgcattccccaaagctgtcaccgtattcttcaaagaaattcagcaaatattccacactacctacagtgaaatagcatggatttcatccattatgctggctgttatgtacgcaggaggttggtatcatatgcaatagctgtatattccatcagttgattgacgtgttattatgggatcgctgtctaaagaacacaattggaaagataataaatttgttccagtttggaatctt

SEQ ID NO: 182988 - DNA, 797 bp, Homo sapiens
  Payload ID: 16046
  Gene Symbol: SLC16A7
  Gene Name: solute carrier family 16 (monocarboxylate transporter), member 7
  ENST ID: ENST00000548444
  CDS Start-End: 403-797
agtcagcagccatcaacatcaaaacaggaccctccaccagcaaaaagactgaaaatcactgaaggctgagatgatcattaacattttttagcaataaaatatttttaattgttatgcacactttttagatataattcaatgcacacttaatatagtgtgtaaagtgtaaacgtaacttttatatgcactgagaaaccaaaaaatttgtgactcactttattgcaatattcactttatcaaggttctctggaacctcacctgcagtgtctctgaggtcctgtaagtagtgttttggtgaataaatacggcagccggccggtggtgatagcaggaggcttattatgctgtcttggaatggtgttggcctcctttagtagcagcgtggtacagctgtacctcactatgggattcattacaggtttaggtttagccttcaacctgcaacccgccttaaccataattggcaaatacttctataggaagcgacccatggcaaatggattggccatggcaggaagtcctgttttcttaagttcattggctcctttcaatcagtacctttttaatacttttggctggaaaggaagcttcctgattttgggaagtctacttttgaatgcctgtgtggctggttccctcatgagaccccttggacccaatcaaaccacttctaagtctaaaaataagactggcaaaacagaagatgattcaagcccaaagaaaatcaaaacgaagaaatcaacttgggaaaaagttaataagtatttagatttctccctttttaagcatagaggatt

SEQ ID NO: 182989 - DNA, 1969 bp, Homo sapiens
  Payload ID: 16046
  Gene Symbol: SLC16A7
  Gene Name: solute carrier family 16 (monocarboxylate transporter), member 7
  Uniprot ID: O60669
  ENST ID: ENST00000547379
  CDS Start-End: 223-1659
attccattcacccgttgacagcgaggcgaatcggctgcggtttgctgggaacggagggctgcagcgcccaccctgcgccagagaccagataaagagtcaatcttaagatgtgatactttcctgtgaaacctgaaacaaggtgatctggggaaccaaagactctgggactcttggtgccaacagagttactctgttacttgaatttccactagaggagcagaaatgccaccaatgccaagtgccccacctgtgcatccacctccagatggaggatggggttggattgtggttggagcagcttttatctccattggattttcctatgcattccccaaagctgtcaccgtattcttcaaagaaattcagcaaatattccacactacctacagtgaaatagcatggatttcatccattatgctggctgttatgtacgcaggaggtcctgtaagtagtgttttggtgaataaatacggcagccggccggtggtgatagcaggaggcttattatgctgtcttggaatggtgttggcctcctttagtagcagcgtggtacagctgtacctcactatgggattcattacaggtttaggtttagccttcaacctgcaacccgccttaaccataattggcaaatacttctataggaagcgacccatggcaaatggattggccatggcaggaagtcctgttttcttaagttcattggctcctttcaatcagtacctttttaatacttttggctggaaaggaagcttcctgattttgggaagtctacttttgaatgcctgtgtggctggttccctcatgagaccccttggacccaatcaaaccacttctaagtctaaaaataagactggcaaaacagaagatgattcaagcccaaagaaaatcaaaacgaagaaatcaacttgggaaaaagttaataagtatttagatttctccctttttaagcatagaggatttctgatatatctgtctggaaatgtcattatgttcctaggtttttttgcccccattatattcttggctccatatgctaaagaccaaggaattgatgagtactcggcagcttttctgctatctgttatggctttcgttgatatgtttgctaggccttctgtaggattaattgcaaactccaaatatattcgacctcgaattcagtacttcttcagttttgcaatcatgttcaatggagtgtgtcacctcttgtgcccactggcacaggactacacaagcctggtattatatgctgtattttttggccttggatttgggagtgttagcagtgttctctttgaaactctcatggacctcgtgggtgcaccaagattttccagtgccgtcggacttgtcacaattgtggagtgtggcccagttcttcttggccctcctcttgcaggtaaattggtggatttaactggagaatataaatacatgtacatgtcctgtggggctattgtggtagcagcaagcgtgtggctgctcattggcaatgctatcaactatagattgcttgcaaaggaaaggaaggaggaaaatgcaaggcagaagaccagagaatctgaacccttgagcaaatctaaacattcggaagatgttaacgtcaaagtttcaaatgcacagagtgtaacctcagaaagagaaactaacatttaacaagaatcacatctctgatttcagtgtttatgactttatctaggagtttgtttttcattttgtttttttaaagtattagaaaaggttttagctgaaatgaggagtcacaattaaggatggaggtgatattttcctcaatggcaaattttaaattagtttttaaaaacttacttatttgggtagttaaattttgagattatgcatagaaagaatccatgctataggtttatttccatacctgactctgggtgtggtggttaaaatactaattttaaagtcttccagtgactttcggtcttggttatatgga

SEQ ID NO: 182990 - DNA, 1815 bp, Homo sapiens
  Payload ID: 16046
  Gene Symbol: SLC16A7
  Gene Name: solute carrier family 16 (monocarboxylate transporter), member 7
  Uniprot ID: O60669
  ENST ID: ENST00000552024
  CDS Start-End: 373-1809
agcggatgctgcatcgcggcgcccttctccacccccttttctcctctacttccgcgaaaaggattgcagactgccttggaaagggcggtcgtgcccagtgccactttcccggagtcaatcttaagatgtgatactttcctgtgaaacctgaaacaaggtgatctggggaaccaaagactctgggactcttggtgccaacagagttactctataatccaaaatctactctacatcttttcctttgtattgccttcaaatatcactcttcaaagtttagtgactaggcttaaagattccacatataatccaaagaaatctgttcaagtggacatctatcaacacgttacttgaatttccactagaggagcagaaatgccaccaatgccaagtgccccacctgtgcatccacctccagatggaggatggggttggattgtggttggagcagcttttatctccattggattttcctatgcattccccaaagctgtcaccgtattcttcaaagaaattcagcaaatattccacactacctacagtgaaatagcatggatttcatccattatgctggctgttatgtacgcaggaggtcctgtaagtagtgttttggtgaataaatacggcagccggccggtggtgatagcaggaggcttattatgctgtcttggaatggtgttggcctcctttagtagcagcgtggtacagctgtacctcactatgggattcattacaggtttaggtttagccttcaacctgcaacccgccttaaccataattggcaaatacttctataggaagcgacccatggcaaatggattggccatggcaggaagtcctgttttcttaagttcattggctcctttcaatcagtacctttttaatacttttggctggaaaggaagcttcctgattttgggaagtctacttttgaatgcctgtgtggctggttccctcatgagaccccttggacccaatcaaaccacttctaagtctaaaaataagactggcaaaacagaagatgattcaagcccaaagaaaatcaaaacgaagaaatcaacttgggaaaaagttaataagtatttagatttctccctttttaagcatagaggatttctgatatatctgtctggaaatgtcattatgttcctaggtttttttgcccccattatattcttggctccatatgctaaagaccaaggaattgatgagtactcggcagcttttctgctatctgttatggctttcgttgatatgtttgctaggccttctgtaggattaattgcaaactccaaatatattcgacctcgaattcagtacttcttcagttttgcaatcatgttcaatggagtgtgtcacctcttgtgcccactggcacaggactacacaagcctggtattatatgctgtattttttggccttggatttgggagtgttagcagtgttctctttgaaactctcatggacctcgtgggtgcaccaagattttccagtgccgtcggacttgtcacaattgtggagtgtggcccagttcttcttggccctcctcttgcaggtaaattggtggatttaactggagaatataaatacatgtacatgtcctgtggggctattgtggtagcagcaagcgtgtggctgctcattggcaatgctatcaactatagattgcttgcaaaggaaaggaaggaggaaaatgcaaggcagaagaccagagaatctgaacccttgagcaaatctaaacattcggaagatgttaacgtcaaagtttcaaatgcacagagtgtaacctcagaaagagaaactaacatttaacaagaa

SEQ ID NO: 182991 - DNA, 544 bp, Homo sapiens
  Payload ID: 16046
  Gene Symbol: SLC16A7
  Gene Name: solute carrier family 16 (monocarboxylate transporter), member 7
  ENST ID: ENST00000549305
  CDS Start-End: 131-385
caaggaaacttctgcctcaggtggggagaggagtccatagatcagggaaacttatgtcttggtgaaatggaagaccatgtttctaaacacctgtcgccaggttacttgaatttccactagaggagcagaaatgccaccaatgccaagtgccccacctgtgcatccacctccagatggaggatggggttggattgtggttggagcagcttttatctccattggattttcctatgcattccccaaagctgtcaccgtattcttcaaagaaattcagcaaatattccacactacctacagtgaaatagcatggatttcatccattatgctggctgttatgtacgcaggagcaggtcccaagctcccatctcacctccaggaagaatgaagcacatggacaaccggagagcgagcaaggcagagaggagcttcactgagcaacaaaacaactcttaggagagccacggaaaaaaggagaagcggaatgcatcattcaccctttaaagagatcaccatctacttgaggtagaatatttgaaagcttttt

SEQ ID NO: 182992 - DNA, 1715 bp, Homo sapiens
  Payload ID: 16046
  Gene Symbol: SLC16A7
  Gene Name: solute carrier family 16 (monocarboxylate transporter), member 7
  ENST ID: ENST00000549928
  CDS Start-End: 132-386
acaaggaaacttctgcctcaggtggggagaggagtccatagatcagggaaacttatgtcttggtgaaatggaagaccatgtttctaaacacctgtcgccaggttacttgaatttccactagaggagcagaaatgccaccaatgccaagtgccccacctgtgcatccacctccagatggaggatggggttggattgtggttggagcagcttttatctccattggattttcctatgcattccccaaagctgtcaccgtattcttcaaagaaattcagcaaatattccacactacctacagtgaaatagcatggatttcatccattatgctggctgttatgtacgcaggaggaaaaaaggagaagcggaatgcatcattcaccctttaaagagatcaccatctacttgaggtagaatatttgaaagctttttgatcttcacatccttgaggattcagtgcagctttactcaatcaggatcatgcctaggtcctgtaagtagtgttttggtgaataaatacggcagccggccggtggtgatagcaggaggcttattatgctgtcttggaatggtgttggcctcctttagtagcagcgtggtacagctgtacctcactatgggattcattacaggtttaggtttagccttcaacctgcaacccgccttaaccataattggcaaatacttctataggaagcgacccatggcaaatggattggccatggcaggaagtcctgttttcttaagttcattggctcctttcaatcagtacctttttaatacttttggctggaaaggaagcttcctgattttgggaagtctacttttgaatgcctgtgtggctggttccctcatgagaccccttggacccaatcaaaccacttctaagtctaaaaataagactggcaaaacagaagatgattcaagcccaaagaaaatcaaaacgaagaaatcaacttgggaaaaagttaataagtatttagatttctccctttttaagcatagaggatttctgatatatctgtctggaaatgtcattatgttcctaggtttttttgcccccattatattcttggctccatatgctaaagaccaaggaattgatgagtactcggcagcttttctgctatctgttatggctttcgttgatatgtttgctaggccttctgtaggattaattgcaaactccaaatatattcgacctcgaattcagtacttcttcagttttgcaatcatgttcaatggagtgtgtcacctcttgtgcccactggcacaggactacacaagcctggtattatatgctgtattttttggccttggatttgggagtgttagcagtgttctctttgaaactctcatggacctcgtgggtgcaccaagattttccagtgccgtcggacttgtcacaattgtggagtgtggcccagttcttcttggccctcctcttgcaggtaaattggtggatttaactggagaatataaatacatgtacatgtcctgtggggctattgtggtagcagcaagcgtgtggctgctcattggcaatgctatcaactatagattgcttgcaaaggaaaggaaggaggaaaatgcaaggcagaagaccagagaatctgaacccttgagcaaatctaaacattcggaagatgttaacgtcaaagtttcaaatgcacagagtgtaacctcagaaagagaaactaacatttaacaagaatcac

SEQ ID NO: 182993 - DNA, 605 bp, Homo sapiens
  Payload ID: 16046
  Gene Symbol: SLC16A7
  Gene Name: solute carrier family 16 (monocarboxylate transporter), member 7
  ENST ID: ENST00000546459
  CDS Start-End: 154-408
attctaaaaagagcaatggttcacaaggaaacttctgcctcaggtggggagaggagtccatagatcagggaaacttatgtcttggtgaaatggaagaccatgtttctaaacacctgtcgccaggttacttgaatttccactagaggagcagaaatgccaccaatgccaagtgccccacctgtgcatccacctccagatggaggatggggttggattgtggttggagcagcttttatctccattggattttcctatgcattccccaaagctgtcaccgtattcttcaaagaaattcagcaaatattccacactacctacagtgaaatagcatggatttcatccattatgctggctgttatgtacgcaggaggaaaaaaggagaagcggaatgcatcattcaccctttaaagagatcaccatctacttgaggtagaatatttgaaagctttttgatcttcacatccttgaggattcagtgcagctttactcaatcaggatcatgcctagctgccgtacataatgactcctctgatgaatctgggaaaaggagatggaaaatcttctggaaaggatttgctattctagataacatcacgatcattcac

SEQ ID NO: 182994 - DNA, 2250 bp, Homo sapiens
  Payload ID: 16046
  Gene Symbol: SLC16A7
  Gene Name: solute carrier family 16 (monocarboxylate transporter), member 7
  Uniprot ID: O60669
  ENST ID: ENST00000552432
  CDS Start-End: 280-1716
tccccttcccgccaccgcctccttctccgctggctgtggcgggcgaggacacgtcaggggccataaataaataaataattccattcacccgttgacagcgaggcgaatcggctgcggtttgctgggaacggagggctgcagcgcccaccctgcgccagagaccagataaagagtcaatcttaagatgtgatactttcctgtgaaacctgaaacaaggtgatctggggaaccaaagactctgggactcttggtgccaacagagttactctaggagcagaaatgccaccaatgccaagtgccccacctgtgcatccacctccagatggaggatggggttggattgtggttggagcagcttttatctccattggattttcctatgcattccccaaagctgtcaccgtattcttcaaagaaattcagcaaatattccacactacctacagtgaaatagcatggatttcatccattatgctggctgttatgtacgcaggaggtcctgtaagtagtgttttggtgaataaatacggcagccggccggtggtgatagcaggaggcttattatgctgtcttggaatggtgttggcctcctttagtagcagcgtggtacagctgtacctcactatgggattcattacaggtttaggtttagccttcaacctgcaacccgccttaaccataattggcaaatacttctataggaagcgacccatggcaaatggattggccatggcaggaagtcctgttttcttaagttcattggctcctttcaatcagtacctttttaatacttttggctggaaaggaagcttcctgattttgggaagtctacttttgaatgcctgtgtggctggttccctcatgagaccccttggacccaatcaaaccacttctaagtctaaaaataagactggcaaaacagaagatgattcaagcccaaagaaaatcaaaacgaagaaatcaacttgggaaaaagttaataagtatttagatttctccctttttaagcatagaggatttctgatatatctgtctggaaatgtcattatgttcctaggtttttttgcccccattatattcttggctccatatgctaaagaccaaggaattgatgagtactcggcagcttttctgctatctgttatggctttcgttgatatgtttgctaggccttctgtaggattaattgcaaactccaaatatattcgacctcgaattcagtacttcttcagttttgcaatcatgttcaatggagtgtgtcacctcttgtgcccactggcacaggactacacaagcctggtattatatgctgtattttttggccttggatttgggagtgttagcagtgttctctttgaaactctcatggacctcgtgggtgcaccaagattttccagtgccgtcggacttgtcacaattgtggagtgtggcccagttcttcttggccctcctcttgcaggtaaattggtggatttaactggagaatataaatacatgtacatgtcctgtggggctattgtggtagcagcaagcgtgtggctgctcattggcaatgctatcaactatagattgcttgcaaaggaaaggaaggaggaaaatgcaaggcagaagaccagagaatctgaacccttgagcaaatctaaacattcggaagatgttaacgtcaaagtttcaaatgcacagagtgtaacctcagaaagagaaactaacatttaacaagaatcacatctctgatttcagtgtttatgactttatctaggagtttgtttttcattttgtttttttaaagtattagaaaaggttttagctgaaatgaggagtcacaattaaggatggaggtgatattttcctcaatggcaaattttaaattagtttttaaaaacttacttatttgggtagttaaattttgagattatgcatagaaagaatccatgctataggtttatttccatacctgactctgggtgtggtggttaaaatactaattttaaagtcttccagtgactttcggtcttggttatatggagaattctgaatcccaaacccctggtttaagtaggtagaaggaggatgcctaatcctacaaagtgaccctttatacatttcattttttatttgatattaaagtatgagatagagttgagagacaattaattatcccctcttacacacaaacacacatactcccacatacttacccacatgtacacagagtatctggagaataaaacccaaattcaaaaaaaaaaa

SEQ ID NO: 182995 - DNA, 505 bp, Homo sapiens
  Payload ID: 16046
  Gene Symbol: SLC16A7
  Gene Name: solute carrier family 16 (monocarboxylate transporter), member 7
  ENST ID: ENST00000551877
  CDS Start-End: 140-391
aatggttcacaaggaaacttctgcctcaggtggggagaggagtccatagatcagggaaacttatgtcttggtgaaatggaagaccatgtttctaaacacctgtcgccaggttacttgaatttccactagaggagcagaaatgccaccaatgccaagtgccccacctgtgcatccacctccagatggaggatggggttggattgtggttggagcagcttttatctccattggattttcctatgcattccccaaagctgtcaccgtattcttcaaagaaattcagcaaatattccacactacctacagtgaaatagcatggatttcatccattatgctggctgttatgtacgcaggaggtcccaagctcccatctcacctccaggaagaatgaagcacatggacaaccggagagcgagcaaggcagagaggagcttcactgagcaacaaaacaactcttaggagagccacgactacccagaactgacagtctgacccccaggcctca

SEQ ID NO: 182996 - DNA, 571 bp, Homo sapiens
  Payload ID: 16046
  Gene Symbol: SLC16A7
  Gene Name: solute carrier family 16 (monocarboxylate transporter), member 7
  ENST ID: ENST00000550062
  CDS Start-End: 77-370
aggattctaaaaagagcaatggttcacaaggaaacttctgcctcaggttacttgaatttccactagaggagcagaaatgccaccaatgccaagtgccccacctgtgcatccacctccagatggaggatggggttggattgtggttggagcagcttttatctccattggattttcctatgcattccccaaagctgtcaccgtattcttcaaagaaattcagcaaatattccacactacctacagtgaaatagcatggatttcatccattatgctggctgttatgtacgcaggaggaagaatgaagcacatggacaaccggagagcgagcaaggcagagaggagcttcactgagcaacaaaacaactcttaggagagccacgactacccagaactgacagtctgacccccaggcctcaggctgtctctggattaaaggtggggtttcaccaaggatccacccctttctgcccaggaatctgtctgcctcccaccatcaacatgccctccatggcacccaggaaaaaaggagaagcggaatgcatcattcaccctttaaagagatcaccatcta

SEQ ID NO: 182997 - DNA, 1878 bp, Homo sapiens
  Payload ID: 16047
  Gene Symbol: SLC16A8
  Gene Name: solute carrier family 16 (monocarboxylate transporter), member 8
  Uniprot ID: O95907
  ENST ID: ENST00000320521
  CDS Start-End: 110-1624
cagttgtccttcagagggagcctgcagaggtgcagagtcaggtgggacccgtcgtcctcccctcgtccttcagcgccctttgcaggagaaggagacttgggaggcagcgatgggcgctggcggcccccggcggggcgagggccccccagacggcggctggggctgggtggtgctgggcgcctgctttgtggtcaccggcttcgcctacggcttccccaaagccgtgagcgtcttcttccgcgcgctcatgcgcgacttcgacgccggctacagcgacacggcctgggtgtcctccatcatgctagccatgctctacggcacgggccccgtgtccagcatcctcgtgacccgctttggctgtcgcccggtgatgctggcgggtgggctgctggcttccgcgggcatgatcctagcttcctttgccacgcgcctcctggagctctacctgaccgctggggtgctcacaggcctgggcctggccctcaacttccagccgtcgctcatcatgctggggctgtacttcgagcggcggcggcctctggccaacgggctggcggcggcgggcagccccgtgttcctgtccgcgctgtcgccgctcggccagcagctgctggagcgcttcggctggcgcggcggcttcctgctgctcggcgggctcctgctgcactgctgcgcctgcggggctgtcatgaggccgccgcccgggccgggcccgcgaccgcgcagggacagcgccggcgaccgcgccggggacgctccgggcgaggcggaggctgacggtgcggggctgcagctgcgcgaggcatcccccagggtccggccccgccggcgcctgctggacttggcagtgtgcaccgaccgcgccttcgccgtgtacgccgtcaccaagttcctgatggcgctcgggctcttcgtccccgccatcctgctggtgaactacgccaaggacgcgggcgtgcccgacaccgacgccgccttcctgctgtccatcgtgggcttcgtggacatcgtggcgcgcccggcgtgcggcgccctggcgggcctggcgcgtctgcggccgcacgtcccgtatctgttcagcctggccctgctggccaatgggctcacagacctgagcagcgcacgcgcgcgctcctacggcgccctcgtcgccttctgcgtcgccttcggcctctcctacggcatggtgggcgcgctgcagttcgaggtgctcatggcggctgtgggcgcgccccgcttccccagtgcgctgggcctggtgttgctcgtggaggccgcggctgtgctcatcggaccgccctctgccggccgcctggtggatgtgttgaagaactatgagatcatcttctacctggccggctctgaggtggccctggctggggtcttcatggctgtcgccaccaactgctgcctgcgttgtgctaaagctgccccgtcaggcccaggcactgagggcggagccagtgacactgaggacgctgaggctgaaggggactctgagcccctgcctgttgttgcagaggaacccggcaacctggaggccctggaggtgctcagcgcccggggcgagcccacagaaccagaaatagaggcgaggccgaggctggctgccgagtctgtataactcagggtgctctgggtggggtggcccagtgacttgggaacacagcttcttgtctcagagagcctggtacgctgggaggctggtctggggtggtcactcccggggtccacgtctgggctccagttgatcccctgggtgtctgggaactgcctccctcatctgtgccccaagttccgccaggccctgccccatcgccagtgaagctgctatggagcaacaggaaactggtgataaagctcagctgaacgacagaa

SEQ ID NO: 182998 - DNA, 726 bp, Homo sapiens
  Payload ID: 16047
  Gene Symbol: SLC16A8
  Gene Name: solute carrier family 16 (monocarboxylate transporter), member 8
  ENST ID: ENST00000427592
  CDS Start-End: 435-726
gcagcccccatccgggtaagcttcaccgggagctgcggcggcggcccctccctgcaggcctcaggagatgtgaggctggacccccaaacccacgaggcaggctcagtcatttgtgatcactgagaaacattaggaacatggcggaaggctaaagaggaaaatcacgcacagcggccctttgcagccggcatctgcccctctgctgtttgttctgttgtcccgagaccctcacgcgtacggggcgactttggtgctggacgcccacctccaggcacatacctgctccacttcccgacgccttccacctgaggccctgaggggccagcagttgtccttcagagggagcctgcagaggtgcagagtcaggtgggacccgtcgtcctcccctcgtccttcagcgccctttgcaggagaaggagacttgggaggcagcgatgggcgctggcggcccccggcggggcgagggccccccagacggcggctggggctgggtggtgctgggcgcctgctttgtggtcaccggcttcgcctacggcttccccaaagccgtgagcgtcttcttccgcgcgctcatgcgcgacttcgacgccggctacagcgacacggcctgggtgtcctccatcatgctagccatgctctacggcacgggccccgtgtccagcatcctcgtgacccgctttggctgtcgcccggtgatgctggcgggtgggctgctggcttccgcgg

SEQ ID NO: 182999 - DNA, 1803 bp, Homo sapiens
  Payload ID: 16048
  Gene Symbol: SLC16A11
  Gene Name: solute carrier family 16, member 11
  Uniprot ID: Q8NCK7
  ENST ID: ENST00000308009
  CDS Start-End: 339-1754
atctctgtttaccgagagagcccgtccaagttgggctccatcgctgccctcgctccccttcggggcccccgcccgcctgggaagcagagagaaagccgggcccagcccttcctcacccttcccctccccgcaccgcccggagaggtcgggtaagggggaaggagtgtgcgtgggacggggaacctcgggcctggggatctggctgtccccgtccccgtacctcgcgcggacccgggagttccagccctaggccaggctccggctccctccgccccgcgccatcgcgctcggagtgacgggcccaccccgggcgagcagccagaggctggatctcagggatgccagctccccagcggaagcacaggcgtggaggcttctctcacagatgtttccccaccccgcagacggcgatgaccccccagcccgccggacccccggatgggggctggggctgggtggtggcggccgcagccttcgcgataaacgggctgtcctacgggctgctgcgctcgctgggccttgccttccctgaccttgccgagcactttgaccgaagcgcccaggacactgcgtggatcagcgccctggccctggccgtgcagcaggcagccagccccgtgggcagcgccctgagcacgcgctggggggcccgccccgtggtgatggttgggggcgtcctcgcctcgctgggcttcgtcttctcggctttcgccagcgatctgctgcatctctacctcggcctgggcctcctcgctggctttggttgggccctggtgttcgcccccgccctaggcaccctctcgcgttacttctcccgccgtcgagtcttggcggtggggctggcgctcaccggcaacggggcctcctcgctgctcctggcgcccgccttgcagcttcttctcgatactttcggctggcggggcgctctgctcctcctcggcgcgatcaccctccacctcaccccctgtggcgccctgctgctacccctggtccttcctggagaccccccagccccaccgcgtagtcccctagctgccctcggcctgagtctgttcacacgccgggccttctcaatctttgctctaggcacagccctggttgggggcgggtacttcgttccttacgtgcacttggctccccacgctttagaccggggcctggggggatacggagcagcgctggtggtggccgtggctgcgatgggggatgcgggcgcccggctggtctgcgggtggctggcagaccaaggctgggtgcccctcccgcggctgctggccgtattcggggctctgactgggctggggctgtgggtggtggggctggtgcccgtggtgggcggcgaagagagctgggggggtcccctgctggccgcggctgtggcctatgggctgagcgcggggagttacgccccgctggttttcggtgtactccccgggctggtgggcgtcggaggtgtggtgcaggccacagggctggtgatgatgctgatgagcctcggggggctcctgggccctcccctgtcaggcttcctaagggatgagacaggagacttcaccgcctctttcctcctgtctggttctttgatcctctccggcagcttcatctacatagggttgcccagggcgctgccctcctgtggtccagcctcccctccagccacgcctcccccagagacgggggagctgcttcccgctccccaggcagtcttgctgtccccaggaggccctggctccactctggacaccacttgttgattattttcttgtttgagcccctcccccaataaagaatttttatcgggtt

SEQ ID NO: 183000 - DNA, 1779 bp, Homo sapiens
  Payload ID: 16048
  Gene Symbol: SLC16A11
  Gene Name: solute carrier family 16, member 11
  ENST ID: ENST00000447225
  CDS Start-End: 411-1730
atctctgtttaccgagagagcccgtccaagttgggctccatcgctgccctcgctccccttcggggcccccgcccgcctgggaagcagagagaaagccgggcccagcccttcctcacccttcccctccccgcaccgcccggagaggtcgggtaagggggaaggagtgtgcgtgggacggggaacctcgggcctggggatctggctgtccccgtccccgtacctcgcgcggacccgggagttccagccctaggccaggctccggctccctccgccccgcgccatcgcgctcggagtgacgggcccaccccgggcgagcagccagaggctggatctcagggatgccagctccccagcggaagcacaggcgtggaggcttctctcacagatgtttccccaccccgcagacggcgatgaccccccagcccgccggacccccggatgggggctggggctgggtggtggcggccgcagccttcgcgataaacgggctgtcctacgggctgctgcgctcgctgggccttgccttccctgaccttgccgagcactttgaccgaagcgcccaggacactgcgtggatcagcgccctggccctggccgtgcagcaggcagccagccccgtgggcagcgccctgagcacgcgctggggggcccgccccgtggtgatggttgggggcgtcctcgcctcgctgggcttcgtcttctcggctttcgccagcgatctgctgcatctctacctcggcctgggcctcctcgctggctttggttgggccctggtgttcgcccccgccctaggcaccctctcgcgttacttctcccgccgtcgagtcttggcggtggggctggcgctcaccggcaacggggcctcctcgctgctcctggcgcccgccttgcagcttcttctcgatactttcggctggcggggcgctctgctcctcctcggcgcgatcaccctccacctcaccccctgtggcgccctgctgctacccctggtccttcctggagaccccccagccccaccgcgtagtcccctagctgccctcggcctgagtctgttcacacgccgggccttctcaatctttgctctaggcacagccctggttgggggcgggtacttcgttccttacgtgcacttggctccccacgctttagaccggggcctggggggatacggagcagcgctggtggtggccgtggctgcgatgggggatgcgggcgcccggctggtctgcgggtggctggcagaccaaggctgggtgcccctcccgcggctgctggccgtattcggggctctgactgggctggggctgtgggtggtggggctgagctgggggggtcccctgctggccgcggctgtggcctatgggctgagcgcggggagttacgccccgctggttttcggtgtactccccgggctggtgggcgtcggaggtgtggtgcaggccacagggctggtgatgatgctgatgagcctcggggggctcctgggccctcccctgtcaggcttcctaagggatgagacaggagacttcaccgcctctttcctcctgtctggttctttgatcctctccggcagcttcatctacatagggttgcccagggcgctgccctcctgtggtccagcctcccctccagccacgcctcccccagagacgggggagctgcttcccgctccccaggcagtcttgctgtccccaggaggccctggctccactctggacaccacttgttgattattttcttgtttgagcccctcccccaataaagaatttttatcgggtt

SEQ ID NO: 183001 - DNA, 430 bp, Homo sapiens
  Payload ID: 16048
  Gene Symbol: SLC16A11
  Gene Name: solute carrier family 16, member 11
  ENST ID: ENST00000574600
  CDS Start-End: 150-430
gtttaccgagagagcccgtccaagttgggctccatcgctgccctcgctccccttcggggcccccgcccgcctgggaagcagagagaaagccgggcccagcccttcctcacccttcccctccccgcaccgcccggagaggtcggacggcgatgaccccccagcccgccggacccccggatgggggctggggctgggtggtggcggccgcagccttcgcgataaacgggctgtcctacgggctgctgcgctcgctgggccttgccttccctgaccttgccgagcactttgaccgaagcgcccaggacactgcgtggatcagcgccctggccctggccgtgcagcaggcagccagccccgtgggcagcgccctgagcacgcgctggggggcccgccccgtggtgatggttgggggcgtcctcgcctcgctggg

SEQ ID NO: 183002 - DNA, 4617 bp, Homo sapiens
  Payload ID: 16049
  Gene Symbol: SLC16A12
  Gene Name: solute carrier family 16, member 12
  ENST ID: ENST00000371790
  CDS Start-End: 302-1852
tcagtctcgccggcggcccccgctcccggatccccagcgccctggccaagaagcttcctcggctccccctcttccctctccctgacacggttgtgcagagggcgcggtggctcagatacaggatttcgacatattggccggtttgctctcgagctcctgggctcaagcgatctgcccgctttagcctcccaaagtgatgggattacaggcgtgagccaccgtgcctggccataatttttaaaaatgtctagtcagatggcgagtaacccatgggccaggtagcgttctatgccaaccttgaatgccatcaggaagtcactggacagcaaactcttccaagatcataacttggctgttggagcaacctggaaaagaagaaaaaagaaaaaccatggcaaaagtaaatagagctcggtctacctcccctccagatggaggctggggctggatgattgtggctggctgtttccttgttaccatctgcacacgggcagtcacaagatgtatctcaattttttttgtggagttccagacatacttcactcaggattacgcacaaacggcatggatccattccattgtagattgtgtgaccatgctctgtgctccacttgggagtgttgtcagtaaccatttatcctgtcaagtgggaatcatgctgggtggcttgcttgcatctactggactcatcctgagctcatttgccacgagtctgaagcatctctacctcactctgggagttcttacaggtcttggatttgcactttgttactctccagctattgccatggttggcaagtacttcagcagacggaaagcccttgcttatggtatcgccatgtcaggaagtggcattggcaccttcatcctggctcctgtggttcagctccttattgaacagttttcctggcggggagccttactcattcttgggggctttgtcttgaatctctgtgtatgtggtgccttgatgaggccaattactcttaaagaggaccacacaactccagagcagaaccatgtgtgtagaactcagaaagaagacattaagcgggtgtctccctattcatctttgaccaaagaatgggcacagacttgcctctgttgctgtttgcagcaagagtacagttttttactcatgtcagactttgttgtgttagccgtctccgttctgtttatggcttatggctgcagccctctctttgtgtacttggtgccttatgctttgagtgttggagtgagtcatcagcaagctgcttttcttatgtccatacttggagtgattgacattattggcaatatcacatttggatggctgaccgacagaaggtgtctgaagaattaccagtatgtttgctacctctttgccgtgggaatggatgggctctgctatctctgcctcccaatgcttcaaagtctccctctgctcgtgcctttctcttgtacctttggctactttgatggtgcctatgtgactttgatcccagtagtgaccacagagatagtggggaccacctctttgtcatcagcgcttggtgtggtatacttccttcacgcagtgccatacttggtgagcccacccatcgcaggacggctggtagataccaccggcagctacactgcagcattcctcctctgtggattttcaatgatatttagttctgtgttgcttggctttgctagacttataaagagaatgagaaaaacccagttgcagttcattgccaaagaatctgatcctaagctgcagctatggaccaatggatcagtggcttattctgtggcaagagaattagatcagaaacatggggagcctgtggctacagcagtgcctggctacagcctcacatgaccaaaggccttgagccccagaatcttcaggtttgagagaggtggggccaccagattcttcatgtttctgaaactttttattttggcagaaggattgccttccaaggaaattattattattgttttgttaacatattaatatttataagggaaaacagcacataataaggaaagctggactagcccagagccttctcatttgggatttgtgctcataactgaactcgtatcttttggtcaatgggcatagctctgtaagaaatgtaaggacacagctgatataattagctgtaattagggataatttcaaagcataaccaaagcagatgacactgggcagcagctttgttccagtctcaggcccttcatgttccctcctcagaaagaaaatggaaacattaacgtgtagctttgcttaccttgttctggttagagaagggaggtcagcttgggtgtggtggtgaagagtgaagatgccatactttttcatggtggagtttctcattagggttttacttgggattgttaaagaatacttgagattcttcaaaaagtggtgattaatatagaaagaaactcttattttttttttctcttagtcttccagccagcccttgcctctgcccaagggtagacaccactatgagaatccaaataatcatggaatgccatggttggaatagatcttaaagggcatctggtaagatccatttgaaattgtccactggaaaccgaaagctcttttcctaagactgggttccaggctctcacatttgttaccatcacatataatacttactctaaatttagcagaacacacttagtcacaaggacaacctctcaatcttacctgaaatgtcaacaacaccaaaacttcccgtcttttaccttcagagaagaagctcttacttagactgcagacgcattcctgttaggttggaaaaatgttggcagtattccaattgggcaggaactgaattcttgaatcagcaggtctctggtgagagttttctttgcagatcagacatttagttttatcattacccaaaagaggattggagggagtcagttgtctgaaaaatattatcctagagatattctaaaggtgagattcctttctccctgtgttaattcttgttccactatccactgctcttcatctctttatagataataattagaaatctactcattggattataagtttattcattctcaaatactccacttttctatggtttgggataatttctgagtcttcagattgaagagggaaggcatggagggaagaaaaagtccagatcccccagcttgtttccaaccattttaagtccaaagaattataatcctgaatctcacagtgtgtcacacctgtaataggagtaaattatgcaatcaattttaattaccaggagtttaaaatccaaatgtcaaggaactgttttgaccctgaaggctatttaatccactgtcccctacaaggcctcacaagtgctgggggaaaaaaaacagcaatgaggatgatcctgagttaatgtgtatgctccgcaagagagcttgcctataccttgattatttcataaaatcacatgttaatacattgctttcagaatgaaatactgacttgatctgataggagaaaatggtaatatttcatagttgttttccaaagacaaatttaaatgttgtctgttatctccttacttagtttaagaatttagttttgaaccccattgactttgtcatttgcaattttaaaaatatttgggactgggcatggtcgctcacgcctgtaatcccagcactttgggaggctgaggcgggtggatcatgaggtcaggagatcaagaccatcctggctaacatcgtgaaactccgtctctactaaaaatgcaaaaaattagccaggcgtggtggcgggcgcctgtagtcccagctactcatgaggctgaggccggacaatcgcttgaacccaggaggtggaggttgcagtgagccaaaatcatgccactgcactccaccctgggcgacagagcaagactccatctcaaaaaaaaaaaattggaaggtatctgtaaaatgtcaaagttaagatgaagttatatctgtttggaatagcactttgccctaaatatcatttcttgaattttcaagcctaaagatgtttaaaaatatgaatagttacaaatattcttatacatattttttatcatgatcacaacaaaattttgtttatgtggttctgcaatataatttctgtgaagtattacaagtatttatgaaaaataagcatagtgatcagaaattttaaagattttgtataaaaacatttgggagatttgactttatacatgcatagatttgcattttactttcccttttgaggcagcatttttagaaaatcagtaagaaaaatgtacatcttaaggtctactattttacatttctacacagaattttagtgttaatgttccatgtgtctatactgtttatttcaaaactgagaaattcatgggaatgatgtattttgtggaatcaagaacaaaattatagtgggataattttacatcttaaatatttctttctactactgtaagctctactttggaattatctgagtagaaaatcagaagacattatctaactttgtagatacactgtatgattgggctttttgttcagattgtaatttcattaatagatgaaatatttatgctaatattttcttatttcaaaagcaaaataaaatgaatttattgtcctgtg

SEQ ID NO: 183003 - DNA, 340 bp, Homo sapiens
  Payload ID: 16049
  Gene Symbol: SLC16A12
  Gene Name: solute carrier family 16, member 12
  ENST ID: ENST00000475682
  CDS Start-End: 265-340
gaaatggaggtgttctgacctatgatcagacaaggtaggtcagaaaccagctccagaaaccaggaaaaagttcctgccttggggagagaaagaaataggtgaaaggagggcagaaaaggagccctgcctgttttgctcgttgttgcctcactagcccataccagagtgcagggtgcgctgtaagccgtgaccgcatcacagatcatcagcatgcagagatggcgagtaacccatgggccaggtagcgttctatgccaaccttgaatgccatcaggaagtcactggacagcaaactcttccaagatcataacttggctgttggagcaacctggaaaagaag

SEQ ID NO: 183004 - DNA, 1748 bp, Homo sapiens
  Payload ID: 16050
  Gene Symbol: SLC16A13
  Gene Name: solute carrier family 16, member 13
  Uniprot ID: Q7RTY0
  ENST ID: ENST00000308027
  CDS Start-End: 309-1589
agccgaacaccgaaccgggaccgatccggccccggcttgaactagctcagctccgagctcgcggaaccacgcccccgggagactctggcccggccagcgcgggccaggtcttcagtcctatatcgccccgccttgggaaaaggtgcaggggcctctcgccgcctcgtcgggcccttcctctctacctgcctctccaacccctctcggccccgagccacccggcagcgggggtgggtgtgcagaggtgcggcgtccagaacccggctcctgcagaggctctgggtggcagcagccctgttaccgcttagatggcgcgcaggacagagccccccgacgggggctggggatgggtggtggtgctctcagcgttcttccagtcggcgcttgtgtttggggtgctccgctcctttggggtcttcttcgtggagtttgtggcggcgtttgaggagcaggcagcgcgcgtctcctggatcgcctccataggaatcgcggtgcagcagtttgggagcccggtaggcagtgccctgagcacgaagttcgggcccaggcccgtggtgatgactggaggcatcttggctgcgctggggatgctgctcgcctcttttgctacttccttgacccacctatacctgagtattgggttgctgtcaggctctggctgggctttgaccttcgctccgaccctggcctgcctgtcctgttatttctctcgccgacgatccctggccaccgggctggcactgacaggcgtgggcctctcctccttcacatttgccccctttttccagtggctgctcagccactacgcctggagggggtccctgctgctggtgtctgccctctccctccacctagtggcctgtggtgctctcctccgcccaccctccctggctgaggaccctgctgtgggtggtcccagggcccaactcacctctctcctccatcatggccccttcctccgttacactgttgccctcaccctgatcaacactggctacttcattccctacctccacctggtggcccatctccaggacctggattgggacccactacctgctgccttcctactctcagttgttgctatttctgacctcgtggggcgtgtggtctccggatggctgggagatgcagtcccagggcctgtgacacgactcctgatgctctggaccaccttgactggggtgtcactagccctgttccctgtagctcaggctcccacagccctggtggctctggctgtggcctacggcttcacatcaggggctctggccccactggccttctccgtgctgcctgaactaatagggactagaaggatttactgtggcctgggactgttgcagatgatagagagcatcggggggctgctggggcctcctctctcaggctacctccgggatgtgacaggcaactacacggcttcttttgtggtggctggggccttccttctttcagggagtggcattctcctcaccctgccccacttcttctgcttctcaactactacctccgggccccaggaccttgtaacagaagcactagatactaaagttcccctacccaaggaggggctggaagaggactgaactccacagagtcaggcccagaaagccaaagcttgacagctccaggtcttctcttgccacgtcttggtctccacagaaccacagtgccttaagattcttgatctgcctccccctagagcaggcctggggctcctgcaatgtgtgtgccaaccctttgta

SEQ ID NO: 183005 - DNA, 4398 bp, Homo sapiens
  Payload ID: 16051
  Gene Symbol: SLC16A14
  Gene Name: solute carrier family 16, member 14
  Uniprot ID: Q7RTX9
  ENST ID: ENST00000295190
  CDS Start-End: 460-1992
agccaaagctataaacttcaaccggccacaagagtgtgcatgtgaggtgactgcattttttttccctgccaaaccagaattagccggtataggaatgaacgagcatgaagatttgaaattgctccgattggaaggaagcccaggttaggtttgggcacctccaaacgcacccgttttaaagccacctggactgaggcgtcgagctttcagctccaccaaacgctcacctggcctggcagcgagcggcggaagagcccgggagcccctcacagagcgcaccgagccgggcggagagctgagccgcaggcacccgcgtctccaggatgataggcgacattgcaacaaatctctacacccagcagctcagggggctccaagcagagcagcaagttcgaggatccgggcgtggagccgagtgaggccgcagcccagcgggcctcgggcgaaaaatcttggaaaatgtataccagtcatgaagatattgggtatgattttgaagatggccccaaagacaaaaagacactgaagccccacccaaacattgatggcggatgggcttggatgatggtgctctcctctttctttgtgcacatcctcatcatgggctcccagatggccctgggtgtcctcaacgtggaatggctggaagaattccaccagagccgcggcctgaccgcctgggtcagctccctcagcatgggcatcaccttgatagtgggccctttcatcggcttgttcattaacacctgtgggtgccgccagactgcgatcattggagggctcgtcaactccctgggctgggtgttgagtgcctatgctgcaaacgtgcattatctcttcattacttttggagtcgcagctggcctgggcagcgggatggcctacctgccagcggtggtcatggtgggcaggtatttccagaagagacgcgccctcgcccagggcctcagcaccacggggaccggattcggtacgttcctaatgactgtgctgctgaagtacctgtgcgcagagtacggctggaggaatgccatgttgatccaaggtgccgtttccctaaacctgtgtgtttgtggggcgctcatgaggcccctctctcctggtaaaaacccaaacgacccaggagagaaagatgtgcgtggcctgccagcgcactccacagaatctgtgaagtcaactggacagcagggaagaacagaagagaaggatggtgggctcgggaacgaggagaccctctgcgacctgcaagcccaggagtgccccgatcaggccgggcacaggaagaacatgtgtgccctccggattctgaagactgtcagctggctcaccatgagagtcaggaagggcttcgaggactggtattcgggctactttgggacagcctctctatttacaaatcgaatgtttgtagcctttattttctgggctttgtttgcatacagcagctttgtcatccccttcattcacctcccagaaatcgtcaatttgtataacttatcggagcaaaacgacgttttccctctgacgtcaattatagcaatagttcacatctttggaaaagtgatcctgggcgtcatagccgacttgccttgcattagtgtttggaatgtcttcctgttggccaacttcacccttgtcctcagtatttttattctgccgttgatgcacacgtacgctggcctggcggtcatctgtgcgctgatagggttttccagtggttatttctccctaatgcccgtagtgactgaagacttggttggcattgaacacctggccaatgcctacggcatcatcatctgtgctaatggcatctctgcattgctgggaccaccttttgcagggtggatctatgacatcacgcaaaaatatgatttttccttctacatatgtggtttgctttacatgataggaatactctttttacttattcagccgtgcattcgaattatagaacaatccagaagaaaatacatggatggtgcacatgtttagtatcatgtaatgttccgtgtaggtttcattgtaatactcatgcctacctcgcatggttgctgtgaggcacctatgacaggacgtgggaaagcattttgtacggtaactggcactgtcatttgtaaatgccattgtcacagcctcatttgtaagcagcactgcctctctgtttggggagatgtaatgctggaagatcttaaggactacatacattctagagatgacagtgttgttcaaagacagcctagtaagtaattggtagaaatgcccttataaaaaccattctcttgtcatctactgggactagggttttaaatacagcttttaaaaacaaaaacagggaataaaagcttttcaactcaaccacttctttgtaagacaaaactgaagtatctgtgtgcttccagaaagcttacagataaatgggtttcaagcacaagaatatgactagatttcagaaattaattattacagggagctattgatctactagcatcaaacaaaggcaagctctaattccacaggtaatacaatttagtgcaattaaagaaacacggcttgtatttttatgagggaattctgcagctagggattgtgactcctaaatcctcctctaaaagaaggcacttgccattaatcctaattcagtgctatccagttataaatggaatcttgagacaaaaccttaacaaagaaataacagtaatgatttccttagcagaagccgtatttgtacgcacaacattaaatcaagggctacaattcaagcacttttattcgtatcattggcctcttagatgatataagcatgaggtggggcctgtaatatttttttctgagtttcttctgcccaaaaatataatatagaactaattgctaactgacaaataaagttaatagttaaatcatctccaaggaatgttgctaatccaaagtataacactatcaatttgtgaggataataaatggaatgccattagtgtagatgtctgtgccacatctgacactggagtagtgataacaaatagcccatctctagactctcgtgttgttatatagaccattcatttgcctgagcgtggcacagttttaaaaatagttctcttgattgatttcatacagaagatgactgtgatccatgacatctaataatgccctttctttatctgagatgtctatttttctaagccaaacgtttttcagactgcagaatgttcttcccagatcatttgaaatttctggctgccttacttgtttacagatagtttaagactatttaaatttctactcacaatttgatcatcacacacacacaaatccttgaatatcattgccagtgtcttaggtcaaatttacctaaagtgaatacagcccattctcaattatccttcacaattagacgcaggaatgctactaggaattggaatcaaacaatgccaccccaagcgtaattttagccagcagtttcagttatactcaaccatgcccttctgagctgttaacaagtgattcaatggacaagttctctttttgttccatctccattatttcctgctctaatgtatagtgggagtggttgtgtaatgaaaggaccaccaaaataataaaaggcagctaatggaaaggagagacaaaagcatggttaatatatatacttaatattacctccaatgactcgggaattgcctgtaaattattatagacaatagattgcatgtcatactccatttggttcaacacaacaacctatgtgttatcattacagctttggctgctgttaaagaatccagctctctattttgataaagataatcttaaagctgaggcaatgctccctcctctatctctctctgtgtaatttaccatagaattaggatgattagattgaaacacatgttgtatgttttaaaaactacattgcttcattactttcattttccgacaacatcaaactaacaagaggcagtgttaaatattttaaatggtgctatagccaatgtatttgaatgcttgcactgctggttgtgtatcatcaatatgaactttttatccaatgactcaactctaattacatctaagttagacttgctcacgttcagtttgtacagttgtgtgttgacttactatgttttgaaagtggtgacttctaccgaatgagtggaagttcccattgtcaaaaaaaataaagacctgcttgcagtattcatgttgacaacagagtaaaagagaatactgtaaagaattactgcaaatatttcctgtttatgttatttgccgttgtttgaagatattataaagggttaattgtatatttatatcatgtgctttatcgttttcccctcatgtatccaagtaatttttatttacatacaactaaataaatgttgtcctctttgaagacggtca

SEQ ID NO: 183006 - DNA, 537 bp, Homo sapiens
  Payload ID: 16051
  Gene Symbol: SLC16A14
  Gene Name: solute carrier family 16, member 14
  ENST ID: ENST00000425822
  CDS Start-End: 412-537
gcttggggacgcgcgccttgctgctcaagctggccggggccccgcgagcgtcatcctgggcacccccgtccggctggagaagcgcgttctgcccggagcccagcctcgctgcccggctgctctctaggcccgtttgggactcgaactggacagtgatgaggcgcagagcgggggacccggggctgcgcctagggacttcgcggggtgcggatgcctctctgcacaggctgtggtgctgcagccggcccagcttccccgctcagctcagctccgctccccagccttctccgcggcagcctcttcagcctgctggccgcaagtgcgccctctaaaggccccaaatgccctgtacacaccaggtgaagagcgcggaagcgcctgcagagcagaattaaagaaaaatcttggaaaatgtataccagtcatgaagatattgggtatgattttgaagatggccccaaagacaaaaagacactgaagccccacccaaacattgatggcggatgggcttggatgatggtgctctcctctttcttt

SEQ ID NO: 183007 - DNA, 1672 bp, Homo sapiens
  Payload ID: 16051
  Gene Symbol: SLC16A14
  Gene Name: solute carrier family 16, member 14
  ENST ID: ENST00000412034
  CDS Start-End: 217-1672
atccgaggccgcgcgcgccgcgggcctggggaatggagcgacgccgggggcatcggagcctagctcagctcagctccgctccccagccttctccgcggcagcctcttcagcctgctggccgcaagtgcgccctctaaaggccccaaatgccctgtacacaccaggtgaagagcgcggaagcgcctgcagagcagaattaaagaaaaatcttggaaaatgtataccagtcatgaagatattgggtatgattttgaagatggccccaaagacaaaaagacactgaagccccacccaaacattgatggcggatgggcttggatgatggtgctctcctctttctttgtgcacatcctcatcatgggctcccagatggccctgggtgtcctcaacgtggaatggctggaagaattccaccagagccgcggcctgaccgcctgggtcagctccctcagcatgggcatcaccttgatagtgggccctttcatcggcttgttcattaacacctgtgggtgccgccagactgcgatcattggagggctcgtcaactccctgggctgggtgttgagtgcctatgctgcaaacgtgcattatctcttcattacttttggagtcgcagctggcctgggcagcgggatggcctacctgccagcggtggtcatggtgggcaggtatttccagaagagacgcgccctcgcccagggcctcagcaccacggggaccggattcggtacgttcctaatgactgtgctgctgaagtacctgtgcgcagagtacggctggaggaatgccatgttgatccaaggtgccgtttccctaaacctgtgtgtttgtggggcgctcatgaggcccctctctcctggtaaaaacccaaacgacccaggagagaaagatgtgcgtggcctgccagcgcactccacagaatctgtgaagtcaactggacagcagggaagaacagaagagaaggatggtgggctcgggaacgaggagaccctctgcgacctgcaagcccaggagtgccccgatcaggccgggcacaggaagaacatgtgtgccctccggattctgaagactgtcagctggctcaccatgagagtcaggaagggcttcgaggactggtattcgggctactttgggacagcctctctatttacaaatcgaatgtttgtagcctttattttctgggctttgtttgcatacagcagctttgtcatccccttcattcacctcccagaaatcgtcaatttgtataacttatcggagcaaaacgacgttttccctctgacgtcaattatagcaatagttcacatctttggaaaagtgatcctgggcgtcatagccgacttgccttgcattagtgtttggaatgtcttcctgttggccaacttcacccttgtcctcagtatttttattctgccgttgatgcacacgtacgctggcctggcggtcatctgtgcgctgatagggttttccagtggttatttctccctaatgcccgtagtgactgaagacttggttggcattgaacacctggccaatgcctacggcatcatcatctgtgctaatggcatctctgcattgctgggaccaccttttgcaggtaaactctctgaggttttaagagctcagagtgcatgtacatatggtgcgttatgttataaagtcccagataaag

SEQ ID NO: 183008 - DNA, 646 bp, Homo sapiens
  Payload ID: 16051
  Gene Symbol: SLC16A14
  Gene Name: solute carrier family 16, member 14
  ENST ID: ENST00000436869
  CDS Start-End: 593-646
agctataaacttcaaccggccacaagagtgtgcatgtgaggtgactgcattttttttccctgccaaaccagaattagccggtataggaatgaacgagcatgaagatttgaaattgctccgattggaaggaagcccaggttaggtttgggcacctccaaacgcacccgttttaaagccacctggactgaggcgtcgagctttcagctccaccaaacgctcacctggcctggcagcgagcggcggaagagcccgggagcccctcacagagcgcaccgagccgggcggagagctgagccgcaggcacccgcgtctccaggatgataggcgacattgcaacaaatctctacacccagcagctcagggggctccaagcagagcagcaagttcgaggatccgggcgtggagccgagtgaggccgcagcccagcgggcctcgggcgctcagctcagctccgctccccagccttctccgcggcagcctcttcagcctgctggccgcaagtgcgccctctaaaggccccaaatgccctgtacacaccaggtgaagagcgcggaagcgcctgcagagcagaattaaagaaaaatcttggaaaatgtataccagtcatgaagatattgggtatgattttgaagatggccccaaagac

SEQ ID NO: 183009 - DNA, 1836 bp, Homo sapiens
  Payload ID: 16051
  Gene Symbol: SLC16A14
  Gene Name: solute carrier family 16, member 14
  ENST ID: ENST00000457406
  CDS Start-End: 368-1836
gaatgaacgagcatgaagatttgaaattgctccgattggaaggaagcccaggttaggtttgggcacctccaaacgcacccgttttaaagccacctggactgaggcgtcgagctttcagctccaccaaacgctcacctggcctggcagcgagcggcggaagagcccgggagcccctcacagagcgcaccgagccgggcggagagctgagccgcaggcacccgcgtctccaggatgataggcgacattgcaacaaatctctacacccagcagctcagggggctccaagcagagcagcaagttcgaggatccgggcgtggagccgagtgaggccgcagcccagcgggcctcgggcgaaaaatcttggaaaatgtataccagtcatgaagatattgggtatgattttgaagatggccccaaagacaaaaagacactgaagccccacccaaacattgatggcggatgggcttggatgatggtgctctcctctttctttgtgcacatcctcatcatgggctcccagatggccctgggtgtcctcaacgtggaatggctggaagaattccaccagagccgcggcctgaccgcctgggtcagctccctcagcatgggcatcaccttgatagtgggccctttcatcggcttgttcattaacacctgtgggtgccgccagactgcgatcattggagggctcgtcaactccctgggctgggtgttgagtgcctatgctgcaaacgtgcattatctcttcattacttttggagtcgcagctggcctgggcagcgggatggcctacctgccagcggtggtcatggtgggcaggtatttccagaagagacgcgccctcgcccagggcctcagcaccacggggaccggattcggtacgttcctaatgactgtgctgctgaagtacctgtgcgcagagtacggctggaggaatgccatgttgatccaaggtgccgtttccctaaacctgtgtgtttgtggggcgctcatgaggcccctctctcctggtaaaaacccaaacgacccaggagagaaagatgtgcgtggcctgccagcgcactccacagaatctgtgaagtcaactggacagcagggaagaacagaagagaaggatggtgggctcgggaacgaggagaccctctgcgacctgcaagcccaggagtgccccgatcaggccgggcacaggaagaacatgtgtgccctccggattctgaagactgtcagctggctcaccatgagagtcaggaagggcttcgaggactggtattcgggctactttgggacagcctctctatttacaaatcgaatgtttgtagcctttattttctgggctttgtttgcatacagcagctttgtcatccccttcattcacctcccagaaatcgtcaatttgtataacttatcggagcaaaacgacgttttccctctgacgtcaattatagcaatagttcacatctttggaaaagtgatcctgggcgtcatagccgacttgccttgcattagtgtttggaatgtcttcctgttggccaacttcacccttgtcctcagtatttttattctgccgttgatgcacacgtacgctggcctggcggtcatctgtgcgctgatagggttttccagtggttatttctccctaatgcccgtagtgactgaagacttggttggcattgaacacctggccaatgcctacggcatcatcatctgtgctaatggcatctctgcattgctgggaccaccttttgcaggtaaactctctgaggttttaagagctcagagtgcatgtacatatggtgcgttatgttataaagtcccagataaagaagaaggtttcca

SEQ ID NO: 183010 - DNA, 4161 bp, Homo sapiens
  Payload ID: 16052
  Gene Symbol: SLC16A2
  Gene Name: solute carrier family 16, member 2 (thyroid hormone transporter)
  Uniprot ID: P36021
  ENST ID: ENST00000587091
  CDS Start-End: 178-1797
ggctcgagggaccgtctgtcgcgggacgggctggccagctggggcgcggagcctggaggaggaggcagcggcagcggcagcagcagccctccgagcagcagcagctgcagcagcagaaacaagtaccagccacaaagcggctcctctggcccaagcagccacagtccccccgccgcgatggcgctgcaaagccaggcgagcgaggaagcaaaggggccctggcaggaggcagaccaggaacagcaggagccggtgggtagcccagagccggagtctgagccggagcctgagcccgagcccgagcccgtgccagtgcccccgcccgagccccagccggagccccagcccctaccggaccccgcacccctgccggagctggagttcgagtccgagcgggtgcacgaacccgagcccacgcctacggtagagacccgcggcaccgcgcgcggcttccagcctcccgaaggtggcttcggctgggtggtggtgttcgctgccacctggtgcaacggctccatcttcggcatccataactctgtcgggatcctctactccatgctgctagaggaggaaaaggaaaaaaatcgccaagtggagttccaagcagcatgggtcggagccctcgcgatgggtatgatcttcttctgttctcccattgtgagtatattcactgaccgtttgggctgccgaatcacagcaaccgcgggggctgccgttgctttcattggcctccataccagctccttcaccagctccctaagcctgcgctacttcacctacgggattctctttggttgtggctgttccttcgcctttcagccatccctcgtcatcctgggccactactttcaacgccgcctgggtctggccaatggtgtggtgtctgctgggagtagcattttctccatgtccttccccttcctcatcagaatgctgggggataagatcaagctggcccaaaccttccaggtgctgagtaccttcatgtttgttcttatgctgctttcactcacctaccggcccctcctgcccagctcccaggacaccccaagcaagagaggtgtccgcaccctgcaccagcgctttctggctcagctcaggaagtacttcaacatgcgagtgttccgccaacgcacttaccgcatctgggccttcggaattgctgctgctgcccttggctactttgttccctatgtacacctgatgaagtatgtggaggaggagttctcagaaatcaaggagacctgggtgctcttggtgtgtattggggctacctcaggccttgggcgtcttgtgtcaggccacatcagtgactccatccctggacttaagaagatctacttgcaggtcctttccttcctgctcctgggcctgatgtccatgatgattcccctgtgccgggacttcgggggccttatcgtcgtctgtcttttcctgggcctttgcgatggcttcttcatcaccatcatggcccccattgcatttgagctggtgggcccaatgcaggcctcacaggccattggctacctcctgggcatgatggccctgccaatgattgctgggccccccattgcaggcctactccgcaactgttttggggactaccatgtggccttctactttgccggtgtgccccccatcatcggggctgtaatcctcttcttcgtccctctgatgcatcaaaggatgttcaagaaagagcagagagattccagcaaggataagatgttggcccctgacccagaccccaatggggagctactgccgggctcccccaaccctgaggaaccaatctaatgcctttcttgccattgtgtgccctttcccagctcttccccttcatcccaccctgctcagcatttacatttttgccaccagcacacttgttcccagacctgcgcacacagcatttcagccacctgacaatctccttggagtcaaagctccaggtgttccaaactcattaactaaattctccccagaatgcttttaaattttccagggcctttctcctcccaggatctgggaaagcttgggaaccacccctggcctttggaacctctccatatactttctaagctctgggggaggaggaggatgggacctcctggacccagcttgttagtcacccactataatcaactgccaaaggtgctactgtgtccccaggagcctaatagggtaggcccaaatctctgtttgctgaggaggtcattgccatccatatttgggagccactgggtggaggggcagggaggcaaaatgagacaagtagccttggttagtcttagagttgctgatgactgtggcttcccaagaactgggtacaagcagtgcccttattgtatggttggttaacagtctgctcccctcttcccttccttctttttttcctctactgacttctctccatactctttcccctctatttctttgtatgactgtcatagacacatgggtgcttgaagaaaggagggacccggaacttgggccaatcagcctcaccttgtcccagtccactcctaacactagcatcagtcccactcatctcaggctgagccacatctcactttttcgctcaagctatataatcctagactggaagagtagaatatcatatagggaagaaaccttaaacaccacagtgttccatgttccagtcactgatttttacaaatcttacagtccaaggcattaacctcaaggccctcccagcaccccattcttgtatacacatggcaaaatgtgaagaaactcctttcatctcagcaggtagaggaggactgatgacacgagctgccatggcgggaggaggggcagtagttattgatatggtgagccccatctctcagttttcatgacaggtctatatttctacctgggccaggccaggaaagagactatttaagaaaaaaaaaatcaattcctagcctggatcccaaaaaggtacaggcagcagttgcacatagggttggaaaatttcttttgggaaggggaagccatcccagcctttaccacccaatgtgtctcccatgctgggcatcctaggccactttgcttagagggcattaaaggtgccatgaaaggtagactctgaaccactttgatccctctgaagtaggtgactgatgcctccttatgcccaggctctggcaacagtcttactgaagaacattcccagtgcccctggctaggggcagagggcactgccaggctgtgttcagttagcacagctcacctcattaggagctcagcctctctcctcactctgcctctttgtgtctctttttctcctctctgagcctttgtctattgtgttcctgtcacccaccctttcatcatctttttgccaggcattcctggctgtcacttggagccaacagtaacttgccaccttaaggcagggtcatccccgggccaggaggatgaggttgtcctgaggggctccaaagaagacaatagttcccactcatgattttccgttacaaacaggcagctggggcatggttggcctccaatgatttcattcaaggccaaagtcctgagccccctccgctggtcccagtccagctcttatcaactccccaaaggaaaacccactggttcttagctctgtgggtaggaaggggccctagaaagggcctagttactatcctgtcagttctaacagtagtggaacaggagaatctgggccctaggagccctgtaactcccaggagagaccactgaaaatactggagcaacaatgcccctgcttccatttctccccacctcactctcaccaagtcaccagagggtggttctgtaggacctcttttgttgcttaagatgcagatggctcttaagaatcaggcagtcgcccacttctctccagatgaagggaagacattcataggtcccaaatctgcccattcagatgtcacataatatggtgggatatcaatttacttcttccacacatgtggttgtgcacatgtgagcttgtgtgcttttggagagaatgttgattggcaaaagcagcacagtattaatatttagagtaggatgcagcctcttatgcaccacagttaaatctagaacgaacaaaatttcagagctcaagacatgggacatttaaatcctcaaggagtttggaacaaaataaacagatctaaaaatttg

SEQ ID NO: 183011 - DNA, 1886 bp, Homo sapiens
  Payload ID: 16052
  Gene Symbol: SLC16A2
  Gene Name: solute carrier family 16, member 2 (thyroid hormone transporter)
  ENST ID: ENST00000590447
  CDS Start-End: 1-688
cagctccttcaccagctccctaagcctgcgctacttcacctacgggattctctttggttgtggctgttccttcgcctttcagccatccctcgtcatcctgggccactactttcaacgccgcctgggtctggccaatggtgtggtgtctgctgggagtagcattttctccatgtccttccccttcctcatcagaatgctgggggataagatcaagctggcccaaaccttccaggtgctgagtaccttcatgtttgttcttatgctgctttcactcacctaccggcccctcctgcccagctcccaggacaccccaagcaagagaggtgtccgcaccctgcaccagcgctttctggctcagctcaggaagtacttcaacatgcgagtgttccgccaacgcacttaccgcatctgggccttcggaattgctgctgctgcccttggctactttgttccctatgtacacctgatgaagtatgtggaggaggagttctcagaaatcaaggagacctgggtgctcttggtgtgtattggggctacctcaggccttgggcgtcttgtgtcaggccacatcagtgactccatccctggacttaagaagatctacttgcaggcctactccgcaactgttttggggactaccatgtggccttctactttgccggtgtgccccccatcatcggggctgtaatcctcttcttcgtccctctgatgcatcaaaggatgttcaagaaagagcagagagattccagcaaggataagatgttggcccctgacccagaccccaatggggagctactgccgggctcccccaaccctgaggaaccaatctaatgcctttcttgccattgtgtgccctttcccagctcttccccttcatcccaccctgctcagcatttacatttttgccaccagcacacttgttcccagacctgcgcacacagcatttcagccacctgacaatctccttggagtcaaagctccaggtgttccaaactcattaactaaattctccccagaatgcttttaaattttccagggcctttctcctcccaggatctgggaaagcttgggaaccacccctggcctttggaacctctccatatactttctaagctctgggggaggaggaggatgggacctcctggacccagcttgttagtcacccactataatcaactgccaaaggtgctactgtgtccccaggagcctaatagggtaggcccaaatctctgtttgctgaggaggtcattgccatccatatttgggagccactgggtggaggggcagggaggcaaaatgagacaagtagccttggttagtcttagagttgctgatgactgtggcttcccaagaactgggtacaagcagtgcccttattgtatggttggttaacagtctgctcccctcttcccttccttctttttttcctctactgacttctctccatactctttcccctctatttctttgtatgactgtcatagacacatgggtgcttgaagaaaggagggacccggaacttgggccaatcagcctcaccttgtcccagtccactcctaacactagcatcagtcccactcatctcaggctgagccacatctcactttttcgctcaagctatataatcctagactggaagagtagaatatcatatagggaagaaaccttaaacaccacagtgttccatgttccagtcactgatttttacaaatcttacagtccaaggcattaacctcaaggccctcccagcaccccattcttgtatacacatggcaaaatgtgaagaaactcctttcatctcagcaggtagaggaggactgatgacacgagctgccatggcgggaggaggggcagtagttattgatatggtgagccccatctctcag

SEQ ID NO: 183012 - DNA, 2632 bp, Homo sapiens
  Payload ID: 16053
  Gene Symbol: SLC16A4
  Gene Name: solute carrier family 16, member 4
  Uniprot ID: O15374
  ENST ID: ENST00000369779
  CDS Start-End: 251-1714
acagtctttcctcctcccctcaggaagtaaagtccactagcaggagggcctaaatcgtctgagccctccttggctcttacaatgctcacttgttttcacaatgcagcaaaatgaaatgccttagaaaaagagtaacattccagaaaacggtgtaatttatttttcttccttaattgccccatctgtggaggatttctttgctgaacaccacatcaaagggatcttctgcatttaaaatagaagaggcatcatgctgaagagggaggggaaggtccaaccttacactaaaaccctggatggaggatggggatggatgattgtgattcattttttcctggtgaatgtgtttgtgatggggatgaccaagacttttgcaattttctttgtggtctttcaagaagagtttgaaggcacctcagagcaaattggttggattggatccatcatgtcatctcttcgtttttgtgcaggtcccctggttgctattatttgtgacatacttggagagaaaactacctccattcttggggctttcgttgttactggtggatatctgatcagcagctgggccacaagtattccttttctttgtgtgactatgggacttctacccggtttgggttctgctttcttataccaagtggctgctgtggtaactaccaaatacttcaaaaaacgattggctctttctacagctattgcccgttctgggatgggactgacttttcttttggcaccctttacaaaattcctgatagatctgtatgactggacaggagcccttatattatttggagctatcgcattgaatttggtgccttctagtatgctcttaagacccatccatatcaaaagtgagaacaattctggtattaaagataaaggcagcagtttgtctgcacatggtccagaggcacatgcaacagaaacacactgccatgagacagaagagtctaccatcaaggacagtactacgcagaaggctggactacctagcaaaaatttaacagtctcacaaaatcaaagtgaagagttctacaatgggcctaacaggaacagactgttattaaagagtgatgaagaaagtgataaggttatttcgtggagctgcaaacaactgtttgacatttctctctttagaaatcctttcttctacatatttacttggtcttttctcctcagtcagttagcatacttcatccctacctttcacctggtagccagagccaaaacactggggattgacatcatggatgcctcttaccttgtttctgtagcaggtatccttgagacggtcagtcagattatttctggatgggttgctgatcaaaactggattaagaagtatcattaccacaagtcttacctcatcctctgcggcatcactaacctgcttgctcctttagccaccacatttccactacttatgacctacaccatctgctttgccatctttgctggtggttacctggcattgatactgcctgtactggttgatctgtgtaggaattctacagtaaacaggtttttgggacttgccagtttctttgctgggatggctgtcctttctggaccacctatagcaggctggttatatgattatacccagacatacaatggctctttctacttctctggcatatgctatctcctctcttcagtttcctttttttttgtaccattggccgaaagatggaaaaacagtctgacctgaaagaaagaagactgcaatcaagtgagagctaaacaaaagaaaacctaaactaatgtcattggaaacaaaagcttgaaagaaacacatcgcatctacatttgtaacatgagaaggaaaacaatttttttttttttttttttgagacggagtctcgctctttcgcccaggctggagtgcagtggcgcaatctcggctcactgtaatctccgcctcctgggttcaagggattctcctgcctcagcctcccaagtagctgggactacaggcacacgccaccacacccagctaattttttgtatttttagtagaggcggggtttcaccatgttagccaggatggtctccatctcctgacctcgtgatccgcccgccttgtcctccaaagtgctgggattacaggcatgagccactgggcgcggccagataagtttttaaggttccttcttgctttagcattctgagaaatgtctaattggtagtaagacaagagtaatagcaacctgtattgttagtatttaaccaaataggctaaaattttaatcaggtaccttatgtattaaatagaaatcggaatgtaccataataaatccaaactctcaattacgccatggtaattcagtcactaaaatatgtaaagatagaaaattttttaatttaaagaagtgtgaaacatagccattgattgatcagaattctggaatctgaatattaaaaccttacttagtgactggaatggtatatgctccctccaaaagtttatctttgtttattgattaaaggtaatccttactttctttgtattacttaggttcttaattaaaggtaatccttactttctttgtattacttaggttcttaaatttctatgataaacatgtattgctaaataataaaaagtatataaaaattgctttaaaaa

SEQ ID NO: 183013 - DNA, 2082 bp, Homo sapiens
  Payload ID: 16053
  Gene Symbol: SLC16A4
  Gene Name: solute carrier family 16, member 4
  Uniprot ID: O15374
  ENST ID: ENST00000369781
  CDS Start-End: 217-1176
cactagcaggagggcctaaatcgtctgagccctccttggctcttacaatgctcacttgttttcacaatgcagcaaaatgaaatgccttagaaaaagagtaacattccagaaaacggtgtaatttatttttcttccttaattgccccatctgtggaggatttctttgctgaacaccacatcaaagggatcttctgcatttaaaatagaagaggcatcatgctgaagagggaggggaaggtccaaccttacactaaaaccctggatggaggatggggatggatgattgtgattcattttttcctggtgaatgtgtttgtgatggggatgaccaagacttttgcaattttctttgtggtctttcaagaagagtttgaaggcacctcagagcaaattggttggattggatccatcatgtcatctcttcgtttttgtgcaggtcccctggttgctattatttgtgacatacttggagagaaaactacctccattcttggggctttcgttgttactggtggatatctgatcagcagctgggccacaagtattccttttctttgtgtgactatgggacttctacccggtttgggttctgctttcttataccaagtggctgctgtggtaactaccaaatacttcaaaaaacgattggctctttctacagctattgcccgttctgggatgggactgacttttcttttggcaccctttacaaaattcctgatagatctgtatgactggacaggtatccttgagacggtcagtcagattatttctggatgggttgctgatcaaaactggattaagaagtatcattaccacaagtcttacctcatcctctgcggcatcactaacctgcttgctcctttagccaccacatttccactacttatgacctacaccatctgctttgccatctttgctggtggttacctggcattgatactgcctgtactggttgatctgtgtaggaattctacagtaaacaggtttttgggacttgccagtttctttgctgggatggctgtcctttctggaccacctatagcaggctggttatatgattatacccagacatacaatggctctttctacttctctggcatatgctatctcctctcttcagtttcctttttttttgtaccattggccgaaagatggaaaaacagtctgacctgaaagaaagaagactgcaatcaagtgagagctaaacaaaagaaaacctaaactaatgtcattggaaacaaaagcttgaaagaaacacatcgcatctacatttgtaacatgagaaggaaaacaatttttttttttttttttttgagacggagtctcgctctttcgcccaggctggagtgcagtggcgcaatctcggctcactgtaatctccgcctcctgggttcaagggattctcctgcctcagcctcccaagtagctgggactacaggcacacgccaccacacccagctaattttttgtatttttagtagaggcggggtttcaccatgttagccaggatggtctccatctcctgacctcgtgatccgcccgccttgtcctccaaagtgctgggattacaggcatgagccactgggcgcggccagataagtttttaaggttccttcttgctttagcattctgagaaatgtctaattggtagtaagacaagagtaatagcaacctgtattgttagtatttaaccaaataggctaaaattttaatcaggtaccttatgtattaaatagaaatcggaatgtaccataataaatccaaactctcaattacgccatggtaattcagtcactaaaatatgtaaagatagaaaattttttaatttaaagaagtgtgaaacatagccattgattgatcagaattctggaatctgaatattaaaaccttacttagtgactggaatggtatatgctccctccaaaagtttatctttgtttattgattaaaggtaatccttactttctttgtattacttaggttcttaattaaaggtaatccttactttctttgtattacttaggttcttaaatttctatgataaacatgtattgctaaataataaaaagtatataaaaa

SEQ ID NO: 183014 - DNA, 2372 bp, Homo sapiens
  Payload ID: 16053
  Gene Symbol: SLC16A4
  Gene Name: solute carrier family 16, member 4
  Uniprot ID: O15374
  ENST ID: ENST00000437429
  CDS Start-End: 304-1452
acagtctttcctcctcccctcaggaagtaaagtccactagcaggagggcctaaatcgtctgagccctccttggctcttacaatgctcacttgttttcacaatgcagcaaaatgaaatgccttagaaaaagagtaacattccagaaaacggtgtaatttatttttcttccttaattgccccatctgtggaggatttctttgctgaacaccacatcaaagggatcttctgcatttaaaatagaagaggcatcatgctgaagagggaggggaaggtccaaccttacactaaaaccctggatggaggatggggatggatgattgtgattcattttttcctggtttgggttctgctttcttataccaagtggctgctgtggtaactaccaaatacttcaaaaaacgattggctctttctacagctattgcccgttctgggatgggactgacttttcttttggcaccctttacaaaattcctgatagatctgtatgactggacaggagcccttatattatttggagctatcgcattgaatttggtgccttctagtatgctcttaagacccatccatatcaaaagtgagaacaattctggtattaaagataaaggcagcagtttgtctgcacatggtccagaggcacatgcaacagaaacacactgccatgagacagaagagtctaccatcaaggacagtactacgcagaaggctggactacctagcaaaaatttaacagtctcacaaaatcaaagtgaagagttctacaatgggcctaacaggaacagactgttattaaagagtgatgaagaaagtgataaggttatttcgtggagctgcaaacaactgtttgacatttctctctttagaaatcctttcttctacatatttacttggtcttttctcctcagtcagttagcatacttcatccctacctttcacctggtagccagagccaaaacactggggattgacatcatggatgcctcttaccttgtttctgtagcaggtatccttgagacggtcagtcagattatttctggatgggttgctgatcaaaactggattaagaagtatcattaccacaagtcttacctcatcctctgcggcatcactaacctgcttgctcctttagccaccacatttccactacttatgacctacaccatctgctttgccatctttgctggtggttacctggcattgatactgcctgtactggttgatctgtgtaggaattctacagtaaacaggtttttgggacttgccagtttctttgctgggatggctgtcctttctggaccacctatagcagaaatcattccttccttccaggctggttatatgattatacccagacatacaatggctctttctacttctctggcatatgctatctcctctcttcagtttcctttttttttgtaccattggccgaaagatggaaaaacagtctgacctgaaagaaagaagactgcaatcaagtgagagctaaacaaaagaaaacctaaactaatgtcattggaaacaaaagcttgaaagaaacacatcgcatctacatttgtaacatgagaaggaaaacaatttttttttttttttttttgagacggagtctcgctctttcgcccaggctggagtgcagtggcgcaatctcggctcactgtaatctccgcctcctgggttcaagggattctcctgcctcagcctcccaagtagctgggactacaggcacacgccaccacacccagctaattttttgtatttttagtagaggcggggtttcaccatgttagccaggatggtctccatctcctgacctcgtgatccgcccgccttgtcctccaaagtgctgggattacaggcatgagccactgggcgcggccagataagtttttaaggttccttcttgctttagcattctgagaaatgtctaattggtagtaagacaagagtaatagcaacctgtattgttagtatttaaccaaataggctaaaattttaatcaggtaccttatgtattaaatagaaatcggaatgtaccataataaatccaaactctcaattacgccatggtaattcagtcactaaaatatgtaaagatagaaaattttttaatttaaagaagtgtgaaacatagccattgattgatcagaattctggaatctgaatattaaaaccttacttagtgactggaatggtatatgctccctccaaaagtttatctttgtttattgattaaaggtaatccttactttctttgtattacttaggttcttaattaaaggtaatccttactttctttgtattacttaggttcttaaatttctatgataaacatgtattgctaaataataaaaagtatataaaaattgctttaa

SEQ ID NO: 183015 - DNA, 1962 bp, Homo sapiens
  Payload ID: 16053
  Gene Symbol: SLC16A4
  Gene Name: solute carrier family 16, member 4
  ENST ID: ENST00000461647
  CDS Start-End: 230-403
aggaagtaaagtccactagcaggagggcctaaatcgtctgagccctccttggctcttacaatgctcacttgttttcacaatgcagcaaaatgaaatgccttagaaaaagagtaacattccagaaaacggtgtaatttatttttcttccttaattgccccatctgtggaggatttctttgctgaacaccacatcaaagggatcttctgcatttaaaatagaagaggcatcatgctgaagagggaggggaaggtccaaccttacactaaaaccctggatggaggatggggatggatgattgtgattcattttttcctggtcccctggttgctattatttgtgacatacttggagagaaaactacctccattcttggggctttcgttgttactggtggatatctgatcagcagctgggccacaagtattccttttctttgtgtgactatgggacttctacccggtttgggttctgctttcttataccaagtggctgctgtggtaactaccaaatacttcaaaaaacgattggctctttctacagctattgcccgttctgggatgggactgacttttcttttggcaccctttacaaaattcctgatagatctgtatgactggacaggtatccttgagacggtcagtcagattatttctggatgggttgctgatcaaaactggattaagaagtatcattaccacaagtcttacctcatcctctgcggcatcactaacctgcttgctcctttagccaccacatttccactacttatgacctacaccatctgctttgccatctttgctggtggttacctggcattgatactgcctgtactggttgatctgtgtaggaattctacagtaaacaggtttttgggacttgccagtttctttgctgggatggctgtcctttctggaccacctatagcaggctggttatatgattatacccagacatacaatggctctttctacttctctggcatatgctatctcctctcttcagtttcctttttttttgtaccattggccgaaagatggaaaaacagtctgacctgaaagaaagaagactgcaatcaagtgagagctaaacaaaagaaaacctaaactaatgtcattggaaacaaaagcttgaaagaaacacatcgcatctacatttgtaacatgagaaggaaaacaatttttttttttttttttttgagacggagtctcgctctttcgcccaggctggagtgcagtggcgcaatctcggctcactgtaatctccgcctcctgggttcaagggattctcctgcctcagcctcccaagtagctgggactacaggcacacgccaccacacccagctaattttttgtatttttagtagaggcggggtttcaccatgttagccaggatggtctccatctcctgacctcgtgatccgcccgccttgtcctccaaagtgctgggattacaggcatgagccactgggcgcggccagataagtttttaaggttccttcttgctttagcattctgagaaatgtctaattggtagtaagacaagagtaatagcaacctgtattgttagtatttaaccaaataggctaaaattttaatcaggtaccttatgtattaaatagaaatcggaatgtaccataataaatccaaactctcaattacgccatggtaattcagtcactaaaatatgtaaagatagaaaattttttaatttaaagaagtgtgaaacatagccattgattgatcagaattctggaatctgaatattaaaaccttacttagtgactggaatggtatatgctccctccaaaagtttatctttgtttattgattaaaggtaatccttactttctttgtattacttaggttcttaattaaaggtaatccttactttctttgtattacttaggttcttaaatttctatgataaacatgtattgctaaataataaaaagtatataaaaa

SEQ ID NO: 183016 - DNA, 2420 bp, Homo sapiens
  Payload ID: 16053
  Gene Symbol: SLC16A4
  Gene Name: solute carrier family 16, member 4
  Uniprot ID: O15374
  ENST ID: ENST00000472422
  CDS Start-End: 195-1514
gtctgagccctccttggctcttacaatgctcacttgttttcacaatgcagcaaaatgaaatgccttagaaaaagagtaacattccagaaaacggtgtaatttatttttcttccttaattgccccatctgtggaggatttctttgctgaacaccacatcaaagggatcttctgcatttaaaatagaagaggcatcatgctgaagagggaggggaaggtccaaccttacactaaaaccctggatggaggatggggatggatgattgtgattcattttttcctggtgaatgtgtttgtgatggggatgaccaagacttttgcaattttctttgtggtctttcaagaagagtttgaaggcacctcagagcaaattggttggattggatccatcatgtcatctcttcgtttttgtgcaggtttgggttctgctttcttataccaagtggctgctgtggtaactaccaaatacttcaaaaaacgattggctctttctacagctattgcccgttctgggatgggactgacttttcttttggcaccctttacaaaattcctgatagatctgtatgactggacaggagcccttatattatttggagctatcgcattgaatttggtgccttctagtatgctcttaagacccatccatatcaaaagtgagaacaattctggtattaaagataaaggcagcagtttgtctgcacatggtccagaggcacatgcaacagaaacacactgccatgagacagaagagtctaccatcaaggacagtactacgcagaaggctggactacctagcaaaaatttaacagtctcacaaaatcaaagtgaagagttctacaatgggcctaacaggaacagactgttattaaagagtgatgaagaaagtgataaggttatttcgtggagctgcaaacaactgtttgacatttctctctttagaaatcctttcttctacatatttacttggtcttttctcctcagtcagttagcatacttcatccctacctttcacctggtagccagagccaaaacactggggattgacatcatggatgcctcttaccttgtttctgtagcaggtatccttgagacggtcagtcagattatttctggatgggttgctgatcaaaactggattaagaagtatcattaccacaagtcttacctcatcctctgcggcatcactaacctgcttgctcctttagccaccacatttccactacttatgacctacaccatctgctttgccatctttgctggtggttacctggcattgatactgcctgtactggttgatctgtgtaggaattctacagtaaacaggtttttgggacttgccagtttctttgctgggatggctgtcctttctggaccacctatagcaggctggttatatgattatacccagacatacaatggctctttctacttctctggcatatgctatctcctctcttcagtttcctttttttttgtaccattggccgaaagatggaaaaacagtctgacctgaaagaaagaagactgcaatcaagtgagagctaaacaaaagaaaacctaaactaatgtcattggaaacaaaagcttgaaagaaacacatcgcatctacatttgtaacatgagaaggaaaacaatttttttttttttttttttgagacggagtctcgctctttcgcccaggctggagtgcagtggcgcaatctcggctcactgtaatctccgcctcctgggttcaagggattctcctgcctcagcctcccaagtagctgggactacaggcacacgccaccacacccagctaattttttgtatttttagtagaggcggggtttcaccatgttagccaggatggtctccatctcctgacctcgtgatccgcccgccttgtcctccaaagtgctgggattacaggcatgagccactgggcgcggccagataagtttttaaggttccttcttgctttagcattctgagaaatgtctaattggtagtaagacaagagtaatagcaacctgtattgttagtatttaaccaaataggctaaaattttaatcaggtaccttatgtattaaatagaaatcggaatgtaccataataaatccaaactctcaattacgccatggtaattcagtcactaaaatatgtaaagatagaaaattttttaatttaaagaagtgtgaaacatagccattgattgatcagaattctggaatctgaatattaaaaccttacttagtgactggaatggtatatgctccctccaaaagtttatctttgtttattgattaaaggtaatccttactttctttgtattacttaggttcttaattaaaggtaatccttactttctttgtattacttaggttcttaaatttctatgataaacatgtattgctaaataataaaaagtatataaaaa

SEQ ID NO: 183017 - DNA, 1551 bp, Homo sapiens
  Payload ID: 16053
  Gene Symbol: SLC16A4
  Gene Name: solute carrier family 16, member 4
  ENST ID: ENST00000492412
  CDS Start-End: 217-390
cactagcaggagggcctaaatcgtctgagccctccttggctcttacaatgctcacttgttttcacaatgcagcaaaatgaaatgccttagaaaaagagtaacattccagaaaacggtgtaatttatttttcttccttaattgccccatctgtggaggatttctttgctgaacaccacatcaaagggatcttctgcatttaaaatagaagaggcatcatgctgaagagggaggggaaggtccaaccttacactaaaaccctggatggaggatggggatggatgattgtgattcattttttcctggtcccctggttgctattatttgtgacatacttggagagaaaactacctccattcttggggctttcgttgttactggtggatatctgatcagcagctgggccacaagtattccttttctttgtgtgactatgggacttctacccggtttgggttctgctttcttataccaagtggctgctgtggtaactaccaaatacttcaaaaaacgattggctctttctacagctattgcccgttctgggatgggactgacttttcttttggcaccctttacaaaattcctgatagatctgtatgactggacaggagcccttatattatttggagctatcgcattgaatttggtgccttctagtatgctcttaagacccatccatatcaaaagtgagaacaattctggtattaaagataaaggcagcagtttgtctgcacatggtccagaggcacatgcaacagaaacacactgccatgagacagaagagtctaccatcaaggacagtactacgcagaaggctggactacctagcaaaaatttaacagtctcacaaaatcaaagtgaagagttctacaatgggcctaacaggaacagactgttattaaagagtgatgaagaaagtgataaggttatttcgtggagctgcaaacaactgtttgacatttctctctttagaaatcctttcttctacatatttacttggtcttttctcctcagtcagttagcatacttcatccctacctttcacctggtagccagagccaaaacactggggattgacatcatggatgcctcttaccttgtttctgtagcaggtatccttgagacggtcagtcagattatttctggatgggttgctgatcaaaactggattaagaagtatcattaccacaagtcttacctcatcctctgcggcatcactaacctgcttgctcctttagccaccacatttccactacttatgacctacaccatctgctttgccatctttgctggtggttacctggcattgatactgcctgtactggttgatctgtgtaggaattctacagtaaacaggtttttgggacttgccagtttctttgctgggatggctgtcctttctggaccacctatagcaggctggttatatgattatacccagacatacaatggctctttctacttctctggcatatgctatctcctctcttcagtttcctttttttttgtaccattggccgaaagatggaaaaacagtctgacctgaaaga

SEQ ID NO: 183018 - DNA, 1562 bp, Homo sapiens
  Payload ID: 16053
  Gene Symbol: SLC16A4
  Gene Name: solute carrier family 16, member 4
  ENST ID: ENST00000528649
  CDS Start-End: 216-344
actagcaggagggcctaaatcgtctgagccctccttggctcttacaatgctcacttgttttcacaatgcagcaaaatgaaatgccttagaaaaagagtaacattccagaaaacggtgtaatttatttttcttccttaattgccccatctgtggaggatttctttgctgaacaccacatcaaagggatcttctgcatttaaaatagaagaggcatcatgctgaagagggaggggaaggtccaaccttacactaaaaccctggatggaggatggggatggatgattgtgattcattttttcctggtttgggttctgctttcttataccaagtggctgctgtggtaactaccaaatacttcaaaaaacgattggctctttctacagctattgcccgttctgggatgggactgacttttcttttggcaccctttacaaaattcctgatagatctgtatgactggacaggagcccttatattatttggagctatcgcattgaatttggtgccttctagtatgctcttaagacccatccatatcaaaagtgagaacaattctggtattaaagataaaggcagcagtttgtctgcacatggtccagaggcacatgcaacagaaacacactgccatgagacagaagagtctaccatcaaggacagtactacgcagaaggctggactacctagcaaaaatttaacagtctcacaaaatcaaagtgaagagttctacaatgggcctaacaggaacagactgttattaaagagtgatgaagaaagtgataaggttatttcgtggagctgcaaacaactgtttgacatttctctctttagaaatcctttcttctacatatttacttggtcttttctcctcagtcagttagcatacttcatccctacctttcacctggtagccagagccaaaacactggggattgacatcatggatgcctcttaccttgtttctgtagcaggtatccttgagacggtcagtcagattatttctggatgggttgctgatcaaaactggattaagaagtatcattaccacaagtcttacctcatcctctgcggcatcactaacctgcttgctcctttagccaccacatttccactacttatgacctacaccatctgctttgccatctttgctggtggttacctggcattgatactgcctgtactggttgatctgtgtaggaattctacagtaaacaggtttttgggacttgccagtttctttgctgggatggctgtcctttctggaccacctatagcagaaatcattccttccttccaggctggttatatgattatacccagacatacaatggctctttctacttctctggcatatgctatctcctctcttcagtttcctttttttttgtaccattggccgaaagatggaaaaacagtctgacctgaaagaaagaagactgcaatcaagtgagagctaaacaaaagaaaacctaaactaatgtcattggaaacaaaagcttgaaagaaacacatcgcatctacatttgtaacatgagaaggaaaacaattttttttttttttttttt

SEQ ID NO: 183019 - DNA, 1059 bp, Homo sapiens
  Payload ID: 16053
  Gene Symbol: SLC16A4
  Gene Name: solute carrier family 16, member 4
  ENST ID: ENST00000467986
  CDS Start-End: 1-660
gagtctaccatcaaggacagtactacgcagaaggctggactacctagcaaaaatttaacagtctcacaaaatcaaagtgaagagttctacaatgggcctaacaggaacagactgttattaaagagtgatgaagaaagtgataaggttatttcgtggagctgcaaacaactgtttgacatttctctctttagaaatcctttcttctacatatttacttggtcttttctcctcagtcagttagcatacttcatccctacctttcacctggtagccagagccaaaacactggggattgacatcatggatgcctcttaccttgtttctgtagcaggtatccttgagacggtcagtcagattatttctggatgggttgctgatcaaaactggattaagaagtatcattaccacaagtcttacctcatcctctgcggcatcactaacctgcttgctcctttagccaccacatttccactacttatgacctacaccatctgctttgccatctttgctggtggttacctggcattgatactgcctgtactggttgatctgtgtaggaattctacagtaaacaggtttttgggacttgccagtttctttgctgggatggctgtcctttctggaccacctatagcaggtaacaccttcaccacattctgaacaaatttcaatagcaataaaagagaaaaactgatccaggattaatggtaacatgtaatgatggtatcaggttaaaagaaacagattatttctgcttttcctatatctactcactccaccaccaatgcaggaaaatctgaaggctcagattcttgtattatcttaagatgtgccttaagcagattcttatattcttgggagttgtagggcagacactggatctatgtctacttgtctggggagacaatccagagttttttcagagcctcaaagacccatgatgctttaaaaaaaaaaaaaaaaggctgggagcaattgctcacgcctgtaattctagcactctgggaggccaaggcgggggtatcacttgagctgaggggttcaagaccagcctgggca

SEQ ID NO: 183020 - DNA, 2496 bp, Homo sapiens
  Payload ID: 16053
  Gene Symbol: SLC16A4
  Gene Name: solute carrier family 16, member 4
  Uniprot ID: O15374
  ENST ID: ENST00000541986
  CDS Start-End: 304-1581
acagtctttcctcctcccctcaggaagtaaagtccactagcaggagggcctaaatcgtctgagccctccttggctcttacaatgctcacttgttttcacaatgcagcaaaatgaaatgccttagaaaaagagtaacattccagaaaacggtgtaatttatttttcttccttaattgccccatctgtggaggatttctttgctgaacaccacatcaaagggatcttctgcatttaaaatagaagaggcatcatgctgaagagggaggggaaggtccaaccttacactaaaaccctggatggaggatggggatggatgattgtgattcattttttcctggtcccctggttgctattatttgtgacatacttggagagaaaactacctccattcttggggctttcgttgttactggtggatatctgatcagcagctgggccacaagtattccttttctttgtgtgactatgggacttctacccggtttgggttctgctttcttataccaagtggctgctgtggtaactaccaaatacttcaaaaaacgattggctctttctacagctattgcccgttctgggatgggactgacttttcttttggcaccctttacaaaattcctgatagatctgtatgactggacaggagcccttatattatttggagctatcgcattgaatttggtgccttctagtatgctcttaagacccatccatatcaaaagtgagaacaattctggtattaaagataaaggcagcagtttgtctgcacatggtccagaggcacatgcaacagaaacacactgccatgagacagaagagtctaccatcaaggacagtactacgcagaaggctggactacctagcaaaaatttaacagtctcacaaaatcaaagtgaagagttctacaatgggcctaacaggaacagactgttattaaagagtgatgaagaaagtgataaggttatttcgtggagctgcaaacaactgtttgacatttctctctttagaaatcctttcttctacatatttacttggtcttttctcctcagtcagttagcatacttcatccctacctttcacctggtagccagagccaaaacactggggattgacatcatggatgcctcttaccttgtttctgtagcaggtatccttgagacggtcagtcagattatttctggatgggttgctgatcaaaactggattaagaagtatcattaccacaagtcttacctcatcctctgcggcatcactaacctgcttgctcctttagccaccacatttccactacttatgacctacaccatctgctttgccatctttgctggtggttacctggcattgatactgcctgtactggttgatctgtgtaggaattctacagtaaacaggtttttgggacttgccagtttctttgctgggatggctgtcctttctggaccacctatagcaggctggttatatgattatacccagacatacaatggctctttctacttctctggcatatgctatctcctctcttcagtttcctttttttttgtaccattggccgaaagatggaaaaacagtctgacctgaaagaaagaagactgcaatcaagtgagagctaaacaaaagaaaacctaaactaatgtcattggaaacaaaagcttgaaagaaacacatcgcatctacatttgtaacatgagaaggaaaacaatttttttttttttttttttgagacggagtctcgctctttcgcccaggctggagtgcagtggcgcaatctcggctcactgtaatctccgcctcctgggttcaagggattctcctgcctcagcctcccaagtagctgggactacaggcacacgccaccacacccagctaattttttgtatttttagtagaggcggggtttcaccatgttagccaggatggtctccatctcctgacctcgtgatccgcccgccttgtcctccaaagtgctgggattacaggcatgagccactgggcgcggccagataagtttttaaggttccttcttgctttagcattctgagaaatgtctaattggtagtaagacaagagtaatagcaacctgtattgttagtatttaaccaaataggctaaaattttaatcaggtaccttatgtattaaatagaaatcggaatgtaccataataaatccaaactctcaattacgccatggtaattcagtcactaaaatatgtaaagatagaaaattttttaatttaaagaagtgtgaaacatagccattgattgatcagaattctggaatctgaatattaaaaccttacttagtgactggaatggtatatgctccctccaaaagtttatctttgtttattgattaaaggtaatccttactttctttgtattacttaggttcttaattaaaggtaatccttactttctttgtattacttaggttcttaaatttctatgataaacatgtattgctaaataataaaaagtatataaaaattgctttaa

SEQ ID NO: 183021 - DNA, 3807 bp, Homo sapiens
  Payload ID: 16054
  Gene Symbol: SLC16A6
  Gene Name: solute carrier family 16, member 6
  Uniprot ID: O15403
  ENST ID: ENST00000327268
  CDS Start-End: 166-1737
ttgggggtttattctcttcccttctaacttgacagggtcttgctctgtcattcaggcaagagtgcagtagtgtgatcacttcttactgccgcctcaagcttccagcctcaactcaagcaatcctcccacctcagccacccaagtggctgggactacagattaagaatgacccaaaataaattaaagctttgttccaaagccaatgtgtatactgaagtgcctgatggaggatggggctgggcggtagctgtttcatttttcttcgttgaagtcttcacctacggcatcatcaagacatttggtgtcttctttaatgacttaatggacagttttaatgaatccaatagcaggatctcatggataatctcaatctgtgtgtttgtcttaacattttcagctcccctcgccacagtcctgagcaatcgtttcggacaccgtctggtagtgatgttgggggggctacttgtcagcaccgggatggtggccgcctccttctcacaagaggtttctcatatgtacgtcgccatcggcatcatctctggtctgggatactgctttagttttctcccaactgtaaccatcctatcacaatattttggcaaaagacgttccatagtcactgcagttgcttccacaggagaatgtttcgctgtgtttgctttcgcaccagcaatcatggctctgaaggagcgcattggctggagatacagcctcctcttcgtgggcctactacagttaaacattgtcatcttcggagcactgctcagacccatctttatcagaggaccagcgtcaccgaaaatagtcatccaggaaaatcggaaagaagcgcagtatatgcttgaaaatgagaaaacacgaacctcaatagactccattgactcaggagtagaactaactacctcacctaaaaatgtgcctactcacactaacctggaactggagccgaaggccgacatgcagcaggtcctggtgaagaccagccccaggccaagcgaaaagaaagccccgctattagacttctccattttgaaagagaaaagttttatttgttatgcattatttggtctctttgcaacactgggattctttgcaccttccttgtacatcattcctctgggcattagtctgggcattgaccaggaccgcgctgcttttttattatctacgatggccattgcagaagttttcggaaggatcggagctggttttgtcctcaacagggagcccattcgtaagatttacattgagctcatctgcgtcatcttattgactgtgtctctgtttgcctttacttttgctactgaattctggggtctaatgtcatgcagcatattttttgggtttatggttggaacaataggagggactcacattccactgcttgctgaggatgatgtcgtgggcattgagaagatgtcttctgcagctggggtctacatcttcattcagagcatagcaggactggctggaccgccccttgcaggtttgttggtggaccaaagtaagatctacagcagggccttctactcctgcgcagctggcatggccctggctgctgtgtgcctcgccctggtgagaccgtgtaagatgggactgtgccagcatcatcactcaggtgaaacaaaggtagtgagccatcgtgggaagactttacaggacatacctgaagactttctggaaatggatcttgcaaaaaatgagcacagagttcacgtgcaaatggagccggtatgacacactttcttacaacaacagccactgtgttggctggagagggatggggtgggcccaacggggacacaaggaggcagaggagctaacccctctactccactttcaaaactacattttaaagggaatgtgtatgtgaagagcactaccaacatcgcttttgttttgttttgttttgttttaagctttttttttttgcttgtttttaaagccaaaacaaaaaacaaccaagcactcttccatatataaatctggctgtattcagtagcaatacaagagatatgtagaaagactctttggttcacattccgatattaaaatagtgacatgaactggcaaagtggttttaaaagctttcacgtgggataaatgattttctttttttcttttctttcttcctatggtcttgtctgaataaactactctcctgaataaaacaacatccaacccaggtcattgaaatgaaattggccagtcaaaaaaaaaaagacttcaatcatttttaaaattcctaattttcagaaatatgaataaatagtttttgttaaaccctttgtaaaataccaaggttcccgttaacaaattacggcctctgcttgctggaaatgaaatatagtttaagaccaaacattttactaataaacaaattttaagtatatatatatatatataacttgaacttcataaatgtgaagattaccacttctttttatggccagtccttatcagaagtgtttcagtacagaatatacaaaatggcatttaaaaatgtgtttcctgttgcttttagttatacagaaatatgtgactgtagtgtctttaatttaaaccgctatttattattaagttattctaggatgattaaagtaatcaaaagaaataaaatctgagacataagcagcatttttacctcctttctgcaatcctttaaatgcctcacagaatacgtcttatcttgtaaaaatactttcataaaaggccaagttgtcatgattcttccatttgattaggggcaacgtgtgctattaaaggggaaaaaataatggattgcaaatcgccttagctttcaaaactaatttgttttatcatttaagaatacttgaggaacttctttgatcagaattatatttcagagaattgttaaagcatttctgatttaaagaaaaaaccatctaattattgaagcatttctgtatttcacatgggggtaacagagacaattatgttatagcgagttacaagttgcaatttacatcttctataacacatgacttgattggtctaagttgccagaggtatcgggtaactggtcattgttttgttttgtttgttttattcttcctttttttttggagtcacactacatgtatagtattgctcacgttagcagttttctgtaaggagggcaagtgtcaggataataggtggactttttactcacctattttaccacaatctcaccctgcaggtgatggtcaatgcttgctgctccatctttattcatcgttaatgttaatttatgacaactcagggggaaaaacataacaagcctagtttggttacaggtacacacaagcttgaatatttctctgcactgaaatgaaagtggcatagttcatcaccacctgctacattttgtagagcatcttatcagccatagaaataggacaatctataaaactttggggagggtgggggaggaaatgacaaagtgtctgtcaaaaacaggcataatctaaaacaaggtggatgtagcaaatctctgtcactgcttgagaactttgagcttgtggcagttttgcagacttacatgacttcagcactttacgacatattttttactatgaatgttcaatacaatttaatatttataactgatttctgagggatctgctccatgtctattctgttatctgcatgaaaacaaaatgtatgccaatttcagtatgtcaataatcaaggttttaaatgtttggaagaaaatacaaacaagattgctgatctgttctgtattagtgacattctggtacttctagatttgcaataaatttatggattttttatttaaagaga

SEQ ID NO: 183022 - DNA, 584 bp, Homo sapiens
  Payload ID: 16054
  Gene Symbol: SLC16A6
  Gene Name: solute carrier family 16, member 6
  ENST ID: ENST00000582867
  CDS Start-End: 330-584
cttttctcatgttaccgagcggcttataaggagggggaggccaagcctccgccttattgggagcctttgggggtttattctcttcccttctaacttggctggagcgcagcggcacaatctcagctcactgcaacctctgcctcctgggttcaagcagttctcccaccgcagcctcccgagtagctggaagcacagacagggtcttgctctgtcattcaggcaagagtgcagtagtgtgatcacttcttactgccgcctcaagcttccagcctcaactcaagcaatcctcccacctcagccacccaagtggctgggactacagattaagaatgacccaaaataaattaaagctttgttccaaagccaatgtgtatactgaagtgcctgatggaggatggggctgggcggtagctgtttcatttttcttcgttgaagtcttcacctacggcatcatcaagacatttggtgtcttctttaatgacttaatggacagttttaatgaatccaatagcaggatctcatggataatctcaatctgtgtgtttgtcttaacattttcagctcccctcgccacagtcctgagc

SEQ ID NO: 183023 - DNA, 2659 bp, Homo sapiens
  Payload ID: 16054
  Gene Symbol: SLC16A6
  Gene Name: solute carrier family 16, member 6
  Uniprot ID: O15403
  ENST ID: ENST00000580666
  CDS Start-End: 189-1760
gtgggtggagggcccgggcgctcgggcctcaccagcccgagccaacttgcgctagagtcgggcccgccccctaaggggttaatccttttctcatgttaccgagcggcttataaggagggggaggccaagcctccgccttattgggagcctttgggggtttattctcttcccttctaacttgattaagaatgacccaaaataaattaaagctttgttccaaagccaatgtgtatactgaagtgcctgatggaggatggggctgggcggtagctgtttcatttttcttcgttgaagtcttcacctacggcatcatcaagacatttggtgtcttctttaatgacttaatggacagttttaatgaatccaatagcaggatctcatggataatctcaatctgtgtgtttgtcttaacattttcagctcccctcgccacagtcctgagcaatcgtttcggacaccgtctggtagtgatgttgggggggctacttgtcagcaccgggatggtggccgcctccttctcacaagaggtttctcatatgtacgtcgccatcggcatcatctctggtctgggatactgctttagttttctcccaactgtaaccatcctatcacaatattttggcaaaagacgttccatagtcactgcagttgcttccacaggagaatgtttcgctgtgtttgctttcgcaccagcaatcatggctctgaaggagcgcattggctggagatacagcctcctcttcgtgggcctactacagttaaacattgtcatcttcggagcactgctcagacccatctttatcagaggaccagcgtcaccgaaaatagtcatccaggaaaatcggaaagaagcgcagtatatgcttgaaaatgagaaaacacgaacctcaatagactccattgactcaggagtagaactaactacctcacctaaaaatgtgcctactcacactaacctggaactggagccgaaggccgacatgcagcaggtcctggtgaagaccagccccaggccaagcgaaaagaaagccccgctattagacttctccattttgaaagagaaaagttttatttgttatgcattatttggtctctttgcaacactgggattctttgcaccttccttgtacatcattcctctgggcattagtctgggcattgaccaggaccgcgctgcttttttattatctacgatggccattgcagaagttttcggaaggatcggagctggttttgtcctcaacagggagcccattcgtaagatttacattgagctcatctgcgtcatcttattgactgtgtctctgtttgcctttacttttgctactgaattctggggtctaatgtcatgcagcatattttttgggtttatggttggaacaataggagggactcacattccactgcttgctgaggatgatgtcgtgggcattgagaagatgtcttctgcagctggggtctacatcttcattcagagcatagcaggactggctggaccgccccttgcaggtttgttggtggaccaaagtaagatctacagcagggccttctactcctgcgcagctggcatggccctggctgctgtgtgcctcgccctggtgagaccgtgtaagatgggactgtgccagcatcatcactcaggtgaaacaaaggtagtgagccatcgtgggaagactttacaggacatacctgaagactttctggaaatggatcttgcaaaaaatgagcacagagttcacgtgcaaatggagccggtatgacacactttcttacaacaacagccactgtgttggctggagagggatggggtgggcccaacggggacacaaggaggcagaggagctaacccctctactccactttcaaaactacattttaaagggaatgtgtatgtgaagagcactaccaacatcgcttttgttttgttttgttttgttttaagctttttttttttgcttgtttttaaagccaaaacaaaaaacaaccaagcactcttccatatataaatctggctgtattcagtagcaatacaagagatatgtagaaagactctttggttcacattccgatattaaaatagtgacatgaactggcaaagtggttttaaaagctttcacgtgggataaatgattttctttttttcttttctttcttcctatggtcttgtctgaataaactactctcctgaataaaacaacatccaacccaggtcattgaaatgaaattggccagtcaaaaaaaaaaagacttcaatcatttttaaaattcctaattttcagaaatatgaataaatagtttttgttaaaccctttgtaaaataccaaggttcccgttaacaaattacggcctctgcttgctggaaatgaaatatagtttaagaccaaacattttactaataaacaaattttaagtatatatatatatatataacttgaacttcataaatgtgaagattaccacttctttttatggccagtccttatcagaagtgtttcagtacagaatatacaaaatggcatttaaaaatgtgtttcctgttgcttttagttatacagaaatatgtgactgtagtgtctttaatttaaaccgctatttattattaagttattctaggatgattaaagtaatcaaaagaaataaaatctgagacataagcagc

SEQ ID NO: 183024 - DNA, 577 bp, Homo sapiens
  Payload ID: 16054
  Gene Symbol: SLC16A6
  Gene Name: solute carrier family 16, member 6
  ENST ID: ENST00000583477
  CDS Start-End: 190-577
agtgggtggagggcccgggcgctcgggcctcaccagcccgagccaacttgcgctagagtcgggcccgccccctaaggggttaatccttttctcatgttaccgagcggcttataaggagggggaggccaagcctccgccttattgggagcctttgggggtttattctcttcccttctaacttgattaagaatgacccaaaataaattaaagctttgttccaaagccaatgtgtatactgaagtgcctgatggaggatggggctgggcggtagctgtttcatttttcttcgttgaagtcttcacctacggcatcatcaagacatttggtgtcttctttaatgacttaatggacagttttaatgaatccaatagcaggatctcatggataatctcaatctgtgtgtttgtcttaacattttcaggtctgggatactgctttagttttctcccaactgtaaccatcctatcacaatattttggcaaaagacgttccatagtcactgcagttgcttccacaggagaatgtttcgctgtgtttgctttcgcaccagcaatcatggctctgaaggagcgcattg

SEQ ID NO: 183025 - DNA, 2055 bp, Homo sapiens
  Payload ID: 16054
  Gene Symbol: SLC16A6
  Gene Name: solute carrier family 16, member 6
  ENST ID: ENST00000620436
  CDS Start-End: 13-1581
ttcagattaagaatgacccaaaataaattaaagctttgttccaaagccaatgtgtatactgaagtgcctgatggaggatggggctgggcggtagctgtttcatttttcttcgttgaagtcttcacctacggcatcatcaagacatttggtgtcttctttaatgacttaatggacagttttaatgaatccaatagcaggatctcatggataatctcaatctgtgtgtttgtcttaacattttcagctcccctcgccacagtcctgagcaatcgtttcggacaccgtctggtagtgatgttgggggggctacttgtcagcaccgggatggtggccgcctccttctcacaagaggtttctcatatgtacgtcgccatcggcatcatctctggtctgggatactgctttagttttctcccaactgtaaccatcctatcacaatattttggcaaaagacgttccatagtcactgcagttgcttccacaggagaatgtttcgctgtgtttgctttcgcaccagcaatcatggctctgaaggagcgcattggctggagatacagcctcctcttcgtgggcctactacagttaaacattgtcatcttcggagcactgctcagacccatctttatcagaggaccagcgtcaccgaaaatagtcatccaggaaaatcggaaagaagcgcagtatatgcttgaaaatgagaaaacacgaacctcaatagactccattgactcaggagtagaactaactacctcacctaaaaatgtgcctactcacactaacctggaactggagccgaaggccgacatgcagcaggtcctggtgaagaccagccccaggccaagcgaaaagaaagccccgctattagacttctccattttgaaagagaaaagttttatttgttatgcattatttggtctctttgcaacactgggattctttgcaccttccttgtacatcattcctctgggcattagtctgggcattgaccaggaccgcgctgcttttttattatctacgatggccattgcagaagttttcggaaggatcggagctggttttgtcctcaacagggagcccattcgtaagatttacattgagctcatctgcgtcatcttattgactgtgtctctgtttgcctttacttttgctactgaattctggggtctaatgtcatgcagcatattttttgggtttatggttggaacaataggaggactcacattccactgcttgctgaggatgatgtcgtgggcattgaagatgtcttctgcagctggggtctacatcttcattcagagcatagcaggactggctggaccgccccttgcaggtttgttggtggaccaaagtaagatctacagcagggccttctactcctgcgcagctggcatggccctggctgctgtgtgcctcgccctggtgagaccgtgtaagatgggactgtgccagcatcatcactcaggtgaaacaaaggtagtgagccatcgtgggaagactttacaggacatacctgaagactttctggaaatggatcttgcaaaaaatgagcacagagttcacgtgcaaatggagccggtatgacacactttcttacaacaacagccactgtgttggctggagagggatggggtgggcccaacggggacacaaggaggcagaggagctaacccctctactccactttcaaaactacattttaaagggaatgtgtatgtgaagagcactaccaacatcgcttttgttttgttttgttttgttttaagctttttttttttgcttgtttttaaagccaaaacaaaaaacaaccaagcactcttccatatataaatctggctgtattcagtagcaatacaagagatatgtagaaagactctttggttcacattccgatattaaaatagtgacatgaactggcaaagtggttttaaaagctttcacgtgggataaatgattttctttttttcttttctttcttcctatggtcttgtctgaataaactactctcctgaataaaacaacatccaacccaggtcattgaaatgaaattggccagtc

SEQ ID NO: 183026 - DNA, 3646 bp, Homo sapiens
  Payload ID: 16055
  Gene Symbol: SLC16A9
  Gene Name: solute carrier family 16, member 9
  Uniprot ID: Q7RTY1
  ENST ID: ENST00000395347
  CDS Start-End: 110-1639
agtttgaggccaacactaggaagtgtctggaaccggatccggaggcttcacaatctatatgttgcctccaaaggacctgcagagaaacgcctcctgattttgtcttacaatggaacttaaaaagtcgcctgacggtggatggggctgggtgattgtgtttgtctccttccttactcagtttttgtgttacggatccccactagctgttggagtcctgtacatagaatggctggatgcctttggtgaaggaaaaggaaaaacagcctgggttggatccctggcaagtggagttggcttgcttgcaagtcctgtctgcagtctctgtgtctcatcttttggagcaagacctgtcacaatcttcagtggcttcatggtggctggaggcctgatgttgagcagttttgctcccaatatctactttctgtttttttcctatggcattgttgtaggtcttggatgtggtttattatacactgcaacagtgaccattacgtgccagtattttgacgatcgccgaggcctagcgcttggcctgatttcaacaggttcaagcgttggccttttcatatatgctgctctgcagaggatgctggttgagttctatggactggatggatgcttgctgattgtgggtgctttagctttaaatatattagcctgtggcagtctgatgagacccctccaatcttctgattgtcctttgcctaaaaaaatagctccagaagatctaccagataaatactccatttacaatgaaaaaggaaagaatctggaagaaaacataaacattcttgacaagagctacagtagtgaggaaaaatgcaggatcacgttagccaatggtgactggaaacaagacagcctacttcataaaaaccccacagtgacacacacaaaagagcctgaaacgtacaaaaagaaagttgcagaacagacatatttttgcaaacagcttgccaagaggaagtggcagttatataaaaactactgtggtgaaactgtggctctttttaaaaacaaagtattttcagcccttttcattgctatcttactctttgacatcggagggtttccaccttcattacttatggaagatgtagcaagaagttcaaacgtgaaagaagaagagtttattatgccacttatttccattataggcattatgacagcagttggtaaactgcttttagggatactggctgacttcaagtggattaataccttgtatctttatgttgctaccttaatcatcatgggcctagccttgtgtgcaattccatttgccaaaagctatgtcacattggcgttgctttctgggatcctagggtttcttactggtaattggtccatctttccatatgtgaccacgaagactgtgggaattgaaaaattagcccatgcctatgggatattaatgttctttgctggacttggaaatagcctaggaccacccatcgttggttggttttatgactggacccagacctatgatattgcattttattttagtggcttctgcgtcctgctgggaggttttattctgctgctggcagccttgccctcttgggatacatgcaacaagcaactccccaagccagctccaacaactttcttgtacaaagttgcctctaatgtttagaagaatattggaagacactatttttgctattttataccatatagcaacgatattttaacagattctcaagcaaattttctagagtcaagactattttctcatagcaaaatttcacaatgactgactctgaatgaattatttttttttatatatcctattttttatgtagtgtatgcgtagcctctatctcgtatttttttctatttctcctccccacaccatcaatgggactattctgttttgctgttattcactagttcttaacattgtaaaaagtttgaccagcctcagaaggctttctctgtgtaaagaagtataatttctctgccgactccatttaatccactgcaaggcacctagagagactgctcctattttaaaagtgatgcaagcatcatgataagatatgtgtgaagcccactaggaaataaatcattctcttctctatgtttgacttgctagtaaacagaagacttcaagccagccaggaaattaaagtggcgactaaaacagccttaagaattgcagtggagcaaattggtcattttttaaaaaaatatattttaacctacagtcaccagttttcattattctatttacctcactgaagtactcgcatgttgtttggtacccactgagcaactgtttcagttcctaaggtatttgctgagatgtgggtgaactccaaatggagaagtagtcactgtagactttcttcatggttgaccactccaaccttgctcacttttgcttcttggccatccactcagctgatgtttcctgggaagtgctaattttacctgtttccaaattggaaacacatttctcaatcattccgttctggcaaatgggaaacatccatttgctttgggcacagtggggatgggctgcaagttcttgcatatcctcccagtgaagcatttatttgctactatcagattttaccactatcaaatataattcaagggcagaattaaacgtgagtgtgtgtgtgtgtgtgtgtgtgtgctatgcatgctctaagtctgcatgggatatgggaatggaaaagggcaataagaaattaatacccttatgcagttgcatttaaccttaagaaaaatgtccttgggataaactccaatgtttaatacattgattttttttctaaagaaatgggttttaaactttggtatgcatcagaattccctatagatctttttgaaaatataggtacctgggtatcacacatagaacttttaattctgctggtgtaggctgttgcccaaacatctataattttactgagctcttcaagtgattctgataacacagcctggattgagaatttttataagattggcaatggaaaaacatttattcttttaaataataatttttttaaaacccaagaggtcaggggattttataaaccaatagccaagtgttctttaaataggaggcacccttcccattgtgccaaaatcatcttttcatttattttgaaatttgtatgattattttatacttgtatgttgcctttcttcgaaggcgcctgaagcactttataaacacaaatcctcacaatacctctgtgaggtaggtaaatagtacttttctatgtagtaaacctggaatatggagaatttcataacagttcattctacttaataatgcaataatggagctccaagttgtcttggacttctacaccacactcagacttctggaaagttttctgtacctcattctttagtccctgtcaaggttagtaaataaaataagtgacataaaaaaaaaaaaaactaaactacttgttgtgttgaaagttcctttttgccagttatgttcaggaaacccaataacctgaaaaagtttgactttgatgtgacatcttcatattcatcaatgctgataattgtccaaaggcatcttcactatgtctgctaaataacatccaatgtgggcgttatctgttgtctaggggatgaattttaagttacaataaaatatttttctttgttttgc

SEQ ID NO: 183027 - DNA, 4178 bp, Homo sapiens
  Payload ID: 16055
  Gene Symbol: SLC16A9
  Gene Name: solute carrier family 16, member 9
  Uniprot ID: Q7RTY1
  ENST ID: ENST00000395348
  CDS Start-End: 638-2167
gtgcgcaccgagagggcgcctggccgacggcgcccacctctctcgtggctttggtggctccaggcctggtagggccggggccgcggctcgggcagtgccctccctactcctggccgggccgggagcagcgggagcaggcgcagcgcccctaccgcccgcttttccgcctccatctcctccgcctcctcctcctccttcccccaaccacccgcgcagtcacaaccggttcagactggccggggtgccccgcaaagagagacaagggagaaaaagacagcagggaaaaccccggggaggagaaggcgaaagagaaggtggagctcagagaagggggccggctccccagctccatgtggccgccgccgctgcgggtctgtgggggcagagggcggcggctcccggggcagcgcgtagcgggaccgattgcctaatactccggcaggggccggggccgcagctggctcggataaatagccgcccggctggcccggagctgcaggggagagcggcggccgcgatccccaccacaccaccagcccggccgcacggggcactgagccgggtgctgagcaccggaggccccgccgaggccgggactcaggacctgcagagaaacgcctcctgattttgtcttacaatggaacttaaaaagtcgcctgacggtggatggggctgggtgattgtgtttgtctccttccttactcagtttttgtgttacggatccccactagctgttggagtcctgtacatagaatggctggatgcctttggtgaaggaaaaggaaaaacagcctgggttggatccctggcaagtggagttggcttgcttgcaagtcctgtctgcagtctctgtgtctcatcttttggagcaagacctgtcacaatcttcagtggcttcatggtggctggaggcctgatgttgagcagttttgctcccaatatctactttctgtttttttcctatggcattgttgtaggtcttggatgtggtttattatacactgcaacagtgaccattacgtgccagtattttgacgatcgccgaggcctagcgcttggcctgatttcaacaggttcaagcgttggccttttcatatatgctgctctgcagaggatgctggttgagttctatggactggatggatgcttgctgattgtgggtgctttagctttaaatatattagcctgtggcagtctgatgagacccctccaatcttctgattgtcctttgcctaaaaaaatagctccagaagatctaccagataaatactccatttacaatgaaaaaggaaagaatctggaagaaaacataaacattcttgacaagagctacagtagtgaggaaaaatgcaggatcacgttagccaatggtgactggaaacaagacagcctacttcataaaaaccccacagtgacacacacaaaagagcctgaaacgtacaaaaagaaagttgcagaacagacatatttttgcaaacagcttgccaagaggaagtggcagttatataaaaactactgtggtgaaactgtggctctttttaaaaacaaagtattttcagcccttttcattgctatcttactctttgacatcggagggtttccaccttcattacttatggaagatgtagcaagaagttcaaacgtgaaagaagaagagtttattatgccacttatttccattataggcattatgacagcagttggtaaactgcttttagggatactggctgacttcaagtggattaataccttgtatctttatgttgctaccttaatcatcatgggcctagccttgtgtgcaattccatttgccaaaagctatgtcacattggcgttgctttctgggatcctagggtttcttactggtaattggtccatctttccatatgtgaccacgaagactgtgggaattgaaaaattagcccatgcctatgggatattaatgttctttgctggacttggaaatagcctaggaccacccatcgttggttggttttatgactggacccagacctatgatattgcattttattttagtggcttctgcgtcctgctgggaggttttattctgctgctggcagccttgccctcttgggatacatgcaacaagcaactccccaagccagctccaacaactttcttgtacaaagttgcctctaatgtttagaagaatattggaagacactatttttgctattttataccatatagcaacgatattttaacagattctcaagcaaattttctagagtcaagactattttctcatagcaaaatttcacaatgactgactctgaatgaattatttttttttatatatcctattttttatgtagtgtatgcgtagcctctatctcgtatttttttctatttctcctccccacaccatcaatgggactattctgttttgctgttattcactagttcttaacattgtaaaaagtttgaccagcctcagaaggctttctctgtgtaaagaagtataatttctctgccgactccatttaatccactgcaaggcacctagagagactgctcctattttaaaagtgatgcaagcatcatgataagatatgtgtgaagcccactaggaaataaatcattctcttctctatgtttgacttgctagtaaacagaagacttcaagccagccaggaaattaaagtggcgactaaaacagccttaagaattgcagtggagcaaattggtcattttttaaaaaaatatattttaacctacagtcaccagttttcattattctatttacctcactgaagtactcgcatgttgtttggtacccactgagcaactgtttcagttcctaaggtatttgctgagatgtgggtgaactccaaatggagaagtagtcactgtagactttcttcatggttgaccactccaaccttgctcacttttgcttcttggccatccactcagctgatgtttcctgggaagtgctaattttacctgtttccaaattggaaacacatttctcaatcattccgttctggcaaatgggaaacatccatttgctttgggcacagtggggatgggctgcaagttcttgcatatcctcccagtgaagcatttatttgctactatcagattttaccactatcaaatataattcaagggcagaattaaacgtgagtgtgtgtgtgtgtgtgtgtgtgtgctatgcatgctctaagtctgcatgggatatgggaatggaaaagggcaataagaaattaatacccttatgcagttgcatttaaccttaagaaaaatgtccttgggataaactccaatgtttaatacattgattttttttctaaagaaatgggttttaaactttggtatgcatcagaattccctatagatctttttgaaaatataggtacctgggtatcacacatagaacttttaattctgctggtgtaggctgttgcccaaacatctataattttactgagctcttcaagtgattctgataacacagcctggattgagaatttttataagattggcaatggaaaaacatttattcttttaaataataatttttttaaaacccaagaggtcaggggattttataaaccaatagccaagtgttctttaaataggaggcacccttcccattgtgccaaaatcatcttttcatttattttgaaatttgtatgattattttatacttgtatgttgcctttcttcgaaggcgcctgaagcactttataaacacaaatcctcacaatacctctgtgaggtaggtaaatagtacttttctatgtagtaaacctggaatatggagaatttcataacagttcattctacttaataatgcaataatggagctccaagttgtcttggacttctacaccacactcagacttctggaaagttttctgtacctcattctttagtccctgtcaaggttagtaaataaaataagtgacataaaaaaaaaaaaaactaaactacttgttgtgttgaaagttcctttttgccagttatgttcaggaaacccaataacctgaaaaagtttgactttgatgtgacatcttcatattcatcaatgctgataattgtccaaaggcatcttcactatgtctgctaaataacatccaatgtgggcgttatctgttgtctaggggatgaattttaagttacaataaaatatttttctttgttttgcatca

SEQ ID NO: 183028 - DNA, 3455 bp, Homo sapiens
  Payload ID: 16056
  Gene Symbol: SLC17A5
  Gene Name: solute carrier family 17 (acidic sugar transporter), member 5
  Uniprot ID: Q9NRA2
  ENST ID: ENST00000355773
  CDS Start-End: 270-1757
ggctcactttgcgccaatcctacgagaactcccagaactccgcttccctagtccaacccaagccagagttgcccacacctaagatggcggcgggggcggagtcggcgcggccgcctctgggcgggaccgcggggactagacgtggccgcggggcggtgtcatcgcccccgccccgcccggtccagccagctcggcccgggggcttcgggctgtcgggccggcgctcccttctctgccaggtggcgagtacacctgctcacgtaggcgtcatgaggtctccggttcgagacctggcccggaacgatggcgaggagagcacggaccgcacgcctcttctaccgggcgccccacgggccgaagccgctccagtgtgctgctctgctcgttacaacttagcaattttggccttttttggtttcttcattgtgtatgcattacgtgtgaatctgagtgttgcgttagtggatatggtagattcaaatacaactttagaagataatagaacttccaaggcgtgtccagagcattctgctcccataaaagttcatcataatcaaacgggtaagaagtaccaatgggatgcagaaactcaaggatggattctcggttcctttttttatggctacatcatcacacagattcctggaggatatgttgccagcaaaataggggggaaaatgctgctaggatttgggatccttggcactgctgtcctcaccctgttcactcccattgctgcagatttaggagttggaccactcattgtactcagagcactagaaggactaggagagggtgttacatttccagccatgcatgccatgtggtcttcttgggctccccctcttgaaagaagcaaacttcttagcatttcatatgcaggagcacagcttgggacagtaatttctcttcctctttctggaataatttgctactatatgaattggacttatgtcttctacttttttggtactattggaatattttggtttcttttgtggatctggttagttagtgacacaccacaaaaacacaagagaatttcccattatgaaaaggaatacattctttcatcattaagaaatcagctttcttcacagaagtcagtgccgtgggtacccattttaaaatccctgccactttgggctatcgtagttgcacacttttcttacaactggactttttatactttattgacattattgcctacttatatgaaggagatcctaaggttcaatgttcaagagaatgggtttttatcttcattgccttatttaggctcttggttatgtatgatcctgtctggtcaagctgctgacaatttaagggcaaaatggaatttttcaactttatgtgttcgcagaatttttagccttataggaatgattggacctgcagtattcctggtagctgctggcttcattggctgtgattattctttggccgttgctttcctaactatatcaacaacactgggaggcttttgctcttctggatttagcatcaaccatctggatattgctccttcgtatgctggtatcctcctgggcatcacaaatacatttgccactattccaggaatggttgggcccgtcattgctaaaagtctgacccctgataacactgttggagaatggcaaaccgtgttctatattgctgctgctattaatgtttttggtgccattttctttacactattcgccaaaggtgaagtacaaaactgggctctcaatgatcaccatggacacagacactgaaggaaccaataaataatcctgcctctattaatgtatttttatttatcatgtaacctcaaagtgccttctgtattgtgtaagcattctatgtctttttttaattgtacttgtattagatttttaaggcctataatcatgaaatatcactagttgccagaataataaaatgaactgtgtttaattatgaataatatgtaagctaggacttctactttaggttcacatacctgcctgctagtcgggcaacatgaagtaggacagttctgttgattttttagggccatactaaagggaatgagctgaaacagacctcctgatacctttgcttaattaaactagatgataattctcaggtactgataaacacctgttgttgttcactttcctcataaaaattgtcagctctctctgacacttagacctcaaactttagcatctctgtggagctgccatccactgtataatttcgcctggcaactggactgaggggagtgtgcccaggcagctgccaagcactccctccctggcttcagggtcagagtgcccagcgtttatcagaggcagcatccaagcccagagccagtgtcgactcttcggctggtgcctttcctctgaggggctatcaatgtgtagataaagccctgagtaggcaagagcagtgagatccactgctatggtcttgatacatcctcaaactttcccttcccagcacagaggaatattggctggcatgcaacctgcaaaagaaaaatgcgaagcggccgggcacggtggctcatgcctgtaatcccagcactttggggggctgaggtgggcgaatcatgagatcaggagttcgagaccagcctggccagcatggtgaaaccccatctctactaaaaatacaaaaaattagctgggcgtggtgacgggcgcctgtaatcccagatactcaggaggctgaggtaggagaatcacttgaacctgggaggtggaagttgcagtgaaccaagatcacgccactgcactccagcctgggcgatggagcgagactccaactcaaaaaaaaaaaaagaataaagaaagaaaagtgcgatgcccagtcaatcacaaataagatcatcctggtttaaatctactctcacatggatcacagtataaatttctatgtgctgtgttttgttcgtttgtattttgtagagatggggtctcgttttgtcgcccaggctggttttgaactcctggcttcaagcgatcctcctgtctcggcctcacaaagtgttgagactacaggcatgagccactgtgcccagcctgttctatgtttttaagctacacgagaattttttttttaattaattctcactgtttgttcagtctgtcttcatctaagtttgtgttgcagtttaaagttaaagtgacttttaaaggccacatcacctgagactagggtaatcatctttacttctggttcctgaaatcatatttttccagtggaccatcctccagtggctgtggttgttgagcatgctttcagaacacctatgtggcttaaaacttagtttatgttttgtgttcaacactacgtgtaatattttaaaactgtttaatgtgatgtgaatacatttatgtacatttatttttaaatttgtaaatagctttaaattgctatggcaatgtttcttttataaatcatcaaaataaacctttgtgaattga

SEQ ID NO: 183029 - DNA, 1844 bp, Homo sapiens
  Payload ID: 16057
  Gene Symbol: SLC17A1
  Gene Name: solute carrier family 17 (organic anion transporter), member 1
  Uniprot ID: Q14916
  ENST ID: ENST00000244527
  CDS Start-End: 117-1520
attgtgtaaagttgagagaaaagtcttcacagcggaagaagaaatcacttttttgtcccgaatcagtgggtggaggcaaaacccttcagcaagaagagaagcaacttcagccgtgtatgcaaatggataaccggttgcctcccaaaaaagttccaggtttctgttcctttcgctatggattgtctttccttgtgcactgttgtaatgttataataacagcacagcgtgcgtgcctgaacctcacaatggtagtcatggtgaatagcacagatccacatggtttgcccaacacctccacaaagaagctcctggataatataaagaaccctatgtataattggagcccagatatccagggaatcatcttgagttccacctcctatggtgtcatcatcatccaagttcctgttggatacttctctggaatatattctacaaagaaaatgattggctttgcattatgcctcagctctgtgttaagcctgctcatcccaccagcagctggaattggagtagcttgggtcgttgtatgtcgagcagttcagggagcagcccaggggatagttgcaacagcccagtttgaaatatatgtcaaatgggctcctcccctggaacgaggccgacttacttctatgagtacatcagggtttttgctgggaccctttattgtcctacttgtgactggagttatctgtgaatctctgggctggcccatggtcttctatatttttggtgcttgtggctgtgccgtatgtcttctctggttcgttctgttttatgatgaccccaaagaccacccatgtataagcatcagtgaaaaggaatacatcacatcctccctggtccagcaggtcagttcaagtagacaatctctgcctatcaaggctatacttaagtcgcttccagtctgggctatttccactggtagttttacgtttttctggtcacataacatcatgacactatacactccaatgtttatcaactccatgcttcatgttaatataaaagagaatgggttcttgtcttcccttccctatttgtttgcctggatctgtggtaacctagcaggtcagttatcagacttcttcctgaccaggaatattctcagcgtaattgctgtccggaaactcttcacagcagcaggatttctccttcctgcaatctttggtgtctgcctgccttacctgagttccaccttctacagcattgtcattttcctaatacttgctggtgcaacaggcagcttttgcttgggtggagtgtttataaatggcttggatattgctcccagatattttggatttattaaagcatgttcaactttaactggaatgataggaggactaattgcttccactttgactggattgatccttaagcaggatccggaatccgcctggtttaaaaccttcatcctgatggcagccattaatgtgactggcctaattttctaccttatagttgctacagcagaaattcaggactgggctaaagaaaaacaacacacacgtctctgaagtgtgaaacagagcacttgcagagcctgggacaacctccttattgaagggaagagggaccagcacatgaggctgaggctgaggggcagtcaccagcaccaggaagaaggtggtaggaggagtcctaggggccagttttaccctcccacatatcctgtgtgcatcgttttttaacatgtgttgtttgtaacatgtaatatatctgaattttaaatgggggtggtgatttatctcagtcttcctctctgcatcagttgctttataaatgattgtcaaaccaataaatacacacaagataaaattttattctaaggcttcatgaaa

SEQ ID NO: 183030 - DNA, 1433 bp, Homo sapiens
  Payload ID: 16057
  Gene Symbol: SLC17A1
  Gene Name: solute carrier family 17 (organic anion transporter), member 1
  ENST ID: ENST00000377886
  CDS Start-End: 54-683
cagtgggtggaggcaaaacccttcagcaagaagagaagcaacttcagccgtgtatgcaaatggataaccggttgcctcccaaaaaagttccaggtttctgttcctttcgctatggattgtctttccttgtgcactgttgtaatgttataataacagcacagcgtgcgtgcctgaacctcacaatggtagtcatggtgaatagcacagatccacatggtttgcccaacacctccacaaagaagctcctggataatataaagaaccctatgtataattggagcccagatatccagggaatcatcttgagttccacctcctatggtgtcatcatcatccaagttcctgttggatacttctctggaatatattctacaaagaaaatgattggctttgcattatgcctcagctctgtgttaagcctgctcatcccaccagcagctggaattggagtagcttgggtcgttgtatgtcgagcagttcagggagcagcccaggggatagttgcaacagcccagtttgaaatatatgtcaaatgggctcctcccctggaacgaggccgacttacttctatgagtacatcagggtttttgctgggaccctttattgtcctacttgtgactggagttatctgtgaatctctgggctggcccatggtcttctatatttttggtcagttcaagtagacaatctctgcctatcaaggctatacttaagtcgcttccagtctgggctatttccactggtagttttacgtttttctggtcacataacatcatgacactatacactccaatgtttatcaactccatgcttcatgttaatataaaagagaatgggttcttgtcttcccttccctatttgtttgcctggatctgtggtaacctagcaggtcagttatcagacttcttcctgaccaggaatattctcagcgtaattgctgtccggaaactcttcacagcagcaggatttctccttcctgcaatctttggtgtctgcctgccttacctgagttccaccttctacagcattgtcattttcctaatacttgctggtgcaacaggcagcttttgcttgggtggagtgtttataaatggcttggatattgctcccagatattttggatttattaaagcatgttcaactttaactggaatgataggaggactaattgcttccactttgactggattgatccttaagcaggatccggaatccgcctggtttaaaaccttcatcctgatggcagccattaatgtgactggcctaattttctaccttatagttgctacagcagaaattcaggactgggctaaagaaaaacaacacacacgtctctgaagtgtgaaacagagcacttgcagagcctgggacaacctccttattgaagggaagagggaccagcacatgaggctgaggctgaggggcagtcacca

SEQ ID NO: 183031 - DNA, 1242 bp, Homo sapiens
  Payload ID: 16057
  Gene Symbol: SLC17A1
  Gene Name: solute carrier family 17 (organic anion transporter), member 1
  Uniprot ID: Q14916
  ENST ID: ENST00000468082
  CDS Start-End: 1-1242
atgcaaatggataaccggttgcctcccaaaaaagttccaggtttctgttcctttcgctatggattgtctttccttgtgcactgttgtaatgttataataacagcacagcgtgcgtgcctgaacctcacaatggtagtcatggtgaatagcacagatccacatggtttgcccaacacctccacaaagaagctcctggataatataaagaaccctatgtataattggagcccagatatccagggaatcatcttgagttccacctcctatggtgtcatcatcatccaagttcctgttggatacttctctggaatatattctacaaagaaaatgattggctttgcattatgcctcagctctgtgttaagcctgctcatcccaccagcagctggaattggagtagcttgggtcgttgtatgtcgagcagttcagggagcagcccaggggatagttgcaacagcccagtttgaaatatatgtcaaatgggctcctcccctggaacgaggccgacttacttctatgagtacatcagggtttttgctgggaccctttattgtcctacttgtgactggagttatctgtgaatctctgggctggcccatggtcttctatatttttggtgcttgtggctgtgccgtatgtcttctctggttcgttctgttttatgatgaccccaaagaccacccatgtataagcatcagtgaaaaggaatacatcacatcctccctggtccagcagaatgggttcttgtcttcccttccctatttgtttgcctggatctgtggtaacctagcaggtcagttatcagacttcttcctgaccaggaatattctcagcgtaattgctgtccggaaactcttcacagcagcaggatttctccttcctgcaatctttggtgtctgcctgccttacctgagttccaccttctacagcattgtcattttcctaatacttgctggtgcaacaggcagcttttgcttgggtggagtgtttataaatggcttggatattgctcccagatattttggatttattaaagcatgttcaactttaactggaatgataggaggactaattgcttccactttgactggattgatccttaagcaggatccggaatccgcctggtttaaaaccttcatcctgatggcagccattaatgtgactggcctaattttctaccttatagttgctacagcagaaattcaggactgggctaaagaaaaacaacacacacgtctctga

SEQ ID NO: 183032 - DNA, 1704 bp, Homo sapiens
  Payload ID: 16057
  Gene Symbol: SLC17A1
  Gene Name: solute carrier family 17 (organic anion transporter), member 1
  Uniprot ID: Q14916
  ENST ID: ENST00000476801
  CDS Start-End: 99-1502
aaaagtcttcacagcggaagaagaaatcacttttttgtcccgaatcagtgggtggaggcaaaacccttcagcaagaagagaagcaacttcagccgtgtatgcaaatggataaccggttgcctcccaaaaaagttccaggtttctgttcctttcgctatggattgtctttccttgtgcactgttgtaatgttataataacagcacagcgtgcgtgcctgaacctcacaatggtagtcatggtgaatagcacagatccacatggtttgcccaacacctccacaaagaagctcctggataatataaagaaccctatgtataattggagcccagatatccagggaatcatcttgagttccacctcctatggtgtcatcatcatccaagttcctgttggatacttctctggaatatattctacaaagaaaatgattggctttgcattatgcctcagctctgtgttaagcctgctcatcccaccagcagctggaattggagtagcttgggtcgttgtatgtcgagcagttcagggagcagcccaggggatagttgcaacagcccagtttgaaatatatgtcaaatgggctcctcccctggaacgaggccgacttacttctatgagtacatcagggtttttgctgggaccctttattgtcctacttgtgactggagttatctgtgaatctctgggctggcccatggtcttctatatttttggtgcttgtggctgtgccgtatgtcttctctggttcgttctgttttatgatgaccccaaagaccacccatgtataagcatcagtgaaaaggaatacatcacatcctccctggtccagcaggtcagttcaagtagacaatctctgcctatcaaggctatacttaagtcgcttccagtctgggctatttccactggtagttttacgtttttctggtcacataacatcatgacactatacactccaatgtttatcaactccatgcttcatgttaatataaaagagaatgggttcttgtcttcccttccctatttgtttgcctggatctgtggtaacctagcaggtcagttatcagacttcttcctgaccaggaatattctcagcgtaattgctgtccggaaactcttcacagcagcaggatttctccttcctgcaatctttggtgtctgcctgccttacctgagttccaccttctacagcattgtcattttcctaatacttgctggtgcaacaggcagcttttgcttgggtggagtgtttataaatggcttggatattgctcccagatattttggatttattaaagcatgttcaactttaactggaatgataggaggactaattgcttccactttgactggattgatccttaagcaggatccggaatccgcctggtttaaaaccttcatcctgatggcagccattaatgtgactggcctaattttctaccttatagttgctacagcagaaattcaggactgggctaaagaaaaacaacacacacgtctctgaaggtgagaagtgatcagattaaggacaatttttgaaactgggaatgcaggagacagaggagataaggatgactcctcagacgagaaggaataacgggtgcaggtttggagaagaggagaccatgttaagcctgagaatattagacatcctgaaatggctgtgggactctgtggggatgctaaggctggagatataaatttgg

SEQ ID NO: 183033 - DNA, 1750 bp, Homo sapiens
  Payload ID: 16058
  Gene Symbol: SLC17A3
  Gene Name: solute carrier family 17 (organic anion transporter), member 3
  Uniprot ID: O00476
  ENST ID: ENST00000360657
  CDS Start-End: 287-1549
gtcggggccagagcgcaggtgtacctggcggccgtgctggagcacctgaccgccgagatcctggagctggctggcaacccggcccgcgacaagaagacccgcatcatcctgcgccacctgtagctggccattcgcaacggcgaggagcttaacaagctgctgggcgaagtcaccatcgcgcagggcggtgtcctgcccaacattcagggcgtgcttctgccccagaagaccaagagccaccacaaggccaagggtgaaaaccattcactaggagaggagaaacacaatggccaccaagacagagttgagtcccacagcaagggagagcaagaacgcacaagatatgcaagtggatgagacactgatccccaggaaagttccaagtttatgttctgctcgctatggaatagccctcgtcttacatttctgcaatttcacaacgatagcacaaaatgtcatcatgaacatcaccatggtagccatggtcaacagcacaagccctcaatcccagctcaatgattcctctgaggtgctgcctgttgactcatttggtggcctaagtaaagccccaaagagtcttcctgcaaagtcctcaatacttgggggtcagtttgcaatttgggaaaagtggggccctccacaagaacgaagcagactctgcagcattgctttatcaggaatgttactgggatgctttactgccatcctcataggtggcttcattagtgaaacccttgggtggccctttgtcttctatatctttggaggtgttggctgtgtctgctgccttctctggtttgttgtgatttatgatgaccccgtttcctatccatggataagcacctcagaaaaagaatacatcatatcctccttgaaacaacaggtcgggtcttctaagcagcctcttcccatcaaagctatgctcagatctctacccatttggtccatatgtttaggctgtttcagccatcaatggttagttagcacaatggttgtatacataccaacttacatcagctctgtgtaccatgttaacatcagagacaatggacttctatctgcccttccttttattgttgcctgggtcataggcatggtgggaggctatctggcagatttccttctaaccaaaaagtttagactcatcactgtgaggaaaattgccacaattttaggaagtctcccctcttcagcactcattgtgtctctgccttacctcaattccggctatatcacagcaactgccttgctgacgctctcttgcggattaagcacattgtgtcagtcagggatttatatcaatgtcttagatattgctccaaggtattccagttttctcatgggagcatcaagaggattttcgagcatagcacctgtcattgtacccactgtcagtggatttcttcttagtcaggaccctgagtttgggtggaggaatgtcttcttcttgctgtttgccgttaacctgttaggactactcttctacctcatatttggagaagcagatgtccaagaatgggctaaagagagaaaactcactcgtttatgaagttatcccaccttggatggaaaagtcattaggcaccgtattgcataaaatagaaggcttccgtgatgaaaataccagtgaaaagattttttttttcctgtggctcttttcaattatgagatcagttcattattttattcagacttttttttgagagaaatgtaagatgaataaaaattcaaataaaatgataactaagaa

SEQ ID NO: 183034 - DNA, 1543 bp, Homo sapiens
  Payload ID: 16058
  Gene Symbol: SLC17A3
  Gene Name: solute carrier family 17 (organic anion transporter), member 3
  Uniprot ID: O00476
  ENST ID: ENST00000361703
  CDS Start-End: 80-1342
ggaaacgctgggttcaacttgaagcccttccacagacattaagtcggtgaaaaccattcactaggagaggagaaacacaatggccaccaagacagagttgagtcccacagcaagggagagcaagaacgcacaagatatgcaagtggatgagacactgatccccaggaaagttccaagtttatgttctgctcgctatggaatagccctcgtcttacatttctgcaatttcacaacgatagcacaaaatgtcatcatgaacatcaccatggtagccatggtcaacagcacaagccctcaatcccagctcaatgattcctctgaggtgctgcctgttgactcatttggtggcctaagtaaagccccaaagagtcttcctgcaaagtcctcaatacttgggggtcagtttgcaatttgggaaaagtggggccctccacaagaacgaagcagactctgcagcattgctttatcaggaatgttactgggatgctttactgccatcctcataggtggcttcattagtgaaacccttgggtggccctttgtcttctatatctttggaggtgttggctgtgtctgctgccttctctggtttgttgtgatttatgatgaccccgtttcctatccatggataagcacctcagaaaaagaatacatcatatcctccttgaaacaacaggtcgggtcttctaagcagcctcttcccatcaaagctatgctcagatctctacccatttggtccatatgtttaggctgtttcagccatcaatggttagttagcacaatggttgtatacataccaacttacatcagctctgtgtaccatgttaacatcagagacaatggacttctatctgcccttccttttattgttgcctgggtcataggcatggtgggaggctatctggcagatttccttctaaccaaaaagtttagactcatcactgtgaggaaaattgccacaattttaggaagtctcccctcttcagcactcattgtgtctctgccttacctcaattccggctatatcacagcaactgccttgctgacgctctcttgcggattaagcacattgtgtcagtcagggatttatatcaatgtcttagatattgctccaaggtattccagttttctcatgggagcatcaagaggattttcgagcatagcacctgtcattgtacccactgtcagtggatttcttcttagtcaggaccctgagtttgggtggaggaatgtcttcttcttgctgtttgccgttaacctgttaggactactcttctacctcatatttggagaagcagatgtccaagaatgggctaaagagagaaaactcactcgtttatgaagttatcccaccttggatggaaaagtcattaggcaccgtattgcataaaatagaaggcttccgtgatgaaaataccagtgaaaagattttttttttcctgtggctcttttcaattatgagatcagttcattattttattcagacttttttttgagagaaatgtaagatgaataaaaattcaaataaaatgataactaagaa

SEQ ID NO: 183035 - DNA, 2052 bp, Homo sapiens
  Payload ID: 16058
  Gene Symbol: SLC17A3
  Gene Name: solute carrier family 17 (organic anion transporter), member 3
  Uniprot ID: O00476
  ENST ID: ENST00000397060
  CDS Start-End: 111-1607
gctccaaaaagtccaagggagtaagcttggaggaaacgctgggttcaacttgaagcccttccacagacattaagtcggtgaaaaccattcactaggagaggagaaacacaatggccaccaagacagagttgagtcccacagcaagggagagcaagaacgcacaagatatgcaagtggatgagacactgatccccaggaaagttccaagtttatgttctgctcgctatggaatagccctcgtcttacatttctgcaatttcacaacgatagcacaaaatgtcatcatgaacatcaccatggtagccatggtcaacagcacaagccctcaatcccagctcaatgattcctctgaggtgctgcctgttgactcatttggtggcctaagtaaagccccaaagagtcttcctgcaaaggctcctgtgtatgactggtctcctcaaatccaaggcatcatctttggtgctgttggctatggtggcatactgacaatggctcccagtggatacctggctggaagagtaggaacaaagcgagtggttggcatttctttgtttgcaacttcatttctcactctatgcatccctctggccactgactttggaatagtcttgctcattgtaactcgaatagtccagggcctaagccagtcctcaatacttgggggtcagtttgcaatttgggaaaagtggggccctccacaagaacgaagcagactctgcagcattgctttatcaggaatgttactgggatgctttactgccatcctcataggtggcttcattagtgaaacccttgggtggccctttgtcttctatatctttggaggtgttggctgtgtctgctgccttctctggtttgttgtgatttatgatgaccccgtttcctatccatggataagcacctcagaaaaagaatacatcatatcctccttgaaacaacaggtcgggtcttctaagcagcctcttcccatcaaagctatgctcagatctctacccatttggtccatatgtttaggctgtttcagccatcaatggttagttagcacaatggttgtatacataccaacttacatcagctctgtgtaccatgttaacatcagagacaatggacttctatctgcccttccttttattgttgcctgggtcataggcatggtgggaggctatctggcagatttccttctaaccaaaaagtttagactcatcactgtgaggaaaattgccacaattttaggaagtctcccctcttcagcactcattgtgtctctgccttacctcaattccggctatatcacagcaactgccttgctgacgctctcttgcggattaagcacattgtgtcagtcagggatttatatcaatgtcttagatattgctccaaggtattccagttttctcatgggagcatcaagaggattttcgagcatagcacctgtcattgtacccactgtcagtggatttcttcttagtcaggaccctgagtttgggtggaggaatgtcttcttcttgctgtttgccgttaacctgttaggactactcttctacctcatatttggagaagcagatgtccaagaatgggctaaagagagaaaactcactcgtttatgaagttatcccaccttggatggaaaagtcattaggcaccgtattgcataaaatagaaggcttccgtgatgaaaataccagtgaaaagattttttttttcctgtggctcttttcaattatgagatcagttcattattttattcagacttttttttgagagaaatgtaagatgaataaaaattcaaataaaatgataactaagaatgcagttgtcatcttcatagaattaacaatggattaagagggcttgctgtgtgggacccagtatgttagattccattactggatacaagaaacaatgttttaaaacctttaatccggggtgacaaactcactagggcaatgatttttcctgtttgtgaaaattaatattactttctatttattgggttgagtattgtccatgtgttcttccctatatgtcctccatttatctccatcctgctca

SEQ ID NO: 183036 - DNA, 563 bp, Homo sapiens
  Payload ID: 16058
  Gene Symbol: SLC17A3
  Gene Name: solute carrier family 17 (organic anion transporter), member 3
  ENST ID: ENST00000449356
  CDS Start-End: 69-407
aactgatgcatgtgaattacatatctccctgataggtgaaaaccattcactaggagaggagaaacacaatggccaccaagacagagttgagtcccacagcaagggagagcaagaacgcacaagatatgcaagtggatgagacactgatccccaggaaagttccaagtttatgttctgctcgctatggaatagccctcgtcttacatttctgcaatttcacaacgatagcacaaaatgtcatcatgaacatcaccatggtagccatggtcaacagcacaagccctcaatcccagctcaatgattcctctgaggtgctgcctgttgactcatttggtggcctaagtaaagccccaaagagtcttcctgcaaaggaatgttactgggatgctttactgccatcctcataggtggcttcattagtgaaacccttgggtggccctttgtcttctatatctttggaggtgttggctgtgtctgctgccttctctggtttgttgtgatttatgatgaccccgtttcctatccatggataagcacctcagaaaaagaatacatcatatcct

SEQ ID NO: 183037 - DNA, 599 bp, Homo sapiens
  Payload ID: 16058
  Gene Symbol: SLC17A3
  Gene Name: solute carrier family 17 (organic anion transporter), member 3
  ENST ID: ENST00000481949
  CDS Start-End: 1-299
tgacgctctcttgcggattaagcacattgtgtcagtcagggatttatatcaatgtcttagatattgctccaaggtattccagttttctcatgggagcatcaagaggattttcgagcatagcacctgtcattgtacccactgtcagtggatttcttcttagtcaggaccctgagtttgggtggaggaatgtcttcttcttgctgtttgccgttaacctgttaggactactcttctacctcatatttggagaagcagatgtccaagaatgggctaaagagagaaaactcactcgtttatgaagaaaatgccagaaattgcccagcatgaaacaggacagtacaaacattctgcaacacacagaagaggaccagcagaatctggacttttgaaaaagaaaaaatctaactgaataacaacatcaaagtctcctgggcaaaggggttaaagatttacaacatttctttagaggaaaaaaataactggttgaatttacagagcatctgctatgtgccaaacatttaatgagcactttaaaagcatgataaaaattaaaaaaaaacttgttaagcatgaaataaattacctataatgcaaaatca

SEQ ID NO: 183038 - DNA, 661 bp, Homo sapiens
  Payload ID: 16058
  Gene Symbol: SLC17A3
  Gene Name: solute carrier family 17 (organic anion transporter), member 3
  ENST ID: ENST00000505420
  CDS Start-End: 1-156
agtggatttcttcttagtcaggaccctgagtttgggtggaggaatgtcttcttcttgctgtttgccgttaacctgttaggactactcttctacctcatatttggagaagcagatgtccaagaatgggctaaagagagaaaactcactcgtttatgaaggcagtaccaaccttggacagggatggggtaatgattcacatttatggggggaaaaattatctttgtgtgactccagtcacagtttgcttctatcaaatcttcagtctccaatgaagtttaaatattcctgggaatcctaatgaaggactgtttttatgagttttgtgttatcattgtaatgtcaagattgtgtgtcaagtcaatatgaagtttaaaaccatttccaatatgttcacttgatttactcttttccattatttggatatcccattacacaggcacagtggatgatttaagtattccaggaagctgtttctataccaaagtacctagcaataatgtaacaattccccttatcaacccaaaccacataaatgtatcccaaattttggtccaatgaaatgcattcccactgcagccttcccttcaccatatcaaaaaatgccaagagcaactccatagtactatggtacccaataggatggagatagtaactttaaaca

SEQ ID NO: 183039 - DNA, 1362 bp, Homo sapiens
  Payload ID: 16058
  Gene Symbol: SLC17A3
  Gene Name: solute carrier family 17 (organic anion transporter), member 3
  ENST ID: ENST00000506105
  CDS Start-End: 103-441
aagtccaagggagtaagcttggaggaaacgctgggttcaacttgaagcccttccacagacattaagtcggtgaaaaccattcactaggagaggagaaacacaatggccaccaagacagagttgagtcccacagcaagggagagcaagaacgcacaagatatgcaagtggatgagacactgatccccaggaaagttccaagtttatgttctgctcgctatggaatagccctcgtcttacatttctgcaatttcacaacgatagcacaaaatgtcatcatgaacatcaccatggtagccatggtcaacagcacaagccctcaatcccagctcaatgattcctctgaggtgctgcctgttgactcatttggtggcctaagtaaagccccaaagagtcttcctgcaaaggaatgttactgggatgctttactgccatcctcataggtggcttcattagtgaaacccttgggtggccctttgtcttctatatctttggaggtgttggctgtgtctgctgccttctctggtttgttgtgatttatgatgaccccgtttcctatccatggataagcacctcagaaaaagaatacatcatatcctccttgaaacaacaggtacatataaagacaccaacacttttctgagaccttgtatctggattttcttgaggccttaaatctggatttttaagggtgactaagtgtgtgagcatctgtcggatttaccgttatgaccagtaaatttgttttcaggtcgggtcttctaagcagcctcttcccatcaaagctatgctcagatctctacccatttggtccatatgtttaggctgtttcagccatcaatggttagttagcacaatggttgtatacataccaacttacatcagctctgtgtaccatgttaacatcagagacgtgagtatgtttccttcccttcctttctcctgcttgcatggctgaccaattactctgccctcactaatcattccatctgagaaatgtatttcttattaccaaaaataatctaatatttaatactcatgccagtagcttttctggggtatgatttaagaggttactgattttcctaagaaagtatgatttcagaatgtcattattattagtagtaatttatcaacaaaagttgtggtctcactgcctttattatggtaatttactcaatcttttctctttagaatggacttctatctgcccttccttttattgttgcctgggtcataggcatggtgggaggctatctggcagatttccttctaaccaaaaagtttagactcatcactgtgaggaaaattgccacaattttaggaagtctcccctcttcagcactcattgtgtctctgcctta

SEQ ID NO: 183040 - DNA, 3949 bp, Homo sapiens
  Payload ID: 16059
  Gene Symbol: SLC17A6
  Gene Name: solute carrier family 17 (vesicular glutamate transporter), member 6
  Uniprot ID: Q9P2U8
  ENST ID: ENST00000263160
  CDS Start-End: 438-2186
gcttctgtgatattccggcccctccgtttaaaagccatcagatttgagagcaataagtcttcaaaaccgggaatttacattgtttttcagctgaccgacttccaggaaaaggactcaaccgcatctacccaaataccgtggcactgcttgcgctctttgccaccggatcctccccttccaatgagactttctgattgtgtctaccaactctcctattaggaaacccgtgggttgcatgcagctattctgttgtattctcattctcactctccctcccttctctcactctcactcttgctggaggcgagccactaccattctgctgagaaggaaaagcccgcaactactttaagagattaagacaatatgcgcaatcctcgcctttcctagcaatcactatttaaatctggcaagaactgacaacagtctttgcaagaatggaatccgtaaaacaaaggattttggccccaggaaaagaggggctaaagaattttgctggaaaatcactcggccagatctacagggtgctggagaagaagcaagacaccggggagacaatcgagctgacggaggatgggaagcccctagaggtgcccgagaggaaggcgccgctgtgcgactgcacgtgcttcggcctgccccgccgctacattatcgccatcatgagcggcctgggcttctgcatctccttcggtatccgctgcaacctgggcgtggccattgtggacatggtcaacaacagcaccatccaccgcgggggcaaggtcatcaaggagaaagccaaattcaactgggacccggaaaccgtggggatgatccacggttccttcttttggggctacatcatcactcagattccgggaggctacatcgcgtctcggctggcagccaacagggttttcggagctgccatacttcttacctctaccctaaatatgctaattccatcagcagccagagtgcattatggatgtgtcatctttgtcagaatactgcagggacttgttgagggtgtgacctacccagcatgtcatgggatatggagcaaatgggccccacctctagagaggagtagactggcaaccacctccttttgtggttcctatgccggagctgtgattgcaatgcctttagctggcattcttgtgcagtacactggctggtcttcagtgttttatgtctacggaagctttggaatggtctggtacatgttttggcttttggtgtcttatgaaagtcctgcaaagcatcctactattacagatgaagaacgtaggtacatagaagaaagcattggagagagtgcaaatcttttaggtgcaatggaaaaattcaagactccatggaggaagttttttacatccatgccagtctatgcaataattgttgcaaacttctgcagaagctggactttttatttattgcttattagtcagccagcatattttgaggaagtctttggatttgaaattagcaaggttggtatgctatctgctgtgccacacttagtaatgacaattattgtgcctattgggggacaaattgcagattttctaagaagcaagcagattctttcaactacgacagtgagaaagatcatgaattgtggtggttttggcatggaagccacactgctcctggtcgttggctattctcatactagaggggtagcaatctcattcttggtacttgcagtgggattcagtggatttgctatatctggtttcaatgttaaccacttggatatcgctccaagatatgccagtatcttaatgggcatttcgaatggtgttggcacattgtcaggaatggtttgtcctatcattgttggtgcaatgacaaagaataagtcacgtgaagagtggcagtatgtcttcctgatcgctgccctagtccactatggtggagttatattttatgcaatatttgcctcaggagagaaacaaccctgggcagacccggaggaaacaagtgaagaaaaatgtggatttattcatgaagatgaactcgatgaagaaacaggggacattactcaaaattatataaattatggtaccaccaagtcttatggtgccacaacacaggccaatggaggttggcctagtggttgggaaaagaaagaggaatttgtacaaggagaagtacaagactcacatagctataaggaccgagttgattattcataacaaaactaattactggatttatttttagtgtttgtgattaaattcattgtgattgcacaaaaattttaaaaacacgtgatgtaaacttgcaagcatatcaaccaggcaagtcttgctgtaaaaatgaaaacaaaacaaacccatgaggttaccatcaagtgcaatctgtaaaattgtgaagttccatcatttccattcaagtcatccattcttgcatttgtgacttaaaggttgactggtcaaaattgtagaaacaagtagttacccattggattcatatgagctaaaactcatcactatttactaaagcacaacatctcatcctacaaaagttaagaagccaaagctacttgatcatgcaaaatgcacttatatatttgttacactgtattgcaagatagcacacagaagttggctgcgtcaagtagaggcgacatttattaagtgaaaatcatggagttgggatatctctcaattaaagaaatacattgtgaactatcagctacaaagttgtactgaataactattagaattgcataatgtgagatattttgttagtcctcaaaaggaatatcttgcagtgttttctatgaaatgcttgggcacaaacacttatttctgtgaaagagaacatgtaagttgaggggtatgcttcatgttcttccatccatttacctaatagtatgaaacagttcacatttcaataaaatcaaacttttcatgtagcgtatcacataacttttttgcaaaaaatataaaaagaaataaacttcaatgtattttttattacaactttgtactggttgtaacttgcattagaaaaaaaagagatatatacaccacaaagaatctaataagaaatttattatggagatatagcccttaaaatgcaatattaagaacaaagaaatagaaaatggtttagatatctttcttccttcataattaaatactatatgaaacttgtgccacagagctatatataatatgaaaagattaacttcatagagatattgtaagtaggtaattttattatttaaagtcctattaagaaatatttgtcttaaatatataggacaatacattatattaaaatggtctctctctatatatatctgtatatcttatacatgtccatacacagaaacataataaacaatcttcacacgaaaccaaaaatagcatacacctaatgttgggttagggaattgcaatttctactttcatagagtcatagaattttaggtggggaagaggcattttgcttgtcatttcttaatataactcaacaagaattgcaacatttgtgtaccaagcaataagtgcaatgcataaaatttcctgtctgtatattaccttcattttgcttgtagtagctgtttgggtggttggaataattttatttttcttttaaaaaagctaacatcagacccctttataatgtcctaaaattatgataatacatttcccaattcaactcaaaatattattggtgtattttgtctattctggatatttgatctgttcaatgtactgtgctagtgactggaggccctgctactgcaaatataaaacataaagtttgtttaaaaaaatgcaaatcattctttaccttaagaaaaaaaaaataccctttgctttgtgcctcaaagtgatgtaatgtgatcacagcttttgttgtgttgaatgaaaatatgtggactgtcattttgttgcagcaaaaaagtgttaataaaatgctctatttatcctttttttaaaaa

SEQ ID NO: 183041 - DNA, 2973 bp, Homo sapiens
  Payload ID: 16060
  Gene Symbol: SLC17A7
  Gene Name: solute carrier family 17 (vesicular glutamate transporter), member 7
  Uniprot ID: Q9P2U7
  ENST ID: ENST00000221485
  CDS Start-End: 173-1855
tgtgacagcccccgggccgcctgcacttgcagcctccttccccccgagcggagctgcggggccggccgggccggggctggaccccgggaacccggacgcggccgcccgggcccgcgggcggggggatcggcgggggggacccgcggggtgaccggcggcaggagccgccaccatggagttccgccaggaggagtttcggaagctagcgggtcgtgctctcgggaagctgcaccgccttctggagaagcggcaggaaggcgcggagacgctggagctgagtgcggatgggcgcccggtgaccacgcagacccgggacccgccggtggtggactgcacctgcttcggcctccctcgccgctacattatcgccatcatgagtggtctgggcttctgcatcagctttggcatccgctgcaacctgggcgtggccatcgtctccatggtcaataacagcacgacccaccgcgggggccacgtggtggtgcagaaagcccagttcagctgggatccagagactgtcggcctcatacacggctcctttttctggggctacattgtcactcagattccaggaggatttatctgtcaaaaatttgcagccaacagagttttcggctttgctattgtggcaacatccactctaaacatgctgatcccctcagctgcccgcgtccactatggctgtgtcatcttcgtgaggatcctgcaggggttggtagagggggtcacataccccgcctgccatgggatctggagcaaatgggccccacccttagaacggagtcgcctggcgacgacagccttttgtggttcctatgctggggcggtggtcgcgatgcccctcgccggggtccttgtgcagtactcaggatggagctctgttttctacgtctacggcagcttcgggatcttctggtacctgttctggctgctcgtctcctacgagtcccccgcgctgcaccccagcatctcggaggaggagcgcaagtacatcgaggacgccatcggagagagcgcgaaactcatgaaccccctcacgaagtttagcactccctggcggcgcttcttcacgtctatgccagtctatgccatcatcgtggccaacttctgccgcagctggacgttctacctgctgctcatctcccagcccgcctacttcgaagaagtgttcggcttcgagatcagcaaggtaggcctggtgtccgcgctgccccacctggtcatgaccatcatcgtgcccatcggcggccagatcgcggacttcctgcggagccgccgcatcatgtccaccaccaacgtgcgcaagttgatgaactgcggaggcttcggcatggaagccacgctgctgttggtggtcggctactcgcactccaagggcgtggccatctccttcctggtcctagccgtgggcttcagcggcttcgccatctctgggttcaacgtgaaccacctggacatagccccgcgctacgccagcatcctcatgggcatctccaacggcgtgggcacactgtcgggcatggtgtgccccatcatcgtgggggccatgactaagcacaagactcgggaggagtggcagtacgtgttcctaattgcctccctggtgcactatggaggtgtcatcttctacggggtctttgcttctggagagaagcagccgtgggcagagcctgaggagatgagcgaggagaagtgtggcttcgttggccatgaccagctggctggcagtgacgacagcgaaatggaggatgaggctgagcccccgggggcaccccctgcacccccgccctcctatggggccacacacagcacatttcagccccccaggcccccaccccctgtccgggactactgaccatgtgcctcccactgaatggcagtttccaggacctccattccactcatctctggcctgagtgacagtgtcaaggaaccctgctcctctctgtcctgcctcaggcctaagaagcactctcccttgttcccagtgctgtcaaatcctctttccttcccaattgcctctcaggggtagtgaagctgcagactgacagtttcaaggatacccaaattcccctaaaggttccctctccacccgttctgcctcagtggtttcaaatctctcctttcagggctttatttgaatggacagttcgacctcttactctctcttgtggttttgaggcacccacaccccccgctttcctttatctccagggactctcaggctaacctttgagatcactcagctcccatctcctttcagaaaaattcaaggtcctcctctagaagtttcaaatctctcccaactctgttctgcatcttccagattggtttaaccaattactcgtccccgccattccagggattgattctcaccagcgtttctgatggaaaatggcggtttcaagtccccgattccgtgcccacttcacatctcccctaccagcagattctgcgaaagcaccaaatttctcaagaccctcttctccctagcttagcataatgtctggggaaacaaccaaaatcgcaattttaacaatatgcctctctacccccgtgcactttttctgacatggttttcaggtctaaatagtggctgctccagtccatgaactcaaaggtttgaagctaccaccattgaactcccccatggtggtttcatgatgccccctccccaattcctcgcactttattctcctgggtggtttcgaactaccctgtttctcagtggccatttgttgtgtccctcaggggcttaatgactcaaaatctgggatccttcccctctcagacacccctctttcagcttagaatttggggaacctatagagaagtcacagaatcccatgaaagggaatggggcaggagccaggggtgttttttcccagtgcagggttgtgtctttgtgtctctgtctctgtgactgtaaatcctgccctgccccactcccaataaaagctttggtgtataggc

SEQ ID NO: 183042 - DNA, 2237 bp, Homo sapiens
  Payload ID: 16060
  Gene Symbol: SLC17A7
  Gene Name: solute carrier family 17 (vesicular glutamate transporter), member 7
  Uniprot ID: Q9P2U7
  ENST ID: ENST00000600601
  CDS Start-End: 223-1704
gaactcagagcgcggacagatcccagaggagcagagaaataacacaatggggagactatggggtcgcagctggcactggcgggccttctggagaagcggcaggaaggcgcggagacgctggagctgagtgcggatgggcgcccggtgaccacgcagacccgggacccgccggtggtggactgcacctgcttcggcctccctcgccgctacattatcgccatcatgagtggtctgggcttctgcatcagctttggcatccgctgcaacctgggcgtggccatcgtctccatggtcaataacagcacgacccaccgcgggggccacgtggtggtgcagaaagcccagttcagctgggatccagagactgtcggcctcatacacggctcctttttctggggctacattgtcactcagattccaggaggatttatctgtcaaaaatttgcagccaacagagttttcggctttgctattgtggcaacatccactctaaacatgctgatcccctcagctgcccgcgtccactatggctgtgtcatcttcgtgaggatcctgcaggggttggtagagggggtcacataccccgcctgccatgggatctggagcaaatgggccccacccttagaacggagtcgcctggcgacgacagccttttgtggttcctatgctggggcggtggtcgcgatgcccctcgccggggtccttgtgcagtactcaggatggagctctgttttctacgtctacggcagcttcgggatcttctggtacctgttctggctgctcgtctcctacgagtcccccgcgctgcaccccagcatctcggaggaggagcgcaagtacatcgaggacgccatcggagagagcgcgaaactcatgaaccccctcacgaagtttagcactccctggcggcgcttcttcacgtctatgccagtctatgccatcatcgtggccaacttctgccgcagctggacgttctacctgctgctcatctcccagcccgcctacttcgaagaagtgttcggcttcgagatcagcaaggtaggcctggtgtccgcgctgccccacctggtcatgaccatcatcgtgcccatcggcggccagatcgcggacttcctgcggagccgccgcatcatgtccaccaccaacgtgcgcaagttgatgaactgcggaggcttcggcatggaagccacgctgctgttggtggtcggctactcgcactccaagggcgtggccatctccttcctggtcctagccgtgggcttcagcggcttcgccatctctgggttcaacgtgaaccacctggacatagccccgcgctacgccagcatcctcatgggcatctccaacggcgtgggcacactgtcgggcatggtgtgccccatcatcgtgggggccatgactaagcacaagactcgggaggagtggcagtacgtgttcctaattgcctccctggtgcactatggaggtgtcatcttctacggggtctttgcttctggagagaagcagccgtgggcagagcctgaggagatgagcgaggagaagtgtggcttcgttggccatgaccagctggctggcagtgacgacagcgaaatggaggatgaggctgagcccccgggggcaccccctgcacccccgccctcctatggggccacacacagcacatttcagccccccaggcccccaccccctgtccgggactactgaccatgtgcctcccactgaatggcagtttccaggacctccattccactcatctctggcctgagtgacagtgtcaaggaaccctgctcctctctgtcctgcctcaggcctaagaagcactctcccttgttcccagtgctgtcaaatcctctttccttcccaattgcctctcaggggtagtgaagctgcagactgacagtttcaaggatacccaaattcccctaaaggttccctctccacccgttctgcctcagtggtttcaaatctctcctttcagggctttatttgaatggacagttcgacctcttactctctcttgtggttttgaggcacccacaccccccgctttcctttatctccagggactctcaggctaacctttgagatcactcagctcccatctcctttcagaaaaattcaaggtcctcctctagaagtttcaaatctctcccaactctgttctgcatcttccagattggtttaaccaattactcgtccccgccattccagggattgattctcaccagcgtttctga

SEQ ID NO: 183043 - DNA, 553 bp, Homo sapiens
  Payload ID: 16060
  Gene Symbol: SLC17A7
  Gene Name: solute carrier family 17 (vesicular glutamate transporter), member 7
  ENST ID: ENST00000596689
  CDS Start-End: 1-350
tctggagcaaatgggccccacccttagaacggagtcgcctggcgacgacagccttttgtggttcctatgctggggcggtggtcgcgatgcccctcgccggggtccttgtgcagtactcaggatggagctctgttttctacgtctacggcagcttcgggatcttctggtacctgttctggctgctcgtctcctacgagtcccccgcgctgcaccccagcatctcggaggaggagcgcaagtacatcgaggacgccatcggagagagcgcgaaactcatgaaccccctcacgaactacactgtggtccctgaagggacgcggagaagccctcagccccgctccccgtcttagcggccctcccctcgcccccacagaagtttagcactccctggcggcgcttcttcacgtctatgccagtctatgccatcatcgtggccaacttctgccgcagctggacgttctacctgctgctcatctcccagcccgcctacttcgaagaagtgttcggcttcgagatcagcaaggtaggcctggtgtccgcgctgccccacctg

SEQ ID NO: 183044 - DNA, 3983 bp, Homo sapiens
  Payload ID: 16061
  Gene Symbol: SLC17A8
  Gene Name: solute carrier family 17 (vesicular glutamate transporter), member 8
  Uniprot ID: Q8NDX2
  ENST ID: ENST00000323346
  CDS Start-End: 314-2083
gagagtggctgcctgagacagctgccacaggctgctgcagagcgtgcagcttttgcaagggactgaattcccagccagacaccccttggactcttttttggaggggtggggagcagagagaggagggagttgtcttatcttggaagatccgagctgggtttcatctcctttttgattttgagtagttccctccacgagaactgacttccaggtgttcaccaagggaaacaaggtggttctcacactggaaatgaggaaggatgacagtttttgagactgactgttaacggctcagaggtgcccctcattcaaaatgccttttaaagcatttgataccttcaaagaaaaaattctgaaacctgggaaggaaggagtgaagaacgccgtgggagattctttgggaattttacaaagaaaaatcgatgggacaactgaggaagaagataacattgagctgaatgaagaaggaaggccggtgcagacgtccaggccaagccccccactctgcgactgccactgctgcggcctccccaagcgttacatcattgctatcatgagtgggctgggattctgcatttcctttgggatccggtgcaatcttggagttgccattgtggaaatggtcaacaatagcaccgtatatgttgatggaaaaccggaaattcagacagcacagtttaactgggatccagaaacagtgggccttatccatggatcttttttctggggctatattatgacacaaattccaggtggtttcatttcaaacaagtttgctgctaacagggtctttggagctgccatcttcttaacatcgactctgaacatgtttattccctctgcagccagagtgcattacggatgcgtcatgtgtgtcagaattctgcaaggtttagtggagggtgtgacctacccagcctgccatgggatgtggagtaagtgggcaccacctttggagagaagccgactggccacaacctctttttgtggttcctatgcaggggcagtggttgccatgcccctggctggggtgttggtgcagtacattggatggtcctctgtcttttatatttatggcatgtttgggattatttggtacatgttttggctgttgcaggcctatgagtgcccagcagctcatccaacaatatccaatgaggagaagacctatatagagacaagcataggagagggggccaacgtggttagtctaagtaaatttagtaccccatggaaaagatttttcacatctttgccggtttatgcaatcattgtggcaaatttttgcagaagctggaccttttatttgctcctcataagtcagcctgcttattttgaagaggtctttggatttgcaataagtaaggtgggtctcttgtcagcagtcccacacatggttatgacaatcgttgtacctattggaggacaattggctgattatttaagaagcagacaaattttaaccacaactgctgtcagaaaaatcatgaactgtggaggttttggcatggaggcaaccttactcctggtggttggcttttcgcataccaaaggggtggctatctcctttctggtacttgctgtaggatttagtggcttcgctatttcaggttttaatgtcaaccacctggacattgccccacgctatgccagcattctcatggggatctcaaacggagtgggaaccctctctggaatggtctgtcccctcattgtcggtgcaatgaccaggcacaagacccgtgaagaatggcagaatgtgttcctcatagctgccctggtgcattacagtggtgtgatcttctatggggtctttgcttctggggagaaacaggagtgggctgacccagagaatctctctgaggagaaatgtggaatcattgaccaggacgaattagctgaggagatagaactcaaccatgagagttttgcgagtcccaaaaagaagatgtcttatggagccacctcccagaattgtgaagtccagaagaaggaatggaaaggacagagaggagcgacccttgatgaggaagagctgacatcctaccagaatgaagagagaaacttctcaactatatcctaatgtctgagaggcacttctgtcttctccttactttagaaacagaaagtatccatacctattgcctttcttgtagcccagcttgccagaggtccaaatattgggaggggagaagatctaaccagcaacagggaaaagagaaatattatctttcaatgacatgtataggtaaggagctgcgctcagttgataacatagttgataatacatattttttgaattgacagttgacccttctctcaaagagctaaacttattcagaaaggaatgactagaagaaaaaggagacaataccatgttgttcaaagaaacattgaaggaaattgggatgtttggccagaaggaatgtaaacagtagtagtagctgccaccacatctctagggtagccatgcagaggagggcttcatattcccaataaaccccacgttgtggcaggtgctttataaacactcttatttaatctccacacctttatgacacacatttcttatccccattttacaaccaaggcatctaaagcaacaagaaatgaacttgcccaaggtcatctgccagggtcagtgctgagactgttgaagctctcaataggtggcagttttagggaagatttccattcagtgtagggaagacatttgtaataatgaaaactgaaaatggagtaattgtgagtaactcaccactttagcaggtgttggggaagggaaacatttgggttgatgaggcagaggggattcaaatgtgtgagaggctagattcaaagaccctcagtgttctatgttatctgaagagtcaaatggttttgtgactccatagtttttaaagtaataagggtcaaagactacatcagagattcaaataggtttttaaagaaaagctaagcaagagagccaaatttttagaaatctgatggtcaaaatagctgaaagcagtaaacaagagattggctattaaatttcaactttccataatattaagaatgtagctaaatgatgtcccaaactacttacaaacttttaagacatttaataatttaagaagtaggttcatgtgttttcttaggtaaagttcttctgaaagaattttctatttttaaaaaatgtatctctttagccttttctgctggagattatattaggaagtttcatcagattgtataaaattatgattttgtatcaaaagtattcatgatgactctatttggaatgatattcagggaaatcacaataatatagcagtagttatacagagaaatactacaatgaaaacatttggggcaattagacctacagttactgttgaaaaattcacctttgattgcataaggcaattacatggatacttttagatatatttaaaattttaacattggcatctaaagtgttatttgaaaataaaattattttcctgttcattgattttaaacattttattcctactttcagaagaaaaatataatacggaaaaaattatagatttacttgtagcttattattgtaaagtgttttttttttttttttttttttctaatttctcccacatgtatttctggtccccagtgatactagctgagttgtagtgtattttataaatggaataatcttggggaaaaattgcgattcttcattaaataatattctttatgtcactagcatacaatttatgttagtagacatctttaaatctctttaatgagtgaatccatgcaagccccataaaacagttcctagcatgcagaaaatgcccacgtaaatagctgtcatcatcattatcttttaacattttgggggactttccagttgaaaagaaaacatgctatgtcatttttatccattatccctggaacttattgtgaaagttgtgctgttttctaagtaaaataaaaaataaaaaattagcaattta

SEQ ID NO: 183045 - DNA, 1737 bp, Homo sapiens
  Payload ID: 16061
  Gene Symbol: SLC17A8
  Gene Name: solute carrier family 17 (vesicular glutamate transporter), member 8
  Uniprot ID: Q8NDX2
  ENST ID: ENST00000392989
  CDS Start-End: 25-1644
gctcagaggtgcccctcattcaaaatgccttttaaagcatttgataccttcaaagaaaaaattctgaaacctgggaaggaaggagtgaagaacgccgtgggagattctttgggaattttacaaagaaaaatcgatgggacaactgaggaagaagataacattgagctgaatgaagaaggaaggccggtgcagacgtccaggccaagccccccactctgcgactgccactgctgcggcctccccaagcgttacatcattgctatcatgagtgggctgggattctgcatttcctttgggatccggtgcaatcttggagttgccattgtggaaatggtcaacaatagcaccgtatatgttgatggaaaaccggaaattcagacagcacagtttaactgggatccagaaacagtgggccttatccatggatcttttttctggggctatattatgacacaaattccaggtggtttcatttcaaacaagtttgctgctaacagggtctttggagctgccatcttcttaacatcgactctgaacatgtttattccctctgcagccagagtgcattacggatgcgtcatgtgtgtcagaattctgcaaggtttagtggagggtgtgacctacccagcctgccatgggatgtggagtaagtgggcaccacctttggagagaagccgactggccacaacctctttttgtggttcctatgcaggggcagtggttgccatgcccctggctggggtgttggtgcagtacattggatggtcctctgtcttttatatttatggcatgtttgggattatttggtacatgttttggctgttgcaggcctatgagtgcccagcagctcatccaacaatatccaatgaggagaagacctatatagagacaagcataggagagggggccaacgtggttagtctaagtgtgggtctcttgtcagcagtcccacacatggttatgacaatcgttgtacctattggaggacaattggctgattatttaagaagcagacaaattttaaccacaactgctgtcagaaaaatcatgaactgtggaggttttggcatggaggcaaccttactcctggtggttggcttttcgcataccaaaggggtggctatctcctttctggtacttgctgtaggatttagtggcttcgctatttcaggttttaatgtcaaccacctggacattgccccacgctatgccagcattctcatggggatctcaaacggagtgggaaccctctctggaatggtctgtcccctcattgtcggtgcaatgaccaggcacaagacccgtgaagaatggcagaatgtgttcctcatagctgccctggtgcattacagtggtgtgatcttctatggggtctttgcttctggggagaaacaggagtgggctgacccagagaatctctctgaggagaaatgtggaatcattgaccaggacgaattagctgaggagatagaactcaaccatgagagttttgcgagtcccaaaaagaagatgtcttatggagccacctcccagaattgtgaagtccagaagaaggaatggaaaggacagagaggagcgacccttgatgaggaagagctgacatcctaccagaatgaagagagaaacttctcaactatatcctaatgtctgagaggcacttctgtcttctccttactttagaaacagaaagtatccatacctattgcctttcttgtagcccagcttgccagaggtcca

SEQ ID NO: 183046 - DNA, 2594 bp, Homo sapiens
  Payload ID: 16062
  Gene Symbol: SLC17A9
  Gene Name: solute carrier family 17 (vesicular nucleotide transporter), member 9
  Uniprot ID: Q9BYT1
  ENST ID: ENST00000370349
  CDS Start-End: 205-1497
ccagacggaagcgcgctgggactgacacgtggacttgggcggtgctgcccgggtgggtcagcctgggctgggaggcagccccgggacacagctgtgcccacgccgtctgagcaccccaagcccgatgcagccacccccagacgaggcccgcagggacatggccggggacacccagtggtccaggtggaaccaccctgtgtatgcatgaccctgacaagcaggcgccaggacagtcaggaggccaggcccgagtgccaggcatggacggggacgctgctgctgggcacatgccttctgtactgcgcccgctccagcatgcccatctgcaccgtctccatgagccaggacttcggctggaacaagaaggaggccggcatcgtgctcagcagcttcttctggggctactgcctgacacaggttgtgggcggccacctcggggatcggattgggggtgagaaggtcatcctgctgtcagcctctgcctggggctccatcacggccgtcaccccactgctcgcccacctgagcagtgcccacctggccttcatgaccttctcacgcatcctcatgggcttgctccaaggggtttacttccctgccctgaccagcctgctgtcgcagaaggtgcgggagagtgagcgagccttcacctacagcatcgtgggcgccggctcccagtttgggacgctgctgaccggggcggtgggctccctgctcctggaatggtacggctggcagagcatcttctatttctccggcggcctcaccttgctttgggtgtggtacgtgtacaggtacctgctgagtgaaaaagatctcatcctggccttgggtgtcctggcccaaagccggccggtgtccaggcacaacagagtcccctggagacggctcttccggaagcctgctgtctgggcagccgtcgtctcccagctctctgcagcctgctccttcttcatcctcctctcctggctgcccaccttcttcgaggagaccttccccgacgccaagggctggatcttcaacgtggttccttggttggtggcgattccggccagtctattcagcgggtttctctctgatcatctcatcaatcagggttacagagccatcacggtgcggaagctcatgcagggcatgggccttggcctctccagcgtctttgctctgtgcctgggccacacctccagcttctgtgagtctgtggtctttgcatcagcctccatcggcctccagaccttcaaccacagtggcatttctgttaacatccaggacttggccccgtcctgcgccggctttctgtttggtgtggccaacacagccggggccttggcaggtgtcgtgggtgtgtgtctaggcggctacttgatggagaccacgggctcctggacttgcctgttcaaccttgtggccatcatcagcaacctggggctgtgcaccttcctggtgtttggacaggctcagagggtggacctgagctctacccatgaggacctctagctcccaaccccacagcctctccaaggacccaggcgccagcagccccaggacacaggggactcagtgtgtgggacttggtcactccatgtcagacacacgagcagagaggaacacaaaccactgtggagcctgaagctccttaagaagagtccacaacagctggtgggagggtggggtgggcctgggtccagaccaggctcgctgctctctgggcctcagtttccccacctgccagcgggctcggccctgtcctcctcacaggctggtgtggccgtcagggtgggtggggttattgttagtaggcgcagcctcattcccaccacgatctgttccgcgtggttcccgccaaacctccctcggtcgccgtgttctccgcaagcctcctgcagcgcccgcctgccaatgtgaggctggcaccaggctgcagcctccccaatcccagcccactttgctgtgtctctggcgggctgtcctccttggtgggagctgtcctgcacactgtaggatgcttaaaggtatccctggcctccacccacccctagccagcagctcccagtcagacaacagccagaaatgtctccagactctgcccagcctccccaggtagccaccctcgagacacgacctcagagtctctgtgtctcctagaagcctgacagagacccccagggcagtgggtgggtggcgggctagagacccttgcctgtgtccgggaccctggcgccgctctcccctcctgtggatccctccgcactaacagtgttctcagtgggcagacgcctgggcaccccttgggccctgcccagcatggccatggcgcaggctctcgaacccgcatggctttcccaggcctggtgattctgctctccagggacggttggcaccttcctcgggggcgggccccacgcaccccagaacacacagacccacctttctggcgttctttctacctcccttttcgttgcctgaggagctggtggtttcatgagttaatgatacatcttgcaaggtgtacacatagagaaaaaaacctaaaaatgtggaaaagcacgccaaagccttatttaaataataactattaaactattcaaaaagaa

SEQ ID NO: 183047 - DNA, 3580 bp, Homo sapiens
  Payload ID: 16062
  Gene Symbol: SLC17A9
  Gene Name: solute carrier family 17 (vesicular nucleotide transporter), member 9
  Uniprot ID: Q9BYT1
  ENST ID: ENST00000370351
  CDS Start-End: 185-1495
cccgccctgccccgcctgcccgccctggtggccgtctgggggcgacaagtcctgagagaaccagacggaagcgcgctgggactgacacgtggacttgggcggtgctgcccgggtgggtcagcctgggctgggaggcagccccgggacacagctgtgcccacgccgtctgagcaccccaagcccgatgcagccacccccagacgaggcccgcagggacatggccggggacacccagtggtccaggcccgagtgccaggcatggacggggacgctgctgctgggcacatgccttctgtactgcgcccgctccagcatgcccatctgcaccgtctccatgagccaggacttcggctggaacaagaaggaggccggcatcgtgctcagcagcttcttctggggctactgcctgacacaggttgtgggcggccacctcggggatcggattgggggtgagaaggtcatcctgctgtcagcctctgcctggggctccatcacggccgtcaccccactgctcgcccacctgagcagtgcccacctggccttcatgaccttctcacgcatcctcatgggcttgctccaaggggtttacttccctgccctgaccagcctgctgtcgcagaaggtgcgggagagtgagcgagccttcacctacagcatcgtgggcgccggctcccagtttgggacgctgctgaccggggcggtgggctccctgctcctggaatggtacggctggcagagcatcttctatttctccggcggcctcaccttgctttgggtgtggtacgtgtacaggtacctgctgagtgaaaaagatctcatcctggccttgggtgtcctggcccaaagccggccggtgtccaggcacaacagagtcccctggagacggctcttccggaagcctgctgtctgggcagccgtcgtctcccagctctctgcagcctgctccttcttcatcctcctctcctggctgcccaccttcttcgaggagaccttccccgacgccaagggctggatcttcaacgtggttccttggttggtggcgattccggccagtctattcagcgggtttctctctgatcatctcatcaatcagggttacagagccatcacggtgcggaagctcatgcagggcatgggccttggcctctccagcgtctttgctctgtgcctgggccacacctccagcttctgtgagtctgtggtctttgcatcagcctccatcggcctccagaccttcaaccacagtggcatttctgttaacatccaggacttggccccgtcctgcgccggctttctgtttggtgtggccaacacagccggggccttggcaggtgtcgtgggtgtgtgtctaggcggctacttgatggagaccacgggctcctggacttgcctgttcaaccttgtggccatcatcagcaacctggggctgtgcaccttcctggtgtttggacaggctcagagggtggacctgagctctacccatgaggacctctagctcccaaccccacagcctctccaaggacccaggcgccagcagccccaggacacaggggactcagtgtgtgggacttggtcactccatgtcagacacacgagcagagaggaacacaaaccactgtggagcctgaagctccttaagaagagtccacaacagctggtgggagggtggggtgggcctgggtccagaccaggctcgctgctctctgggcctcagtttccccacctgccagcgggctcggccctgtcctcctcacaggctggtgtggccgtcagggtgggtggggttattgttagtaggcgcagcctcattcccaccacgatctgttccgcgtggttcccgccaaacctccctcggtcgccgtgttctccgcaagcctcctgcagcgcccgcctgccaatgtgaggctggcaccaggctgcagcctccccaatcccagcccactttgctgtgtctctggcgggctgtcctccttggtgggagctgtcctgcacactgtaggatgcttaaaggtatccctggcctccacccacccctagccagcagctcccagtcagacaacagccagaaatgtctccagactctgcccagcctccccaggtagccaccctcgagacacgacctcagagtctctgtgtctcctagaagcctgacagagacccccagggcagtgggtgggtggcgggctagagacccttgcctgtgtccgggaccctggcgccgctctcccctcctgtggatccctccgcactaacagtgttctcagtgggcagacgcctgggcaccccttgggccctgcccagcatggccatggcgcaggctctcgaacccgcatggctttcccaggcctggtgattctgctctccagggacggttggcaccttcctcgggggcgggccccacgcaccccagaacacacagacccacctttctggcgttctttctacctcccttttcgttgcctgaggagctggtggtttcatgagttaatgatacatcttgcaaggtgtacacatagagaaaaaaacctaaaaatgtggaaaagcacgccaaagccttatttaaataataactattaaactattcaaaaagaagactgttattttatttaacacctttgttttttaagaatgaacacgtgttaaagactttctgtaactaatttcatgaggaaacgagtgacacgttggaatcaggtcaaaggagaatcccaggaacggactcctaggccgggagtgttgaaatgagcatgccagcagagccaggctgggtttcggggttcctttgccgccaggggtcctgcgtgtccacagatgacagcgatgtaccctgctatcagctgtccacccagctttcccaagatgtggggcccccatggagtcagacagcccagctgtgctgtggaaagacaaagtggagttttgcacttgagcacaaatgttcccctacaatctctccagtttcggtcagcccaaccctgtggcaccatgggtacagcctagagcatcacccccacagaggcttcgggacggtcctgctggactgctggacgctgctgtggggtcttggggcaggaggggcttccagaagcctggcagttgctgtctggaggccaggaagccaagcccaggaagcccacctgcggctgagttcagaggtggggcctgtgcgttgtgaatgaattgctgtctctctcctcctcatcttgcactaaatctacataacttaaaatttaccattttagccatttttaagtgcacggttctgtggcattaggtacattcgcattgtgcagccaccgccaccctccgccttcagaactttctcatcttcccaaaccgaagctctgtgctcattaaaggctagctccccgttgctctcccccagccccggcaaccccattccactttgtgtctcgaccgtaagtgtggctgctctgggaccagtgccagtgggcgcacgctgggtttgcctacgtctggcttacttcactcagcagagtgtccttcggttttatcagttttgtcacaagtgtcagcatttttctcatttttaaggctgaataaaatattgtgtggataa

SEQ ID NO: 183048 - DNA, 565 bp, Homo sapiens
  Payload ID: 16062
  Gene Symbol: SLC17A9
  Gene Name: solute carrier family 17 (vesicular nucleotide transporter), member 9
  ENST ID: ENST00000411611
  CDS Start-End: 109-565
ggaaggaagtgagtgccctgtccttcctccctgccatgagattccaggaccggacctggcaagtgccctatcccagccagtgttcctggggctcttccaggcagggctatgttccccaggccaggggcattgtcctggacagtcaggaggcatacccctcgccaggtggaaccaccctgtgtatgcatgaccctgacaagcaggcgccaggacagtcaggaggccaggcccgagtgccaggcatggacggggacgctgctgctgggcacatgccttctgtactgcgcccgctccagcatgcccatctgcaccgtctccatgagccaggacttcggctggaacaagaaggaggccggcatcgtgctcagcagcttcttctggggctactgcctgacacaggttgtgggcggccacctcggggatcggattgggggtgagaaggtcatcctgctgtcagcctctgcctggggctccatcacggccgtcaccccactgctcgcccacctgagcagtgcccacctggccttcatgaccttctcacgcatcctcatgggcttgctccaag

SEQ ID NO: 183049 - DNA, 1493 bp, Homo sapiens
  Payload ID: 16063
  Gene Symbol: SLC17A2
  Gene Name: solute carrier family 17, member 2
  Uniprot ID: O00624
  ENST ID: ENST00000265425
  CDS Start-End: 22-1341
accatttcccacagaagctaaatggacgggaagcctgccaccaggaaaggtccagatttctgttcattacgctatgggctggctcttatcatgcacttctcaaacttcaccatgataacgcagcgtgtgagtctgagcattgcgatcatcgccatggtgaacaccactcagcagcaaggtctatctaatgcctccactgaggggcctgttgcagatgccttcaataactccagcatatccatcaaggaatttgatacaaaggcctctgtgtatcaatggagcccagaaactcagggtatcatctttagctccatcaactatgggataatactgactctgatcccaagtggatatttagcagggatatttggagcaaaaaaaatgcttggtgctggtttgctgatctcttcccttctcaccctctttacaccactggctgctgacttcggagtgattttggtcatcatggttcggacagtccagggcatggcccagggaatggcatggacaggtcagtttactatttgggcaaagtgggctcctccacttgaacgaagcaagctcaccaccattgcaggatcagggtcagcatttggatccttcatcatcctctgtgtggggggactaatctcacaggccttgagctggccttttatcttctacatctttggtagcactggctgtgtctgctgtctcctatggttcacagtgatttatgatgaccccatgcatcacccgtgcataagtgttagggaaaaggagcacatcctgtcctcactggctcaacagcccagttctcctggacgagctgtccccataaaggcgatggtcacatgcctaccactttgggccattttcctgggttttttcagccatttctggttgtgcaccatcatcctaacatacctaccaacgtatatcagtactctgctccatgttaacatcagagatagtggagttctgtcctccctgccttttattgctgctgcaagctgtacaattttaggaggtcagctggcagatttccttttgtccaggaatcttctcagattgatcactgtgcgaaagctcttttcatctcttgggctcctccttccatcaatatgtgctgtggccctgccctttgtggcctccagttacgtgataaccattattttgctgatacttattcctgggaccagtaacctatgtgactcagggtttatcatcaacaccttagatatcgcccccagatatgcaagtttcctcatgggaatctcaaggggatttgggctcatcgcaggaatcatctcttccactgccactggattcctcatcagtcaggttgggccagtttattgaacatcttcaagtggcaggattttgagtctggttggaggaatgtctttttcctgtctgctgcagtcaacatgtttggcctggtcttttacctcacgtttggacaagcagaacttcaagactgggccaaagagaggacccttacccgcctctga

SEQ ID NO: 183050 - DNA, 2270 bp, Homo sapiens
  Payload ID: 16063
  Gene Symbol: SLC17A2
  Gene Name: solute carrier family 17, member 2
  Uniprot ID: O00624
  ENST ID: ENST00000360488
  CDS Start-End: 419-1729
ggacagaaaactccctccttttccaagttagccttatagtctagggcttaaaatactggtttaatggtgaaggtaagtgcttttcttctttttgggtagaaggattattactaacttaccaaaggtccattaaggggagggaacagttttaggagaagtcagagaaaagacattaacagcaacataaggatctccatctggtaatattgcctaattccaaaatgaagagactctctgaaaaagataactgattcaatgaagaccctagggcaaggcttgagaagccactggtaccaatggacactgtggacaatggtcatttctccaaggacgctataaaagactgtcgtagtaaaagagattcagggcacagggaaactccaccacaaagcgtggtaccatttcccacagaagctaaatggacgggaagcctgccaccaggaaaggtccagatttctgttcattacgctatgggctggctcttatcatgcacttctcaaacttcaccatgataacgcagcgtgtgagtctgagcattgcgatcatcgccatggtgaacaccactcagcagcaaggtctatctaatgcctccactgaggggcctgttgcagatgccttcaataactccagcatatccatcaaggaatttgatacaaaggcctctgtgtatcaatggagcccagaaactcagggtatcatctttagctccatcaactatgggataatactgactctgatcccaagtggatatttagcagggatatttggagcaaaaaaaatgcttggtgctggtttgctgatctcttcccttctcaccctctttacaccactggctgctgacttcggagtgattttggtcatcatggttcggacagtccagggcatggcccagggaatggcatggacaggtcagtttactatttgggcaaagtgggctcctccacttgaacgaagcaagctcaccaccattgcaggatcagggtcagcatttggatccttcatcatcctctgtgtggggggactaatctcacaggccttgagctggccttttatcttctacatctttggtagcactggctgtgtctgctgtctcctatggttcacagtgatttatgatgaccccatgcatcacccgtgcataagtgttagggaaaaggagcacatcctgtcctcactggctcaacagcccagttctcctggacgagctgtccccataaaggcgatggtcacatgcctaccactttgggccattttcctgggttttttcagccatttctggttgtgcaccatcatcctaacatacctaccaacgtatatcagtactctgctccatgttaacatcagagatagtggagttctgtcctccctgccttttattgctgctgcaagctgtacaattttaggaggtcagctggcagatttccttttgtccaggaatcttctcagattgatcactgtgcgaaagctcttttcatctcttgatatgcaagtttcctcatgggaatctcaaggggatttgggctcatcgcaggaatcatctcttccactgccactggattcctcatcagtcaggattttgagtctggttggaggaatgtctttttcctgtctgctgcagtcaacatgtttggcctggtcttttacctcacgtttggacaagcagaacttcaagactgggccaaagagaggacccttacccgcctctgaggacataaagttacaaacttaaatgtggtactgagcatgaactttttaaacattttttacttctctccatattcctgaccatagactcagcagttcttaactctggctgtgtgttagtcttccctggggagcctttataagacactgatacttgggacccactccagagattctgaatgaattggtctggggtggaacccagatactactaatttttagatactccttagaggtttctagcatgcgcccggggttgacaacagctggacaaacttgaaaagtcaattcatgtggcctttgaattttcctcattggaaagtactaaataaataaaaattcatgtgaaaatgatcactgataaatatcttcatggtggggcaggttattggatgcagagaagatctgctcggaattgtagccatatgttacagatctcagcaccgatcggaactgtaaagctataatccccagaattaaagtttttattattttttatacattgtaaaacatagacgtttatttatgtgattaaattctattaaaatttacatgctaaaataaaa

SEQ ID NO: 183051 - DNA, 2524 bp, Homo sapiens
  Payload ID: 16063
  Gene Symbol: SLC17A2
  Gene Name: solute carrier family 17, member 2
  Uniprot ID: O00624
  ENST ID: ENST00000377850
  CDS Start-End: 534-1970
aaaaccaagccgaggctttctgagaaagtggggccaaacctgttgccgtctgactgccacgtggctcactatttatccctgtaaaaatctgcaaaagtatttgaaagggaagaagggacagaaaactccctccttttccaagttagccttatagtctagggcttaaaatactggtttaatggtgaaggtaagtgcttttcttctttttgggtagaaggattattactaacttaccaaaggtccattaaggggagggaacagttttaggagaagtcagagaaaagacattaacagcaacataaggatctccatctggtaatattgcctaattccaaaatgaagagactctctgaaaaagataactgattcaatgaagaccctagggcaaggcttgagaagccactggtaccaatggacactgtggacaatggtcatttctccaaggacgctataaaagactgtcgtagtaaaagagattcagggcacagggaaactccaccacaaagcgtggtaccatttcccacagaagctaaatggacgggaagcctgccaccaggaaaggtccagatttctgttcattacgctatgggctggctcttatcatgcacttctcaaacttcaccatgataacgcagcgtgtgagtctgagcattgcgatcatcgccatggtgaacaccactcagcagcaaggtctatctaatgcctccactgaggggcctgttgcagatgccttcaataactccagcatatccatcaaggaatttgatacaaaggcctctgtgtatcaatggagcccagaaactcagggtatcatctttagctccatcaactatgggataatactgactctgatcccaagtggatatttagcagggatatttggagcaaaaaaaatgcttggtgctggtttgctgatctcttcccttctcaccctctttacaccactggctgctgacttcggagtgattttggtcatcatggttcggacagtccagggcatggcccagggaatggcatggacaggtcagtttactatttgggcaaagtgggctcctccacttgaacgaagcaagctcaccaccattgcaggatcagggtcagcatttggatccttcatcatcctctgtgtggggggactaatctcacaggccttgagctggccttttatcttctacatctttggtagcactggctgtgtctgctgtctcctatggttcacagtgatttatgatgaccccatgcatcacccgtgcataagtgttagggaaaaggagcacatcctgtcctcactggctcaacagcccagttctcctggacgagctgtccccataaaggcgatggtcacatgcctaccactttgggccattttcctgggttttttcagccatttctggttgtgcaccatcatcctaacatacctaccaacgtatatcagtactctgctccatgttaacatcagagatagtggagttctgtcctccctgccttttattgctgctgcaagctgtacaattttaggaggtcagctggcagatttccttttgtccaggaatcttctcagattgatcactgtgcgaaagctcttttcatctcttgggctcctccttccatcaatatgtgctgtggccctgccctttgtggcctccagttacgtgataaccattattttgctgatacttattcctgggaccagtaacctatgtgactcagggtttatcatcaacaccttagatatcgcccccagatatgcaagtttcctcatgggaatctcaaggggatttgggctcatcgcaggaatcatctcttccactgccactggattcctcatcagtcaggattttgagtctggttggaggaatgtctttttcctgtctgctgcagtcaacatgtttggcctggtcttttacctcacgtttggacaagcagaacttcaagactgggccaaagagaggacccttacccgcctctgaggacataaagttacaaacttaaatgtggtactgagcatgaactttttaaacattttttacttctctccatattcctgaccatagactcagcagttcttaactctggctgtgtgttagtcttccctggggagcctttataagacactgatacttgggacccactccagagattctgaatgaattggtctggggtggaacccagatactactaatttttagatactccttagaggtttctagcatgcgcccggggttgacaacagctggacaaacttgaaaagtcaattcatgtggcctttgaattttcctcattggaaagtactaaataaataaaaattcatgtgaaaatgatcactgataaatatcttcatggtggggcaggttattggatgcagagaagatctgctcggaattgtagccatatgttacagatctcagcaccgatcggaactgtaaagctataatccccagaattaaagtttttattattttttatacattgtaaaacatagacgtttatttatgtgattaaattctattaaaatttacatgct

SEQ ID NO: 183052 - DNA, 3616 bp, Homo sapiens
  Payload ID: 16064
  Gene Symbol: SLC17A4
  Gene Name: solute carrier family 17, member 4
  Uniprot ID: Q9Y2C5
  ENST ID: ENST00000377905
  CDS Start-End: 120-1613
ttacctcccagaattagacaattgcaaagagcttagaatatttatttgaaaggaatgaggatcctgcactcttcctccctcagtaagtaaatgccagtccctaggaagagagaaccaaaatgtctaccggaccagatgtcaaggctacagtgggggacatttccagtgatggcaatttaaacgtggctcaagaggaatgctccaggaaaggtttttgttcagtccgacatgggctggccctcatcttgcagctctgtaatttttcaatttacacccaacaaatgaacttgagcattgccatcccagctatggtgaacaacacagccccacctagccagcccaatgcttccacagaacggccctccactgactcccagggctactggaatgaaactctaaaagaatttaaagcaatggcccctgcatatgactggagtcctgaaatccagggaatcatcctcagctccctcaactatggctcattcttggctccaatccccagtggctatgtggctggaatatttggagccaagtatgtggttggtgctggcttgtttatttcctcattcctgaccctcttcattccactggcagctaatgcgggagtggccttgctcattgtcctccggattgtacaaggcatagcccaggttatggtattaactggtcagtattcaatttgggtcaaatgggctcccccactggaaaggagtcaactcaccaccattgctggatcagggtcaatgctggggtccttcattgttctacttgctggtggtctcctctgccagaccataggatggccttacgtcttctatatctttggaggaattggctgtgcttgttgtcctctctggtttcctctcatttatgatgatcctgtgaatcatccctttatcagtgctggtgagaagagatacattgtgtgttcattggctcagcaggactgttcaccaggctggtctcttcccattagggctatgatcaaatccttaccactctgggccattttagtctcttatttctgtgaatactggcttttttataccattatggcgtacacaccaacgtacatcagctcggtacttcaagccaacctcagagatagtgggatcctgtctgccttgccgtttgttgttggatgtatctgcattatccttggaggtctactggcagactttcttctctccagaaaaatcctcagactcatcaccatcaggaaactcttcactgccattggggttctcttcccatccgtgatcctcgtgtccctgccctgggtcagatccagccacagcatgaccatgaccttcttggtgctgtcttctgccatcagcagcttctgtgaatcaggagcccttgttaacttcttggatattgctcctcggtacactggctttctcaaaggactattgcaagtctttgcacacatagctggagccatctctcctactgctgctggatttttcatcagtcaggattcagagtttggttggagaaatgtcttcttgctttcagctgctgttaacatatcgggcctggttttctacctcatctttggccgagcagatgtgcaggactgggctaaagagcagacattcacccacctctgagcaaaccgagagatgtgctagatcctggtgcttagttcatcattgttttccctcacagacatttctctttcatgcctgcttgactgataagccattagctagaccctgactatgtaacgctaaagattttaccatgcctggaaattttacaggggaagaaaacacgctagttatttaactgcaagctactaaaagcataggtgtgttgagatttctgtgttctccactcttccactgttatcctagtaaaagcatcaggggctggggacaatttctttccaaagcaaaagaggaagccagaccttgggaccgagaactgagaatcacaagggagttgcgcccaacatgcagaacatgaatcctctgagctgtcctcaaaagaaagccccaaacaacagaaagcatagtgttttccattgttggtgaaaaatgtcaaggaggaaagaacaataatgattccatcatgataagaggaatgaacgtgtctgcaactaatgggagcaagatagtacactttaactctttcagacaacttgcattctgtggatgccagctttggaatcagagccgcctctggaatacctgtgcttccagagttagcttttggacagttaccttctttctggccatcttgacttctgccccacatctgctttttggctttgtgcagatctttaacatgttagtgaacagacattgcccagtgtctcttctagcccctccaacagttcttcatgtagcactgcttttggacagtgacccatgatatctgccttcgtttgcccctctgactgttggaatcccacgcaccattcagtaggattcaattcaatgtggaaccattcaacattcacctcattaacctaaaatgtctcccaaagatgtatgtaagacacacactgccctaacctcactccaaatgtctggagaaatgtgtgtagtgcttttgttaaagcccctatatgggcagcatggaggatcataagatagcaaaaccatttcaacactaaatgaatattaatgtacacacaccttgtgtggatggcagaaatcaaatcatacacagtattaaggagttcagtgtctcgggagggcagataactttaatcaaagtatcacacaagtgaatatgtaataacaactgtagaaataatgagtggttacatgggttatgagagtggatgataagtgcactaatctgagtgtaaggaagggccacccctgcaaagtttcagctgagctgggatctgaaggataatagttaactgttgtgggagactgagaggagaatattttaggaagaaagaacagcataagcaaaagtttcatggcaggagggagaaattagctatggccagagtatagagaataagggaagtatgatttgtgaggagactgtagaagaattaaggtcaggagcacacaggatgatgtaggcccagtgaagtgcgttggtctttattttgaaatcagtaggaagtgtcctggttttcaaaggcactctgcatgagagattaggttggagtaggagcttacagtgtagtccaggagagaacaatggcccctggcatgaggcaatagacatggtgagaggtgaatggattatttgatttaggtggattatttgatttagggaataaacctgacgggtcctattactaagtgagagagtgaaagatgtccagagtaactcctgagttttggtttgctattatattaatggggatgcctctaacacagacagcaacacagatagcaattatatccaagtgtagacaacaagaaggaaaatggacacatgactctggatttctcttgtgagacctgggctccatttacaaacgtataaatcatcttgatataggtagtgattacaatttttgcatggatgagtcatccatgggtgaaagtggcataagaaaaggaagcttgggaataagccttaaagaattccagtatttaatggtcagctggaggatgattagcagaaagaaagaaagaaa

SEQ ID NO: 183053 - DNA, 2331 bp, Homo sapiens
  Payload ID: 16064
  Gene Symbol: SLC17A4
  Gene Name: solute carrier family 17, member 4
  Uniprot ID: Q9Y2C5
  ENST ID: ENST00000397076
  CDS Start-End: 303-968
tcagtaagtaaatgccagtccctaggaagagagaaccaaaatgtctaccggaccagatgtcaaggctacagtgggggacatttccagtgatggcaatttaaacgtggctcaagaggaatgctccaggaaagggatagtggatgaattcttcccgctgttgtcaaactaatgtatatggactcaaccacagggatatccccagagctcctatggaacactagcaaattttgtgtttttgttcagtccgacatgggctggccctcatcttgcagctctgtaatttttcaatttacacccaacaaatgaacttgagcattgccatcccagctatggtgaacaacacagccccacctagccagcccaatgcttccacagaacggccctccactgactcccagggctactggaatgaaactctaaaagaatttaaagcaatggactgttcaccaggctggtctcttcccattagggctatgatcaaatccttaccactctgggccattttagtctcttatttctgtgaatactggcttttttataccattatggcgtacacaccaacgtacatcagctcggtacttcaagccaacctcagagatagtgggatcctgtctgccttgccgtttgttgttggatgtatctgcattatccttggaggtctactggcagactttcttctctccagaaaaatcctcagactcatcaccatcaggaaactcttcactgccattggtaagggagagactggacacaggggtgaacgtgggaagctcagagcagccttcagtttactctgtgtttgtcctcctaccccaggggttctcttcccatccgtgatcctcgtgtccctgccctgggtcagatccagccacagcatgaccatgaccttcttggtgctgtcttctgccatcagcagcttctgtgaatcaggagcccttgttaacttcttggatattgctcctcggtagggacctcttttgcctcatcctttcagacactcaattcaagtctagcagccctaaatctactctgatgtgaaagtaaaatgtggcaggtacaacaggttgcaggaaatgtcagcaccagctctacatcctacatctaaataattcctggaagagactcaaagctggtggaccattgtgaacttagtttttctgggcgtgaacaagaggagtcagtggccatgctcagagtcaactgagggagactcacacaaacctctctctgttgaggaatgcagcacttgcctaaggcggaatcactgaaagaaatcttgagattctatagggtatgctcatgaaaatctttaatgaaggcaaaggacacaggactgcaggagaaatatctgtctctgatacagtaaaaacagttgactgagacttccaaacatagctcccagggtgctgtcccagtcaacaggacatccttcatcttcagataatgaaccaccaagaaatgtgagagatgcccttgtcacaggggagccgacgtctcatctggtgaggggtcttttatacccacggagggtataaaagttacaagatcagactcaacagcagaagccaaaacaacaacaacaacaacaacaacaacaacaacaacaacaacaaaaaccttacaaaccaggtgcagaccatcaatctgaccatcttgcataaacaatgttgacaagttaatagaggttacccccttgggagtaccagtccctagcacaggattatactaatcattggtcagtacatttcattcaggtttcaccaaggcttacacaattccagtcatctccagaggtacactggctttctcaaaggactattgcaagtctttgcacacatagctggagccatctctcctactgctgctggatttttcatcagtcaggattcagagtttggttggagaaatgtcttcttgctttcagctgctgttaacatatcgggcctggttttctacctcatctttggccgagcagatgtgcaggactgggctaaagagcagacattcacccacctctgagcaaaccgagagatgtgctagatcctggtgcttagttcatcattgttttccctcacagacatttctctttcatgcctgcttgactgataagccattagctagaccctgactatgtaacgctaaagattttaccatgcctggaaattttacaggggaagaaaacacgctagttatttaactgcaagctactaaaagcataggtgtgttgagatttctgtgttctccactcttccactgttatcctagtaaaagcatcaggggctggggacaatttctttccaaagcaaaagaggaagccagaccttgggaccg

SEQ ID NO: 183054 - DNA, 3699 bp, Homo sapiens
  Payload ID: 16064
  Gene Symbol: SLC17A4
  Gene Name: solute carrier family 17, member 4
  Uniprot ID: Q9Y2C5
  ENST ID: ENST00000439485
  CDS Start-End: 382-1713
ttacctcccagaattagacaattgcaaagagcttagaatatttatttgaaaggaatgaggatcctgcactcttcctccctcagtaagtaaatgccagtccctaggaagagagaaccaaaatgtctaccggaccagatgtcaaggctacagtgggggacatttccagtgatggcaatttaaacgtggctcaagaggaatgctccaggaaagggatagtggatgaattcttcccgctgttgtcaaactaatgtatatggactcaaccacagggatatccccagagctcctatggaacactagcaaattttgtgtttttgttcagtccgacatgggctggccctcatcttgcagctctgtaatttttcaatttacacccaacaaatgaacttgagcattgccatcccagctatggtgaacaacacagccccacctagccagcccaatgcttccacagaacggccctccactgactcccagggctactggaatgaaactctaaaagaatttaaagcaatggcccctgcatatgactggagtcctgaaatccagggaatcatcctcagctccctcaactatggctcattcttggctccaatccccagtggctatgtggctggaatatttggagccaagtatgtggttggtgctggcttgtttatttcctcattcctgaccctcttcattccactggcagctaatgcgggagtggccttgctcattgtcctccggattgtacaaggcatagcccaggttatggtattaactggtcagtattcaatttgggtcaaatgggctcccccactggaaaggagtcaactcaccaccattgctggatcagggtcaatgctggggtccttcattgttctacttgctggtggtctcctctgccagaccataggatggccttacgtcttctatatctttggaggaattggctgtgcttgttgtcctctctggtttcctctcatttatgatgatcctgtgaatcatccctttatcagtgctggtgagaagagatacattgtgtgttcattggctcagcaggactgttcaccaggctggtctcttcccattagggctatgatcaaatccttaccactctgggccattttagtctcttatttctgtgaatactggcttttttataccattatggcgtacacaccaacgtacatcagctcggtacttcaagccaacctcagagatagtgggatcctgtctgccttgccgtttgttgttggatgtatctgcattatccttggaggtctactggcagactttcttctctccagaaaaatcctcagactcatcaccatcaggaaactcttcactgccattggggttctcttcccatccgtgatcctcgtgtccctgccctgggtcagatccagccacagcatgaccatgaccttcttggtgctgtcttctgccatcagcagcttctgtgaatcaggagcccttgttaacttcttggatattgctcctcggtacactggctttctcaaaggactattgcaagtctttgcacacatagctggagccatctctcctactgctgctggatttttcatcagtcaggattcagagtttggttggagaaatgtcttcttgctttcagctgctgttaacatatcgggcctggttttctacctcatctttggccgagcagatgtgcaggactgggctaaagagcagacattcacccacctctgagcaaaccgagagatgtgctagatcctggtgcttagttcatcattgttttccctcacagacatttctctttcatgcctgcttgactgataagccattagctagaccctgactatgtaacgctaaagattttaccatgcctggaaattttacaggggaagaaaacacgctagttatttaactgcaagctactaaaagcataggtgtgttgagatttctgtgttctccactcttccactgttatcctagtaaaagcatcaggggctggggacaatttctttccaaagcaaaagaggaagccagaccttgggaccgagaactgagaatcacaagggagttgcgcccaacatgcagaacatgaatcctctgagctgtcctcaaaagaaagccccaaacaacagaaagcatagtgttttccattgttggtgaaaaatgtcaaggaggaaagaacaataatgattccatcatgataagaggaatgaacgtgtctgcaactaatgggagcaagatagtacactttaactctttcagacaacttgcattctgtggatgccagctttggaatcagagccgcctctggaatacctgtgcttccagagttagcttttggacagttaccttctttctggccatcttgacttctgccccacatctgctttttggctttgtgcagatctttaacatgttagtgaacagacattgcccagtgtctcttctagcccctccaacagttcttcatgtagcactgcttttggacagtgacccatgatatctgccttcgtttgcccctctgactgttggaatcccacgcaccattcagtaggattcaattcaatgtggaaccattcaacattcacctcattaacctaaaatgtctcccaaagatgtatgtaagacacacactgccctaacctcactccaaatgtctggagaaatgtgtgtagtgcttttgttaaagcccctatatgggcagcatggaggatcataagatagcaaaaccatttcaacactaaatgaatattaatgtacacacaccttgtgtggatggcagaaatcaaatcatacacagtattaaggagttcagtgtctcgggagggcagataactttaatcaaagtatcacacaagtgaatatgtaataacaactgtagaaataatgagtggttacatgggttatgagagtggatgataagtgcactaatctgagtgtaaggaagggccacccctgcaaagtttcagctgagctgggatctgaaggataatagttaactgttgtgggagactgagaggagaatattttaggaagaaagaacagcataagcaaaagtttcatggcaggagggagaaattagctatggccagagtatagagaataagggaagtatgatttgtgaggagactgtagaagaattaaggtcaggagcacacaggatgatgtaggcccagtgaagtgcgttggtctttattttgaaatcagtaggaagtgtcctggttttcaaaggcactctgcatgagagattaggttggagtaggagcttacagtgtagtccaggagagaacaatggcccctggcatgaggcaatagacatggtgagaggtgaatggattatttgatttaggtggattatttgatttagggaataaacctgacgggtcctattactaagtgagagagtgaaagatgtccagagtaactcctgagttttggtttgctattatattaatggggatgcctctaacacagacagcaacacagatagcaattatatccaagtgtagacaacaagaaggaaaatggacacatgactctggatttctcttgtgagacctgggctccatttacaaacgtataaatcatcttgatataggtagtgattacaatttttgcatggatgagtcatccatgggtgaaagtggcataagaaaaggaagcttgggaataagccttaaagaattccagtatttaatggtcagctggaggatgattagc

SEQ ID NO: 183055 - DNA, 2420 bp, Homo sapiens
  Payload ID: 16065
  Gene Symbol: SLC18A3
  Gene Name: solute carrier family 18 (vesicular acetylcholine transporter), member 3
  Uniprot ID: Q16572
  ENST ID: ENST00000374115
  CDS Start-End: 441-2039
ggaggaggcaagagccgacgcgaggggaggggagcgcagcggcggggctaacgggcgggcaagcgggcgggcggcaacagcatgtccctcggccagcgcgggcggcctcttagcgcggcgggggctgctctgggcgcgccccgggcgaagtgcgcccagtctccggccccggcccctcggcgcgcccgacttcccggccgcccctgagcccagcagccgcgggtcccgggatcggctaagagtagctgcaacgcctcgccggacggagtcctttcctttcccgggacgctgggccatgagctccgcggccacctgaggcacaggggagtctgctcggccaggacagcctccccgaagtcccgtgccctcgcctctgcactgcgggacgccagcgctcggccctggcggaggcgtcctcggaagagcatcggggtgggggcatggaatccgcggaacctgcgggccaggcccgggcggcggccaccaagctgtcggaggctgtgggcgcggcgctgcaggagccccggcggcagaggcgcctggtgcttgttatcgtgtgcgtggcgctgttactggacaacatgctgtacatggtcatcgtgcccatagtgcccgactacatcgcccacatgcgcgggggcggcgagggccccacccggactcccgaggtgtgggagcccaccctgccgctgcccactccggccaatgccagcgcctacacggccaacacctcggcgtccccgacagctgcgtggccagcgggctcagcccttcggccccgctaccctacggagagcgaagacgtgaagatcggggtgctgtttgcttccaaggctatcctgcagctgctagtgaaccccttgagcgggcccttcatcgaccgcatgagctacgacgtgccgctgctgatcggcctgggcgtcatgttcgcctctacagtcctgttcgccttcgccgaggactacgccacgctgttcgcggcgcgcagcctgcagggcctgggctcagccttcgccgacacgtctggcatagccatgatcgccgataagtacccggaggagccggagcgcagtcgtgcactgggcgtggcgctggccttcattagcttcggaagcctagtggccccgcccttcgggggcatcctctatgagttcgccggcaagcgcgtgcccttcttggtgctagctgccgtgtcgctctttgacgcgctgttgctgctggcagtggccaaacccttctcggcggctgcacgggctcgggccaacctgccagtgggcactcccatccaccgcctcatgctagacccctacattgccgtggtggccggcgcgctcaccacctgtaacattcccctcgccttcctcgaacccaccattgccacgtggatgaagcatacgatggcggcttccgagtgggagatgggcatggcctggctgccggccttcgtgcctcatgtgctgggcgtctacctcaccgtgcgcctggcggcgcgctacccacacctgcagtggctgtacggcgcgcttgggctggctgtgatcggcgccagctcgtgcatcgtgcccgcctgccgctccttcgcgccgctagtggtctcactatgcggcctctgttttggcatagccctagtcgacacagcactgctgcccacgctcgccttcctggtggacgtgcgccatgtctcagtctatggcagcgtctacgccatcgccgacatctcctattcggtggcctacgcgctcgggcccatagtggcaggccacattgtgcactcgctgggctttgagcagctcagccttggcatgggactggccaacctgctctatgctcccgtcttgctgctgctccgcaacgtgggcctcctgacgcgctcccgttccgagcgcgatgtgctgcttgatgagccaccgcaaggtctgtacgatgcggtgcgcctgcgtgagcgtcctgtgtctggccaggacggcgagcctcgcagcccgcctggcccttttgatgcgtgcgaggacgactacaactactactacacccgcagctagcatccccactcctcctccagcccacccaaccgccttgggtcaagggggctgctctgcaagcccactggccagctctggctcagggcccacctcctccagcgagtaccccagccactcctcaaccttgacttctgcccaaatcccctccctgtgacccgttccatatccctttctctcttgtccaatggggcttggagcaccgaggccagcgaagccatcgcgctccttgcggaggtgaagaggaccctgagtccccacctgcggctcccctgtgtagagcctgcatctgtctgtccttccttccattgctcccagtgccaaacttgggccgctgcaccgcggcgcctccgcccaaatcaataaactgtgtctgtcccagga

SEQ ID NO: 183056 - DNA, 2770 bp, Homo sapiens
  Payload ID: 16066
  Gene Symbol: SLC18A1
  Gene Name: solute carrier family 18 (vesicular monoamine transporter), member 1
  Uniprot ID: P54219
  ENST ID: ENST00000265808
  CDS Start-End: 381-1862
gctaacagctgccaatacctcactgagtgcctcacaccaacatgggctccaagatgaaggcatctttctgatcaggggtttgtagctcaaacaaaagaatgagcgtgcttctagaaccacagagcaagggaacatggtagaggataagctggcaagttgaaaagcgtgggatttcatcccagtttgacactaactgtgcaaccccaaacaaatctcctaaccttcagaggctcggatttcttgtctatgagatgaagtgagtttccttcgtctgggcagactccctcccctcttccataaaggctgcaggagacctgtagctgtcacaggaccttccctaagagcccgcaggggaagactgccccagtccggccatcaccatgctccggaccattctggatgctccccagcggttgctgaaggaggggagagcgtcccggcagctggtgctggtggtggtattcgtcgctttgctcctggacaacatgctgtttactgtggtggtgccaattgtgcccaccttcctatatgacatggagttcaaagaagtcaactcttctctgcacctcggccatgccggaagttccccacatgccctcgcctctcctgccttttccaccatcttctccttcttcaacaacaacaccgtggctgttgaagaaagcgtacctagtggaatagcatggatgaatgacactgccagcaccatcccacctccagccactgaagccatctcagctcataaaaacaactgcttgcaaggcacaggtttcttggaggaagagattacccgggtcggggttctgtttgcttcaaaggctgtgatgcaacttctggtcaacccattcgtgggccctctcaccaacaggattggatatcatatccccatgtttgctggctttgttatcatgtttctctccacagttatgtttgctttttctgggacctatactctactctttgtggcccgaacccttcaaggcattggatcttcattttcatctgttgcaggtcttggaatgctggccagtgtctacactgatgaccatgagagaggacgagccatgggaactgctctggggggcctggccttggggttgctggtgggagctccctttggaagtgtaatgtacgagtttgttgggaagtctgcacccttcctcatcctggccttcctggcactactggatggagcactccagctttgcatcctacagccttccaaagtctctcctgagagtgccaaggggactcccctctttatgcttctcaaagacccttacatcctggtggctgcaggtctagctttcttgcctgccagtgtgtcctacctcattggcaccaacctctttggtgtgttggccaacaagatgggtcggtggctgtgttccctaatcgggatgctggtagtaggtaccagcttgctctgtgttcctctggctcacaatatttttggtctcattggccccaatgcagggcttggccttgccataggcatggtggattcttctatgatgcccatcatggggcacctggtggatctacgccacacctcggtgtatgggagtgtctacgccatcgctgatgtggctttttgcatgggctttgctataggtccatccaccggtggtgccattgtaaaggccatcggttttccctggctcatggtcatcactggggtcatcaacatcgtctatgctccactctgctactacctgcggagccccccggcaaaggaagagaagcttgctattctgagtcaggactgccccatggagacccggatgtatgcaacccagaagcccacgaaggaatttcctctgggggaggacagtgatgaggagcctgaccatgaggagtagcagcagaaggtgctccttgaattcatgatgcctcagtgaccacctctttccctgggaccagatcaccatggctgagcccacggctcagtgggcttcacatacctctgcctgggaatcttctttcctcccctcccatggacactgtccctgatactcttctcacctgtgtaacttgtagctcttcctctatgccttggtgccgcagtggcccatcttttatgggaagacagagtgatgcaccttcccgctgctgtgaggttgattaaacttgagctgtgacgggttctgcaaggggtgactcattgcatagaggtggtagtgagtaatgtgcccctgaaaccagtggggtgactgacaagcctctttaatctgttgcctgattttctctggcatagtcccaacagatcggaagagtgttaccctcttttcctcaacgtgttctttcccgggttttcccagccgagttgagaaaatgttctcagcattgtcttgctgccaaatgccagcttgaagagttttgttttgttttttttcatttatttttttttttaataaagtgagtgatttttctgtggctaaatctagagctgctaaaagggctttaccctcagtgaaaagtgtcttctattttcattatctttcagaaacaggagcccatttctcttctgctggagttattgacattctcctgacctcccctgtgtgttcctaccttttctgaacctcttagactcttagaaataaaagtagaagaaagacagaaaaaataactgattagacccaagatttcatgggaagaagttaaaagaaactgccttgaaatccctcctgattgtagatttcctaacaggaggggtgtaatgtgacattgttcatacttgctaataaatacattattgcctaattca

SEQ ID NO: 183057 - DNA, 2753 bp, Homo sapiens
  Payload ID: 16066
  Gene Symbol: SLC18A1
  Gene Name: solute carrier family 18 (vesicular monoamine transporter), member 1
  Uniprot ID: P54219
  ENST ID: ENST00000276373
  CDS Start-End: 268-1845
cacacacacacatacacagaatcctcagataacaggaggcaataaatccaacagcacatccacgttcagagaacagtgtccctgctgtcttgctaacagctgccaatacctcactgagtgcctcacaccaacatgggctccaagtgagtttccttcgtctgggcagactccctcccctcttccataaaggctgcaggagacctgtagctgtcacaggaccttccctaagagcccgcaggggaagactgccccagtccggccatcaccatgctccggaccattctggatgctccccagcggttgctgaaggaggggagagcgtcccggcagctggtgctggtggtggtattcgtcgctttgctcctggacaacatgctgtttactgtggtggtgccaattgtgcccaccttcctatatgacatggagttcaaagaagtcaactcttctctgcacctcggccatgccggaagttccccacatgccctcgcctctcctgccttttccaccatcttctccttcttcaacaacaacaccgtggctgttgaagaaagcgtacctagtggaatagcatggatgaatgacactgccagcaccatcccacctccagccactgaagccatctcagctcataaaaacaactgcttgcaaggcacaggtttcttggaggaagagattacccgggtcggggttctgtttgcttcaaaggctgtgatgcaacttctggtcaacccattcgtgggccctctcaccaacaggattggatatcatatccccatgtttgctggctttgttatcatgtttctctccacagttatgtttgctttttctgggacctatactctactctttgtggcccgaacccttcaaggcattggatcttcattttcatctgttgcaggtcttggaatgctggccagtgtctacactgatgaccatgagagaggacgagccatgggaactgctctggggggcctggccttggggttgctggtgggagctccctttggaagtgtaatgtacgagtttgttgggaagtctgcacccttcctcatcctggccttcctggcactactggatggagcactccagctttgcatcctacagccttccaaagtctctcctgagagtgccaaggggactcccctctttatgcttctcaaagacccttacatcctggtggctgcagggtccatctgctttgccaacatgggggtggccatcctggagcccacactgcccatctggatgatgcagaccatgtgctcccccaagtggcagctgggtctagctttcttgcctgccagtgtgtcctacctcattggcaccaacctctttggtgtgttggccaacaagatgggtcggtggctgtgttccctaatcgggatgctggtagtaggtaccagcttgctctgtgttcctctggctcacaatatttttggtctcattggccccaatgcagggcttggccttgccataggcatggtggattcttctatgatgcccatcatggggcacctggtggatctacgccacacctcggtgtatgggagtgtctacgccatcgctgatgtggctttttgcatgggctttgctataggtccatccaccggtggtgccattgtaaaggccatcggttttccctggctcatggtcatcactggggtcatcaacatcgtctatgctccactctgctactacctgcggagccccccggcaaaggaagagaagcttgctattctgagtcaggactgccccatggagacccggatgtatgcaacccagaagcccacgaaggaatttcctctgggggaggacagtgatgaggagcctgaccatgaggagtagcagcagaaggtgctccttgaattcatgatgcctcagtgaccacctctttccctgggaccagatcaccatggctgagcccacggctcagtgggcttcacatacctctgcctgggaatcttctttcctcccctcccatggacactgtccctgatactcttctcacctgtgtaacttgtagctcttcctctatgccttggtgccgcagtggcccatcttttatgggaagacagagtgatgcaccttcccgctgctgtgaggttgattaaacttgagctgtgacgggttctgcaaggggtgactcattgcatagaggtggtagtgagtaatgtgcccctgaaaccagtggggtgactgacaagcctctttaatctgttgcctgattttctctggcatagtcccaacagatcggaagagtgttaccctcttttcctcaacgtgttctttcccgggttttcccagccgagttgagaaaatgttctcagcattgtcttgctgccaaatgccagcttgaagagttttgttttgttttttttcatttatttttttttttaataaagtgagtgatttttctgtggctaaatctagagctgctaaaagggctttaccctcagtgaaaagtgtcttctattttcattatctttcagaaacaggagcccatttctcttctgctggagttattgacattctcctgacctcccctgtgtgttcctaccttttctgaacctcttagactcttagaaataaaagtagaagaaagacagaaaaaataactgattagacccaagatttcatgggaagaagttaaaagaaactgccttgaaatccctcctgattgtagatttcctaacaggaggggtgtaatgtgacattgttcatacttgctaataaatacattattgcctaattca

SEQ ID NO: 183058 - DNA, 1419 bp, Homo sapiens
  Payload ID: 16066
  Gene Symbol: SLC18A1
  Gene Name: solute carrier family 18 (vesicular monoamine transporter), member 1
  Uniprot ID: P54219
  ENST ID: ENST00000381608
  CDS Start-End: 1-1419
atgctccggaccattctggatgctccccagcggttgctgaaggaggggagagcgtcccggcagctggtgctggtggtggtattcgtcgctttgctcctggacaacatgctgtttactgtggtggtgccaattgtgcccaccttcctatatgacatggagttcaaagaagtcaactcttctctgcacctcggccatgccggaagttccccacatgccctcgcctctcctgccttttccaccatcttctccttcttcaacaacaacaccgtggctgttgaagaaagcgtacctagtggaatagcatggatgaatgacactgccagcaccatcccacctccagccactgaagccatctcagctcataaaaacaactgcttgcaaggcacaggtttcttggaggaagagattacccgggtcggggttctgtttgcttcaaaggctgtgatgcaacttctggtcaacccattcgtgggccctctcaccaacaggattggatatcatatccccatgtttgctggctttgttatcatgtttctctccacagttatgtttgctttttctgggacctatactctactctttgtggcccgaacccttcaaggcattggatcttcattttcatctgttgcaggtcttggaatgctggccagtgtctacactgatgaccatgagagaggacgagccatgggaactgctctggggggcctggccttggggttgctggtgggagctccctttggaagtgtaatgtacgagtttgttgggaagtctgcacccttcctcatcctggccttcctggcactactggatggagcactccagctttgcatcctacagccttccaaagtctctcctgagagtgccaaggggactcccctctttatgcttctcaaagacccttacatcctggtggctgcagggtccatctgctttgccaacatgggggtggccatcctggagcccacactgcccatctggatgatgcagaccatgtgctcccccaagtggcagctgggtctagctttcttgcctgccagtgtgtcctacctcattggcaccaacctctttggtgtgttggccaacaagatgggtcggtggctgtgttccctaatcgggatgctggtagtaggtaccagcttgctctgtgttcctctggctcacaatatttttggtctcattggccccaatgcagggcttggccttgccataggcatggtggattcttctatgatgcccatcatggggcacctggtggatctacgccacacctcggtgtatgggagtgtctacgccatcgctgatgtggctttttgcatgggctttgctataggctattctgagtcaggactgccccatggagacccggatgtatgcaacccagaagcccacgaaggaatttcctctgggggaggacagtga

SEQ ID NO: 183059 - DNA, 2956 bp, Homo sapiens
  Payload ID: 16066
  Gene Symbol: SLC18A1
  Gene Name: solute carrier family 18 (vesicular monoamine transporter), member 1
  Uniprot ID: P54219
  ENST ID: ENST00000440926
  CDS Start-End: 472-2049
cacacacacacatacacagaatcctcagataacaggaggcaataaatccaacagcacatccacgttcagagaacagtgtccctgctgtcttgctaacagctgccaatacctcactgagtgcctcacaccaacatgggctccaagatgaaggcatctttctgatcaggggtttgtagctcaaacaaaagaatgagcgtgcttctagaaccacagagcaagggaacatggtagaggataagctggcaagttgaaaagcgtgggatttcatcccagtttgacactaactgtgcaaccccaaacaaatctcctaaccttcagaggctcggatttcttgtctatgagatgaagtgagtttccttcgtctgggcagactccctcccctcttccataaaggctgcaggagacctgtagctgtcacaggaccttccctaagagcccgcaggggaagactgccccagtccggccatcaccatgctccggaccattctggatgctccccagcggttgctgaaggaggggagagcgtcccggcagctggtgctggtggtggtattcgtcgctttgctcctggacaacatgctgtttactgtggtggtgccaattgtgcccaccttcctatatgacatggagttcaaagaagtcaactcttctctgcacctcggccatgccggaagttccccacatgccctcgcctctcctgccttttccaccatcttctccttcttcaacaacaacaccgtggctgttgaagaaagcgtacctagtggaatagcatggatgaatgacactgccagcaccatcccacctccagccactgaagccatctcagctcataaaaacaactgcttgcaaggcacaggtttcttggaggaagagattacccgggtcggggttctgtttgcttcaaaggctgtgatgcaacttctggtcaacccattcgtgggccctctcaccaacaggattggatatcatatccccatgtttgctggctttgttatcatgtttctctccacagttatgtttgctttttctgggacctatactctactctttgtggcccgaacccttcaaggcattggatcttcattttcatctgttgcaggtcttggaatgctggccagtgtctacactgatgaccatgagagaggacgagccatgggaactgctctggggggcctggccttggggttgctggtgggagctccctttggaagtgtaatgtacgagtttgttgggaagtctgcacccttcctcatcctggccttcctggcactactggatggagcactccagctttgcatcctacagccttccaaagtctctcctgagagtgccaaggggactcccctctttatgcttctcaaagacccttacatcctggtggctgcagggtccatctgctttgccaacatgggggtggccatcctggagcccacactgcccatctggatgatgcagaccatgtgctcccccaagtggcagctgggtctagctttcttgcctgccagtgtgtcctacctcattggcaccaacctctttggtgtgttggccaacaagatgggtcggtggctgtgttccctaatcgggatgctggtagtaggtaccagcttgctctgtgttcctctggctcacaatatttttggtctcattggccccaatgcagggcttggccttgccataggcatggtggattcttctatgatgcccatcatggggcacctggtggatctacgccacacctcggtgtatgggagtgtctacgccatcgctgatgtggctttttgcatgggctttgctataggtccatccaccggtggtgccattgtaaaggccatcggttttccctggctcatggtcatcactggggtcatcaacatcgtctatgctccactctgctactacctgcggagccccccggcaaaggaagagaagcttgctattctgagtcaggactgccccatggagacccggatgtatgcaacccagaagcccacgaaggaatttcctctgggggaggacagtgatgaggagcctgaccatgaggagtagcagcagaaggtgctccttgaattcatgatgcctcagtgaccacctctttccctgggaccagatcaccatggctgagcccacggctcagtgggcttcacatacctctgcctgggaatcttctttcctcccctcccatggacactgtccctgatactcttctcacctgtgtaacttgtagctcttcctctatgccttggtgccgcagtggcccatcttttatgggaagacagagtgatgcaccttcccgctgctgtgaggttgattaaacttgagctgtgacgggttctgcaaggggtgactcattgcatagaggtggtagtgagtaatgtgcccctgaaaccagtggggtgactgacaagcctctttaatctgttgcctgattttctctggcatagtcccaacagatcggaagagtgttaccctcttttcctcaacgtgttctttcccgggttttcccagccgagttgagaaaatgttctcagcattgtcttgctgccaaatgccagcttgaagagttttgttttgttttttttcatttatttttttttttaataaagtgagtgatttttctgtggctaaatctagagctgctaaaagggctttaccctcagtgaaaagtgtcttctattttcattatctttcagaaacaggagcccatttctcttctgctggagttattgacattctcctgacctcccctgtgtgttcctaccttttctgaacctcttagactcttagaaataaaagtagaagaaagacagaaaaaataactgattagacccaagatttcatgggaagaagttaaaagaaactgccttgaaatccctcctgattgtagatttcctaacaggaggggtgtaatgtgacattgttcatacttgctaataaatacattattgcctaattc

SEQ ID NO: 183060 - DNA, 2822 bp, Homo sapiens
  Payload ID: 16066
  Gene Symbol: SLC18A1
  Gene Name: solute carrier family 18 (vesicular monoamine transporter), member 1
  Uniprot ID: P54219
  ENST ID: ENST00000437980
  CDS Start-End: 472-1890
cacacacacacatacacagaatcctcagataacaggaggcaataaatccaacagcacatccacgttcagagaacagtgtccctgctgtcttgctaacagctgccaatacctcactgagtgcctcacaccaacatgggctccaagatgaaggcatctttctgatcaggggtttgtagctcaaacaaaagaatgagcgtgcttctagaaccacagagcaagggaacatggtagaggataagctggcaagttgaaaagcgtgggatttcatcccagtttgacactaactgtgcaaccccaaacaaatctcctaaccttcagaggctcggatttcttgtctatgagatgaagtgagtttccttcgtctgggcagactccctcccctcttccataaaggctgcaggagacctgtagctgtcacaggaccttccctaagagcccgcaggggaagactgccccagtccggccatcaccatgctccggaccattctggatgctccccagcggttgctgaaggaggggagagcgtcccggcagctggtgctggtggtggtattcgtcgctttgctcctggacaacatgctgtttactgtggtggtgccaattgtgcccaccttcctatatgacatggagttcaaagaagtcaactcttctctgcacctcggccatgccggaagttccccacatgccctcgcctctcctgccttttccaccatcttctccttcttcaacaacaacaccgtggctgttgaagaaagcgtacctagtggaatagcatggatgaatgacactgccagcaccatcccacctccagccactgaagccatctcagctcataaaaacaactgcttgcaaggcacaggtttcttggaggaagagattacccgggtcggggttctgtttgcttcaaaggctgtgatgcaacttctggtcaacccattcgtgggccctctcaccaacaggattggatatcatatccccatgtttgctggctttgttatcatgtttctctccacagttatgtttgctttttctgggacctatactctactctttgtggcccgaacccttcaaggcattggatcttcattttcatctgttgcaggtcttggaatgctggccagtgtctacactgatgaccatgagagaggacgagccatgggaactgctctggggggcctggccttggggttgctggtgggagctccctttggaagtgtaatgtacgagtttgttgggaagtctgcacccttcctcatcctggccttcctggcactactggatggagcactccagctttgcatcctacagccttccaaagtctctcctgagagtgccaaggggactcccctctttatgcttctcaaagacccttacatcctggtggctgcagggtccatctgctttgccaacatgggggtggccatcctggagcccacactgcccatctggatgatgcagaccatgtgctcccccaagtggcagctgggtctagctttcttgcctgccagtgtgtcctacctcattggcaccaacctctttggtgtgttggccaacaagatgggtcggtggctgtgttccctaatcgggatgctggtagtaggtaccagcttgctctgtgttcctctggctcacaatatttttggtctcattggccccaatgcagggcttggccttgccataggcatggtggattcttctatgatgcccatcatggggcacctggtggatctacgccacacctcggtgtatgggagtgtctacgccatcgctgatgtggctttttgcatgggctttgctataggctattctgagtcaggactgccccatggagacccggatgtatgcaacccagaagcccacgaaggaatttcctctgggggaggacagtgatgaggagcctgaccatgaggagtagcagcagaaggtgctccttgaattcatgatgcctcagtgaccacctctttccctgggaccagatcaccatggctgagcccacggctcagtgggcttcacatacctctgcctgggaatcttctttcctcccctcccatggacactgtccctgatactcttctcacctgtgtaacttgtagctcttcctctatgccttggtgccgcagtggcccatcttttatgggaagacagagtgatgcaccttcccgctgctgtgaggttgattaaacttgagctgtgacgggttctgcaaggggtgactcattgcatagaggtggtagtgagtaatgtgcccctgaaaccagtggggtgactgacaagcctctttaatctgttgcctgattttctctggcatagtcccaacagatcggaagagtgttaccctcttttcctcaacgtgttctttcccgggttttcccagccgagttgagaaaatgttctcagcattgtcttgctgccaaatgccagcttgaagagttttgttttgttttttttcatttatttttttttttaataaagtgagtgatttttctgtggctaaatctagagctgctaaaagggctttaccctcagtgaaaagtgtcttctattttcattatctttcagaaacaggagcccatttctcttctgctggagttattgacattctcctgacctcccctgtgtgttcctaccttttctgaacctcttagactcttagaaataaaagtagaagaaagacagaaaaaataactgattagacccaagatttcatgggaagaagttaaaagaaactgccttgaaatccctcctgattgtagatttcctaacaggaggggtgtaatgtgacattgttcatacttgctaataaatacattattgcctaattc

SEQ ID NO: 183061 - DNA, 2770 bp, Homo sapiens
  Payload ID: 16066
  Gene Symbol: SLC18A1
  Gene Name: solute carrier family 18 (vesicular monoamine transporter), member 1
  ENST ID: ENST00000517776
  CDS Start-End: 187-1344
ctgctgtcttgctaacagctgccaatacctcactgagtgcctcacaccaacatgggctccaagtgagtttccttcgtctgggcagactccctcccctcttccataaaggctgcaggagacctgtagctgtcacaggaccttccctaagagcccgcaggggaagactgccccagtccggccatcaccatgctccggaccattctggatgctccccagcggttgctgaaggaggggagagcgtcccggcagctggtgctggtggtggtattcgtcgctttgctcctggacaacatgctgtttactgtggtggtgccaattgtgcccaccttcctatatgacatggagttcaaagaagtcaactcttctctgcacctcggccatgccggaagttccccacatgccctcgcctctcctgccttttccaccatcttctccttcttcaacaacaacaccgtggctgttgaagaaagcgtacctagtggaatagcatggatgaatgacactgccagcaccatcccacctccagccactgaagccatctcagctcataaaaacaactgcttgcaaggcacaggtttcttggaggaagagattacccgggtcggggttctgtttgcttcaaaggctgtgatgcaacttctggtcaacccattcgtgggccctctcaccaacaggattggatatcatatccccatgtttgctggctttgttatcatgtttctctccacagttatgtttgctttttctgggacctatactctactctttgtggcccgaacccttcaaggcattggatcttcattttcatctgttgcaggtcttggaatgctggccagtgtctacactgatgaccatgagagaggacgagccatgggaactgctctggggggcctggccttggggttgctggtgggagctccctttggaagtgtaatgtacgagtttgttgggaagtctgcacccttcctcatcctggccttcctggcactactggatggagcactccagctttgcatcctacagccttccaaagtctctcctgagagtgccaaggggactcccctctttatgcttctcaaagacccttacatcctggtggctgcagggtccatctgctttgccaacatgggggtggccatcctggagcccacactgcccatctggatgatgcagaccatgtgctcccccaagtggcagctgggtctagctttcttgcctgccagtgtgtcctacctcattggcaccaacctctttggtgtgttggccaacaagatgggtcggtggctgtgttccctaatcgggatgctggtagtaggtaccagcttgctctgtctaccaagttagaagtctaaatgaaacctttcagtgatgtccataatggaaaacagaggcaactttattccatgaagaatgagaccaggagtgtatgtttaggttcctctggctcacaatatttttggtctcattggccccaatgcagggcttggccttgccataggcatggtggattcttctatgatgcccatcatggggcacctggtggatctacgccacacctcggtgtatgggagtgtctacgccatcgctgatgtggctttttgcatgggctttgctataggtccatccaccggtggtgccattgtaaaggccatcggttttccctggctcatggtcatcactggggtcatcaacatcgtctatgctccactctgctactacctgcggagccccccggcaaaggaagagaagcttgctattctgagtcaggactgccccatggagacccggatgtatgcaacccagaagcccacgaaggaatttcctctgggggaggacagtgatgaggagcctgaccatgaggagtagcagcagaaggtgctccttgaattcatgatgcctcagtgaccacctctttccctgggaccagatcaccatggctgagcccacggctcagtgggcttcacatacctctgcctgggaatcttctttcctcccctcccatggacactgtccctgatactcttctcacctgtgtaacttgtagctcttcctctatgccttggtgccgcagtggcccatcttttatgggaagacagagtgatgcaccttcccgctgctgtgaggttgattaaacttgagctgtgacgggttctgcaaggggtgactcattgcatagaggtggtagtgagtaatgtgcccctgaaaccagtggggtgactgacaagcctctttaatctgttgcctgattttctctggcatagtcccaacagatcggaagagtgttaccctcttttcctcaacgtgttctttcccgggttttcccagccgagttgagaaaatgttctcagcattgtcttgctgccaaatgccagcttgaagagttttgttttgttttttttcatttatttttttttttaataaagtgagtgatttttctgtggctaaatctagagctgctaaaagggctttaccctcagtgaaaagtgtcttctattttcattatctttcagaaacaggagcccatttctcttctgctggagttattgacattctcctgacctcccctgtgtgttcctaccttttctgaacctcttagactcttagaaataaaagtagaagaaagacagaaaaaataactgattagacccaagatttcatgggaagaagttaaaagaaactgccttgaaatccctcctgattgtagatttcctaacaggaggggtgtaatgtgacattgttcatacttgctaataaatacattattgcctaa

SEQ ID NO: 183062 - DNA, 952 bp, Homo sapiens
  Payload ID: 16066
  Gene Symbol: SLC18A1
  Gene Name: solute carrier family 18 (vesicular monoamine transporter), member 1
  ENST ID: ENST00000522513
  CDS Start-End: 179-952
ttgctaacagctgccaatacctcactgagtgcctcacaccaacatgggctccaagtgagtttccttcgtctgggcagactccctcccctcttccataaaggctgcaggagacctgtagctgtcacaggaccttccctaagagcccgcaggggaagactgccccagtccggccatcaccatgctccggaccattctggatgctccccagcggttgctgaaggaggggagagcgtcccggcagctggtgctggtggtggtattcgtcgctttgctcctggacaacatgctgtttactgtggtggtgccaattgtgcccaccttcctatatgacatggagttcaaagaagtcaactcttctctgcacctcggccatgccggaagttccccacatgccctcgcctctcctgccttttccaccatcttctccttcttcaacaacaacaccgtggctgttgaagaaagcgtacctagtggaatagcatggatgaatgacactgccagcaccatcccacctccagccactgaagccatctcagctcataaaaacaactgcttgcaaggcacaggtttcttggaggaagagattacccgggtcggggttctgtttgcttcaaaggctgtgatgcaacttctggtcaacccattcgtgggccctctcaccaacaggattggatatcatatccccatgtttgctggctttgttatcatgtttctctccacagttagtcttggaatgctggccagtgtctacactgatgaccatgagagaggacgagccatgggaactgctctggggggcctggccttggggttgctggtgggagctccctttggaagtgtaatgtacgagtttgttgggaagtctgcacccttcctcatcctggccttcctggcactactggatggagcactccagctttgcatcctacagccttccaaagtctctcctgag

SEQ ID NO: 183063 - DNA, 1980 bp, Homo sapiens
  Payload ID: 16066
  Gene Symbol: SLC18A1
  Gene Name: solute carrier family 18 (vesicular monoamine transporter), member 1
  Uniprot ID: P54219
  ENST ID: ENST00000519026
  CDS Start-End: 234-1715
ggaggcaataaatccaacagcacatccacgttcagagaacagtgtccctgctgtcttgctaacagctgccaatacctcactgagtgcctcacaccaacatgggctccaagtgagtttccttcgtctgggcagactccctcccctcttccataaaggctgcaggagacctgtagctgtcacaggaccttccctaagagcccgcaggggaagactgccccagtccggccatcaccatgctccggaccattctggatgctccccagcggttgctgaaggaggggagagcgtcccggcagctggtgctggtggtggtattcgtcgctttgctcctggacaacatgctgtttactgtggtggtgccaattgtgcccaccttcctatatgacatggagttcaaagaagtcaactcttctctgcacctcggccatgccggaagttccccacatgccctcgcctctcctgccttttccaccatcttctccttcttcaacaacaacaccgtggctgttgaagaaagcgtacctagtggaatagcatggatgaatgacactgccagcaccatcccacctccagccactgaagccatctcagctcataaaaacaactgcttgcaaggcacaggtttcttggaggaagagattacccgggtcggggttctgtttgcttcaaaggctgtgatgcaacttctggtcaacccattcgtgggccctctcaccaacaggattggatatcatatccccatgtttgctggctttgttatcatgtttctctccacagttatgtttgctttttctgggacctatactctactctttgtggcccgaacccttcaaggcattggatcttcattttcatctgttgcaggtcttggaatgctggccagtgtctacactgatgaccatgagagaggacgagccatgggaactgctctggggggcctggccttggggttgctggtgggagctccctttggaagtgtaatgtacgagtttgttgggaagtctgcacccttcctcatcctggccttcctggcactactggatggagcactccagctttgcatcctacagccttccaaagtctctcctgagagtgccaaggggactcccctctttatgcttctcaaagacccttacatcctggtggctgcaggtctagctttcttgcctgccagtgtgtcctacctcattggcaccaacctctttggtgtgttggccaacaagatgggtcggtggctgtgttccctaatcgggatgctggtagtaggtaccagcttgctctgtgttcctctggctcacaatatttttggtctcattggccccaatgcagggcttggccttgccataggcatggtggattcttctatgatgcccatcatggggcacctggtggatctacgccacacctcggtgtatgggagtgtctacgccatcgctgatgtggctttttgcatgggctttgctataggtccatccaccggtggtgccattgtaaaggccatcggttttccctggctcatggtcatcactggggtcatcaacatcgtctatgctccactctgctactacctgcggagccccccggcaaaggaagagaagcttgctattctgagtcaggactgccccatggagacccggatgtatgcaacccagaagcccacgaaggaatttcctctgggggaggacagtgatgaggagcctgaccatgaggagtagcagcagaaggtgctccttgaattcatgatgcctcagtgaccacctctttccctgggaccagatcaccatggctgagcccacggctcagtgggcttcacatacctctgcctgggaatcttctttcctcccctcccatggacactgtccctgatactcttctcacctgtgtaacttgtagctcttcctctatgccttggtgccgcagtggcccatcttttatgggaagacagagtgatgcaccttcccgctgctgtgaggttgatta

SEQ ID NO: 183064 - DNA, 3852 bp, Homo sapiens
  Payload ID: 16067
  Gene Symbol: SLC18A2
  Gene Name: solute carrier family 18 (vesicular monoamine transporter), member 2
  Uniprot ID: Q05940
  ENST ID: ENST00000298472
  CDS Start-End: 144-1688
gagcggcggcggcggggcgctggggcggagactgcgacccggagccgcccggactgacggagcccactgcggtgcgggcgttggcgcgggcacggaggacccgggcaggcatcgcaagcgaccccgagcggagccccggagccatggccctgagcgagctggcgctggtccgctggctgcaggagagccgccgctcgcggaagctcatcctgttcatcgtgttcctggcgctgctgctggacaacatgctgctcactgtcgtggtccccatcatcccaagttatctgtacagcattaagcatgagaagaatgctacagaaatccagacggccaggccagtgcacactgcctccatctcagacagcttccagagcatcttctcctattatgataactcgactatggtcaccgggaatgctaccagagacctgacacttcatcagaccgccacacagcacatggtgaccaacgcgtccgctgttccttccgactgtcccagtgaagacaaagacctcctgaatgaaaacgtgcaagttggtctgttgtttgcctcgaaagccaccgtccagctcatcaccaaccctttcataggactactgaccaacagaattggctatccaattcccatatttgcgggattctgcatcatgtttgtctcaacaattatgtttgccttctccagcagctatgccttcctgctgattgccaggtcgctgcagggcatcggctcgtcctgctcctctgtggctgggatgggcatgcttgccagtgtctacacagatgatgaagagagaggcaacgtcatgggaatcgccttgggaggcctggccatgggggtcttagtgggcccccccttcgggagtgtgctctatgagtttgtggggaagacggctccgttcctggtgctggccgccctggtactcttggatggagctattcagctctttgtgctccagccgtcccgggtgcagccagagagtcagaaggggacacccctaaccacgctgctgaaggacccgtacatcctcattgctgcaggctccatctgctttgcaaacatgggcatcgccatgctggagccagccctgcccatctggatgatggagaccatgtgttcccgaaagtggcagctgggcgttgccttcttgccagctagtatctcttatctcattggaaccaatatttttgggatacttgcacacaaaatggggaggtggctttgtgctcttctgggaatgataattgttggagtcagcattttatgtattccatttgcaaaaaacatttatggactcatagctccgaactttggagttggttttgcaattggaatggtggattcgtcaatgatgcctatcatgggctacctcgtagacctgcggcacgtgtccgtctatgggagtgtgtacgccattgcggatgtggcattttgtatggggtatgctataggtccttctgctggtggtgctattgcaaaggcaattggatttccatggctcatgacaattattgggataattgatattctttttgcccctctctgcttttttcttcgaagtccacctgccaaagaagaaaaaatggctattctcatggatcacaactgccctattaaaacaaaaatgtacactcagaataatatccagtcatatccgataggtgaagatgaagaatctgaaagtgactgagatgagatcctcaaaaatcatcaaagtgtttaattgtataaaacagtgtttccagtgacacaactcatccagaactgtcttagtcataccatccatccctggtgaaagagtaaaaccaaaggttattatttcctttccatggttatggtcgattgccaacagccttataaagaaaaagaagcttttctaggggtttgtataaatagtgttgaaactttattttatgtatttaattttattaaatatcatacaatatattttgatgaaataggtattgtgtaaatctataaatatttgaatccaaaccaaatataattttttaacttacattaacaaacatttgggcaaaaatcatattggtaatgagtgtttaaaattaaagcacacattatctctgagactcttccaacaaagagaaactagaatgaagtctgaaaaacagaatcaagtaagacagcatgttatatagtgacactgaatgttatttaacttgtagttactatcaatatatttatgcgttaaacagctagttctctcaagtgtagaggacaagaacttgtgtcagttatcttttgaatccataaatcttagctggcattagttttctatgtaatcacctacctagagagagttgtaaattatatgttaacatgttatctggttggcagcaaacactaaagccaataaaggaaaaacagtaaatgttccgaaagcagagaaaagcaaccaaacatattgttatgaactaaaagctttccctttaagatgcatacttgtcttactggatgaagaaaattgagggtacatgtaccttatactgtcaaggttgtttaaacatgataaggttaatcgccatctacttcaagttttagaaaaggaaacaagaagctgaaaacagctgctctgactttaatatctgactatatctttgatctgtttgcaggtcatccaagtgttttctaggaatatatttattttaggttgtctgaaactactattttttagactcctgaaagttgttcacatcaatgtgaagacaaattttaaatgaaaatgaagaatgaaattatgtcttgaatcatatattaagaagtaaaaataatagtgatcaggcagaaaagaaaaatggaacatctaaaaatgtatgtgctaactatatcatccagtgtgcagtgttgtgtatttttctaagcatgacaacattgatgtgccttttcagtgtaacagcaaatactgttagtgaacattgtcaatttatgtcattttgttaagagatatgactggagtgtgcagtgtggaatgtctctaatactacttgtgaatcctgcagttctataatcataaacaaaaattacttagtttcgttaagctaagattgtgtttgtgttaacttcgacatcaaggagcaaagaactttagaacagactcctcaatcttgtgactttcttattctctaggaaagtaacacttcgtttcatgaagcttttctgtggggcttcgattatttcaagtctggtttctaagtgcagtgtgtttgaagcaaacgaacttccaactcacttatttggcattgggcaacttggccaagtctgccactttggaagatggctctggaggaaactctcatatggctaaaaaggcaggctagtttcttacttctacaggggtagagccttaaaaaagaacgtgctacaaattggttctctttgagggtttctggttctccctgcccccaataccatatactttattgcaattttatttttgcctttacggctctgtgtctttctgcaagaaggcctggcaaaggtatgcctgctgttggtccctcgggataagataaaatataaataaaaccttcagaactgttttggagcaaaagatagcttgtacttggggaaaaaaattctaagttcttttatatgactaatattcttggttagcaagactggaaagaggtgtttttttaaaatgtacataccagaacaaagaacatacagctctctgaacatttattttttgaacagaggtggtttttatgtttggacctggtaatacagatacaaaaactttaatgaggtagcaatgaatattcaactgtttgactgctaagtgtatctgtccatattttagcaagtttacttaataaatcttctgaaccatg

SEQ ID NO: 183065 - DNA, 2368 bp, Homo sapiens
  Payload ID: 16068
  Gene Symbol: SLC18B1
  Gene Name: solute carrier family 18, subfamily B, member 1
  Uniprot ID: Q6NT16
  ENST ID: ENST00000275227
  CDS Start-End: 98-1468
gcggccgcccgccagagtgccagtggctccttggaggtcgagtccaaggacgtggcttgaagccgggagctggggcgccggagtccacgcaccggggatggaggcgctgggtgacctggagggaccacgcgcaccaggaggtgatgatcctgcaggaagtgcaggagagacccccgggtggctttcgagagaacaggtttttgtactgatatcggcagcttcggtgaacttaggttccatgatgtgctattctatacttggaccgtttttccccaaagaggctgaaaagaagggagccagcaatacaattatcggtatgatctttggatgttttgctttgttcgagttgctggcatccttggtatttggaaactatcttgtacatattggagcaaaatttatgtttgtagcaggaatgtttgtctcaggaggagttacaattctctttggtgtattggaccgagttccagatgggccagtatttattgctatgtgttttctagtgagagtaatggatgcagttagctttgctgcagcaatgactgcatcttcttctatcctggcaaaggcttttccaaataacgtggctacggtattgggaagtcttgagactttttctggactggggctaatactaggtcctcctgtaggtggctttttgtatcaatcctttggctatgaagtgccttttattgttctgggatgcgtcgttttgctgatggtaccactcaatatgtatattttacccaattacgagtctgatccaggtgaacactcattctggaaactgatcgctttacccaaagttggccttatagccttcgtcatcaactcactcagctcgtgttttggcttcctcgatcctactctgtctctctttgttttggagaagttcaatttaccagctggatatgtgggactagtattcctgggtatggcactgtcctatgccatctcttcaccactatttggtctcctaagtgataaaaggccacctctaaggaaatggcttctggtgtttggcaacttaatcacagccgggtgctacatgctcttagggcctgtcccaatcttgcatattaaaagtcagctctggctgctggtgctgatattagttgtaagtggcctctctgctggaatgagtataattccaactttcccggaaattctcagttgtgcacatgaaaatgggtttgaagagggattaagtacattgggacttgtatcaggtctttttagtgcaatgtggtcaattggtgcttttatgggaccaacgctgggtggatttctgtatgagaaaattggttttgaatgggcagcagctatacaaggtctatgggctctgataagtggattagccatgggcttgttttatctactggagtattcaaggagaaaaaggtctaaatctcaaaacatcctcagcacagaggaggaacgaactactctcttgcctaatgaaacctagtccgatggatcctggattgatacaaggttgagaaatgaatgctcctggccttaaacatcaccgtaggaagggtttttaaaattttacgcgcaaaactccgtggaccccgtgccagtgtcttggaagtgtcaacgtgtttttggatgatcctgtattgggctgtacttactgtgatactgaaaagctgtcctgctgaagcagctatatttgaaatattaagtatgaaaggagtaattaaaaacaagcaaaacaaaacaagacttagtttttaaatgaccaaacttgtccttaaagatgttgttattaactcgagttagttcttatttcctctgtttattttttattctaagtacactgattctgtgaatgtaccttttttattaacagggaaagaaatgaattaatttgatatgctctaaatacataaaggtgcttcaaaatatgtagaaacattactatgaaatcagtttttaaaagatatactttctctttgtcctgaggtttttcggtcttgttcaaaaggaagaattcttgcctgccatacagaaactctctagcactccctgaccttaagcttttctaaaaattctgtttgtgtgaaaagtacaagaataacaatacttacaacttccatttttgtaacctacgttcacttatgatctggatttataaacattacttggtataacgtttttcatttcctttaatgtctctgttttttggctctaccatctgttttgtttttgtttttatctatatcttggtagatgtatttcatccctagagcaggtcagcctccttcccctaatgcgaatgcttgttttgttagggaagggcttcctccaacttcgtgtgaaattgtgatgttgaagtgaataaatgtctattgtgtaactctca

SEQ ID NO: 183066 - DNA, 472 bp, Homo sapiens
  Payload ID: 16068
  Gene Symbol: SLC18B1
  Gene Name: solute carrier family 18, subfamily B, member 1
  ENST ID: ENST00000367918
  CDS Start-End: 67-390
tggaggtcgagtccaaggacgtggcttgaagccgggagctggggcgccggagtccacgcaccggggatggaggcgctgggtgacctggagggaccacgcgcaccaggaggtgatgatcctgcaggaagtgcaggagagacccccgggtggctttcgagagaacaggtttttgtactgatatcggcagcttcggtgaacttaggttccatgatgtgctattctatacttggaccgtttttccccaaagaggctgaaaagaagggagccagcaatacaattatcggtatgatctttggatttcaatttaccagctggatatgtgggactagtattcctgggtatggcactgtcctatgccatctcttcaccactatttggtctcctaagtgataaaaggccacctctaaggaaatggcttctggtgtttggcaacttaatcacagccgggtgctacatgctcttagggcctgtc

SEQ ID NO: 183067 - DNA, 3811 bp, Homo sapiens
  Payload ID: 16069
  Gene Symbol: SLC19A1
  Gene Name: solute carrier family 19 (folate transporter), member 1
  Uniprot ID: P41440
  ENST ID: ENST00000311124
  CDS Start-End: 154-1929
agccgcgcgcccgccgcgccgccttgtgggcgctgtagtcccggagtccgcgtgcgcggggccgggtccgggagccccagggcagccgccccgccgagtcgcaggcacagcgtcaccttcgtcccctccggagctgcacgtggcctgagcaggatggtgccctccagcccagcggtggagaagcaggtgcccgtggaacctgggcctgaccccgagctccggtcctggcggcacctcgtgtgctacctttgcttctacggcttcatggcgcagatacggccaggggagagcttcatcaccccctacctcctggggcccgacaagaacttcacgcgggagcaggtcacgaacgagatcacgccggtgctgtcgtactcctacctggccgtgctggtgcccgtgttcctgctcaccgactacctgcgctacacgccggtgctgctgctgcaggggctcagcttcgtgtcggtgtggctgctgctgctgctgggccactcggtggcgcacatgcagctcatggagctcttctacagcgtcaccatggccgcgcgcatcgcctattcctcctacatcttctctctcgtgcggcccgcgcgctaccagcgtgtggccggctactcgcgcgctgcggtgctgctgggcgtgttcaccagctccgtgctgggccagctgctggtcactgtgggccgagtctccttctccacgctcaactacatctcgctggccttcctcaccttcagcgtggtcctcgccctcttcctgaagcgccccaagcgcagcctcttcttcaaccgcgacgaccgggggcggtgcgaaacctcggcttcggagctggagcgcatgaatcctggcccaggcgggaagctgggacacgccctgcgggtggcctgtggggactcagtgctggcgcggatgctgcgggagctgggggacagcctgcggcggccgcagctgcgcctgtggtccctctggtgggtcttcaactcggccggctactacctggtggtctactacgtgcacatcctgtggaacgaggtggaccccaccaccaacagtgcgcgggtctacaacggcgcggcagatgctgcctccacgctgctgggcgccatcacgtccttcgccgcgggcttcgtgaagatccgctgggcgcgctggtccaagctgctcatcgcgggcgtcacggccacgcaggcggggctggtcttccttctggcgcacacgcgccacccgagcagcatctggctgtgctatgcggccttcgtgctgttccgcggctcctaccagttcctcgtgcccatcgccacctttcagattgcatcttctctgtctaaagagctctgtgccctggtcttcggggtcaacacgttctttgccaccatcgtcaagaccatcatcactttcattgtctcggacgtgcggggcctgggcctcccggtccgcaagcagttccagttatactccgtgtacttcctgatcctgtccatcatctacttcttgggggccatgctggatggcctgcggcactgccagcggggccaccacccgcggcagcccccggcccagggcctgaggagtgccgcggaggagaaggcagcacaggcactgagcgtgcaggacaagggcctcggaggcctgcagccagcccagagcccgccgctttccccagaagacagcctgggggctgtggggccagcctccctggagcagagacagagcgacccatacctggcccaggccccggccccgcaggcagctgaattcctgagcccagtgacaaccccttccccctgcactctgtgctccgcccaagcctcaggccctgaggctgcagatgagacttgtccccagctggctgtccatcctcctggtgtcagcaagctgggtttgcagtgtcttccaagcgacggtgttcagaatgtgaaccagtgactctcgggcgcccctgtggtaactttgcaggcggccctcagtgcatccccacgacccctgcctcgagggccgcctgccttagcaatgggggcctccgcttatcctgctagcaggccccctaggattccccctgccctgtgccgcactctggcggtggccacagcgtgctggcgacactcagggcagctgcctggccatgctgtccctgcactgtgccccgcgggctttgttgctggaagaggtgggtggtgggcttctgcgtccaccaggcctcactggctcatgccccttggggggcttgagacaaatcctttctgccccccagggctagtgaagtggcctcttggataccagctcaggggacactggccccacaggagttgtgagccctctagggcagggtgggagccgggaccctcaggtgtagctgagctgtgacattgctggtcatccttggtgctcttgcttttttgaaagatgctttttttttttttaactgacgtagaatgaagaactgcatgtggcttctctgtctctgtggaaaagccatctcaggttggcggcagacacattgtcatcagaggggagcagcggctctggtcctcggagctggttcctctctcccaccctaagggcagccctccatggtcctgtctgtccttctgaagtgtgtccatcctgacctgcgggtcctcagctgctcccacacttgtgccagcccggaggggactggtcccggtcaccgcggacgtgctggccttggtatgtgccaggcttgcctgggctgggcagccttgggggggctgcctttgtggtgggcgctggggaagtacgtcccagcggcctcagggtctaaggagcgctagtgccttgcccacaggtgcgggaccatctgatgtgatgtgaatactcttcccacatacattaaacacacttaagtgagtgtgcgcagggcttctgattcagggccggcctggcctgggggttgagggtcagcagtcagtgaggaggccaggagaggcgtcccagccttctcccgcctccagcccacgcagggccttggtgcccatgagctgagcacccccacaaccctagtcaacggccctatcctgtggggcctctgccacatctcagcggccccaggtgaatggctggctgctcagcacggagagctggggagagaatctctggctggggaggggctgctggagctgctggacccaggggtctcccgaggtggctcaggggagcaggcatcttggggtaccctgggttgaggcagaggctgcacgtggaagatggcccgagtcagtggatggtgccagtcagacagggccatggtcccaggtgcatccaggggctctgtcatggccaccctggggaccctgcttgggggggggtctgcaccagccatttcctgggctcgtagatctagcaggatgtgatgggtggaggtgggctgggcctgtgccatgggctagagcgtcactggggaggcccacaccgccatcagaatcctcctcccagcgcctccccaacctgagggcctgctccctccgcagcctgctcactgcacccactgcctgcctgcctctgagtcctgcactcacccgtccaccaggacagggatggctgtcaggatgtagtgttgctgggagcaagtcaggtcctgctgtgaggagagacctaagagtgttggtgtgtgtccacacacccgtgcatgcctgtgtacctgtgcacactatggatgctcctgcacacctgtgtacaactgcacgcctgtgtatggccatgcatgcataccccatgtaaccgtgcgtgcctgtgcacactcgggatctgccagtggggcagtccagggataaaagactcctgagaactc

SEQ ID NO: 183068 - DNA, 1884 bp, Homo sapiens
  Payload ID: 16069
  Gene Symbol: SLC19A1
  Gene Name: solute carrier family 19 (folate transporter), member 1
  Uniprot ID: P41440
  ENST ID: ENST00000380010
  CDS Start-End: 154-1623
agccgcgcgcccgccgcgccgccttgtgggcgctgtagtcccggagtccgcgtgcgcggggccgggtccgggagccccagggcagccgccccgccgagtcgcaggcacagcgtcaccttcgtcccctccggagctgcacgtggcctgagcaggatggtgccctccagcccagcggtggagaagcaggtgcccgtggaacctgggcctgaccccgagctccggtcctggcggcacctcgtgtgctacctttgcttctacggcttcatggcgcagatacggccaggggagagcttcatcaccccctacctcctggggcccgacaagaacttcacgcgggagcaggtcacgaacgagatcacgccggtgctgtcgtactcctacctggccgtgctggtgcccgtgttcctgctcaccgactacctgcgctacacgccggtgctgctgctgcaggggctcagcttcgtgtcggtgtggctgctgctgctgctgggccactcggtggcgcacatgcagctcatggagctcttctacagcgtcaccatggccgcgcgcatcgcctattcctcctacatcttctctctcgtgcggcccgcgcgctaccagcgtgtggccggctactcgcgcgctgcggtgctgctgggcgtgttcaccagctccgtgctgggccagctgctggtcactgtgggccgagtctccttctccacgctcaactacatctcgctggccttcctcaccttcagcgtggtcctcgccctcttcctgaagcgccccaagcgcagcctcttcttcaaccgcgacgaccgggggcggtgcgaaacctcggcttcggagctggagcgcatgaatcctggcccaggcgggaagctgggacacgccctgcgggtggcctgtggggactcagtgctggcgcggatgctgcgggagctgggggacagcctgcggcggccgcagctgcgcctgtggtccctctggtgggtcttcaactcggccggctactacctggtggtctactacgtgcacatcctgtggaacgaggtggaccccaccaccaacagtgcgcgggtctacaacggcgcggcagatgctgcctccacgctgctgggcgccatcacgtccttcgccgcgggcttcgtgaagatccgctgggcgcgctggtccaagctgctcatcgcgggcgtcacggccacgcaggcggggctggtcttccttctggcgcacacgcgccacccgagcagcatctggctgtgctatgcggccttcgtgctgttccgcggctcctaccagttcctcgtgcccatcgccacctttcagattgcatcttctctgtctaaagagctctgtgccctggtcttcggggtcaacacgttctttgccaccatcgtcaagaccatcatcactttcattgtctcggacgtgcggggcctgggcctcccggtccgcaagcagaatgaagaactgcatgtggcttctctgtctctgtggaaaagccatctcaggttggcggcagacacattgtcatcagaggggagcagcggctctggtcctcggagctggttcctctctcccaccctaagggcagccctccatggtcctgtctgtccttctgaagtgtgtccatcctgacctgcgggtcctcagctgctcccacacttgtgccagcccggaggggactggtcccggtcaccgcggacgtgctggccttggtatgtgccaggcttgcctgggctgggcagccttgggggggctgcctttgtggtgggcgctggggaagtacgtcccagcggcctcagggtctaaggagcgctagtgccttgcccacaggtgcgggaccatctgatgtgatgtgaatactcttcccacatacattaaacacacttaagtgag

SEQ ID NO: 183069 - DNA, 3572 bp, Homo sapiens
  Payload ID: 16069
  Gene Symbol: SLC19A1
  Gene Name: solute carrier family 19 (folate transporter), member 1
  ENST ID: ENST00000417954
  CDS Start-End: 1-809
agctgcgcctgtggtccctctggtgggtcttcaactcggccggctactacctggtggtctactacgtgcacatcctgtggaacgaggtggaccccaccaccaacagtgcgcgggtctacaacggcgcggcagatgctgcctccacgctgctgggcgccatcacgtccttcgccgcgggcttcgtgaagatccgctgggcgcgctggtccaagctgctcatcgcgggcgtcacggccacgcaggcggggctggtcttccttctggcgcacacgcgccacccgagcagcatctggctgtgctatgcggccttcgtgctgttccgcggctcctaccagttcctcgtgcccatcgccacctttcagattgcatcttctctgtctaaagagctctgtgccctggtcttcggggtcaacacgttctttgccaccatcgtcaagaccatcatcactttcattgtctcggacgtgcggggcctgggcctcccggtccgcaagcaggccttaaggatgtcccggcccagactcggcctctgcctgcctggtcccttcccaccccagagtgcagccccagcaagagcaggtatggcggcctcctctgcagaggaccctggcagcgagaggggaccctggcggcgagcggggaccgtggcggcgagaggggaccctggcggcgagaggggaccgtggcggcgagaggggaccctggcggcgagaggggaccctggcggcgagaggggaccgtggtggcgagagggaaccctggcggcaaaaccgagaatgcagtgggtcactcgggccacggctccctgaggacaggaactggccccggccccacctcatcccacgctggagtcgtgcacagacgtccctcgggaggagtgaagaggccaccgggtctgcgtctcaggtaaaaaggtgactgaaaatgccccaccctgctgacatcagggagacaaagctcttggctcaaaagacagcagagtggacacctttgggctgagcgggagaacccccagcatggagggcttggagggcatggagggcatggagggcatagagggcatggagggcatggcccaggcccatggatgccctgctgagaatccacaggggcctgttgtatgtgtgtatatgggtgcacatgtgtgcatatatgtgtattggtgtgtatgcatgtgtatatgtatgtgtgcatgagtatacatgtgcagtgtgtatgcccatcatggaatgggccagggagggctcatagtcatgtatgtggatacacatgtggatacgtgcacatgtatgagtgtatgtatatacctgtatgggtgtgcacgtggacaggctcgtatatgcatgaatacatgtgtatatgtgcacctatgtggagtgtatgggcatgtgtacacacatgagcacgtgtggatgtgtgtgtgcgtgtatgtgtgcgcgtgtgtatgggcatgtatgtgcatagatgcatgtgtatatgtgcacacatgtatgagtacggccatatatgtgcatgcatgtttgggcacacgtgtgcgtgtgtggacatgtatgactgtgcatgggtatggcatgaccagtgctgtgtggccacatggcagggctgcttataagtggcctctgggaggagctgcaggaccccaggctgtggccaggccattcccaggtcctggtctcccagccacccagtccgccccttgagagacactcaccctcatgccaaatccaaggctggcatctcccggctcccctttctctcctttcaatccgttcatcccggggcgaccctggggcggagcacagggggtggggactgctgggcactgatgattaccagacaccttcccgcagggtgcctgccgttagccccacgccaggcccggccggcccacgctcagcctcacacgttcccagctctcaggctaccccggcccttctcacccctttcctgcacaaggacccttttgggaggaggtgactgagcctagcacacacaggcccactgccctgtctgcctccagggcttcctcctgggtactggcccctcgtggggtactgccagccacatccaggacaagagctgcgctcaggcagggccggttcttgggggaggacagtgggtgcggcggccgtccactcccctctgggcatgtcacccccgtgggcctgggctgctccccacctgccagaccccatctgccgcccccactggagaccccaggtcctcaccggccgtccaggaaagccaatctctcccttgtaccccggccgtccgtatggaccctgcaagaggaagggggccaggcttagtggggcagaccctggcccttgaccacgagttggggggtcctggggaaggggaggggccatgcagagcacagcaccctgggccacccatcagctcggaggagcccactgcagcctcacgccgacacctgccccacacgctttaaaactgcactagggagatgagccctgggccgcacagcacaagctcagcagccgcgggcgaccgtgtccttgggggccgtcatgcccgagctcagtgcagagaaagccagggaccgacttaccgggggtcctcggaagcccggctctccctgagcaaaaaaacaagaagacagggttaggtggcagcttgtgccccacctggcagcctctctgagggcccctgtggcgaaggcacggttaggtggcggcttgtgccccacctgatagcctccctaagggccgctgtggtccctttgggtgcactgggccgtccccaaggcgcaggcagccctggggaggacaggagccactggtgaggggagggtcgggtttggggtttgcgtccaggttggtgcgtgcatgcatgccccgggaccctgaagcaggggtggagggtggagggtggagggcatgtgccacgcagtgtcctggttgccacaggccccagctccaatgcacagctgggtgggatagtggagctctcactgggcctggggatcctgtgtctgaggcccaccccaaacaccccggagggctcactgctccctctgaaagtgggagagccggtggcccacactccaaagatccaggcttctccccaggaccctccccgagggcttttctgggcggctgcctgctgggggtggggacgcaggcacaggccccttgaggaactgactccgggccctgcccacagcatcagggcccccaggaagaggctggaggggcagccagaaacctgctgaggctgagctggtacagcctgggctcctgcaccccacaggccaggccccagggaggcgcgagctcagagctgcagcccactgagaacctcccctcagcagggtgggctcaggggtagggagaggacgaggggcagggagaggacgaggggccggcggaaccgccgacatgggtgcgagaaaggaggggccaccagggccaggcctggatggtagagccctgcttgggagaggctcgtgcatcaggagccagaccctcaggaagaccctccccaggctgtctccacagccccaggagcccccacgcctgccggaaggaggctgcccggccctcaccttg

SEQ ID NO: 183070 - DNA, 648 bp, Homo sapiens
  Payload ID: 16069
  Gene Symbol: SLC19A1
  Gene Name: solute carrier family 19 (folate transporter), member 1
  ENST ID: ENST00000427839
  CDS Start-End: 102-648
gtggatccggcgttcgcgcccaggcacgtgttgcttcgggacgggccagccggcacagcgtcaccttcgtcccctccggagctgcacgtggcctgagcaggatggtgccctccagcccagcggtggagaagcaggtgcccgtggaacctgggcctgaccccgagctccggtcctggcggcacctcgtgtgctacctttgcttctacggcttcatggcgcagatacggccaggggagagcttcatcaccccctacctcctggggcccgacaagaacttcacgcgggagcaggtcacgaacgagatcacgccggtgctgtcgtactcctacctggccgtgctggtgcccgtgttcctgctcaccgactacctgcgctacacgccggtgctgctgctgcaggggctcagcttcgtgtcggtgtggctgctgctgctgctgggccactcggtggcgcacatgcagctcatggagctcttctacagcgtcaccatggccgcgcgcatcgcctattcctcctacatcttctctctcgtgcggcccgcgcgctaccagcgtgtggccggctactcgcgcgctgcggtgctgctgggcgtgttcaccagctccgtgctgggccagctgctggtcactgtgggccgagtctccttct

SEQ ID NO: 183071 - DNA, 777 bp, Homo sapiens
  Payload ID: 16069
  Gene Symbol: SLC19A1
  Gene Name: solute carrier family 19 (folate transporter), member 1
  ENST ID: ENST00000443742
  CDS Start-End: 314-777
tcctcaatggaggtttctgtaagttcttcacgagtctcctggctcttccctcagagcagctgcctctagattacaactgccaagtgctgttggtggcagaagccctacctccccactccgaagcagctcctgcaggaaacctgggccttgtgtggctggggaactcccaggactcctgccacgcagggggacccgagggcagcttgggcaggcccctcgcggccgggggcggattcgctcggctacacctgaccggagagacaggcacagcgtcaccttcgtcccctccggagctgcacgtggcctgagcaggatggtgccctccagcccagcggtggagaagcaggtgcccgtggaacctgggcctgaccccgagctccggtcctggcggcacctcgtgtgctacctttgcttctacggcttcatggcgcagatacggccaggggagagcttcatcaccccctacctcctggggcccgacaagaacttcacgcgggagcaggtcacgaacgagatcacgccggtgctgtcgtactcctacctggccgtgctggtgcccgtgttcctgctcaccgactacctgcgctacacgccggtgctgctgctgcaggggctcagcttcgtgtcggtgtggctgctgctgctgctgggccactcggtggcgcacatgcagctcatggagctcttctacagcgtcaccatggccgcgcgcatcgcctattcctcctacatcttctctctcgtgcggcccgcgcgctaccagcgtgtggccggcta

SEQ ID NO: 183072 - DNA, 580 bp, Homo sapiens
  Payload ID: 16069
  Gene Symbol: SLC19A1
  Gene Name: solute carrier family 19 (folate transporter), member 1
  ENST ID: ENST00000528477
  CDS Start-End: 399-580
agtcctcaatggaggtttctgtaagttcttcacgagtctcctggctcttccctcagagcagctgcctctagattacaactgccaagtgctgttggtggcagaagccctacctccccactccgaagcagctcctgcaggaaacctgggccttgtgtggctggggaactcccaggactcctgccacgcagggggacccgagggcagcttgggcaggcccctcgcggccgggggcggattcgctcggctacacctgaccggagagacagcagggccaggttctgcccacccgtggagaaggccagtacaggggagagagccagggctcccacaaagcagggggtccctccaggcacagcgtcaccttcgtcccctccggagctgcacgtggcctgagcaggatggtgccctccagcccagcggtggagaagcaggtgcccgtggaacctgggcctgaccccgagctccggtcctggcggcacctcgtgtgctacctttgcttctacggcttcatggcgcagatacggccaggggagagcttcatcaccccctacctcctggggcccgacaagaacttcacgcg

SEQ ID NO: 183073 - DNA, 1896 bp, Homo sapiens
  Payload ID: 16069
  Gene Symbol: SLC19A1
  Gene Name: solute carrier family 19 (folate transporter), member 1
  Uniprot ID: P41440
  ENST ID: ENST00000485649
  CDS Start-End: 101-1756
ggccgttgaggaggtgcagggagaggagcgggagggctctgggtggctgccaagggggagctctgcgctcagaccctcaactaagaccaggaggtgcctgatgaggccccagcctgcagagccagctcctggtggaagaggaaatgaggcatgctccattcattcggaggtcacgaacgagatcacgccggtgctgtcgtactcctacctggccgtgctggtgcccgtgttcctgctcaccgactacctgcgctacacgccggtgctgctgctgcaggggctcagcttcgtgtcggtgtggctgctgctgctgctgggccactcggtggcgcacatgcagctcatggagctcttctacagcgtcaccatggccgcgcgcatcgcctattcctcctacatcttctctctcgtgcggcccgcgcgctaccagcgtgtggccggctactcgcgcgctgcggtgctgctgggcgtgttcaccagctccgtgctgggccagctgctggtcactgtgggccgagtctccttctccacgctcaactacatctcgctggccttcctcaccttcagcgtggtcctcgccctcttcctgaagcgccccaagcgcagcctcttcttcaaccgcgacgaccgggggcggtgcgaaacctcggcttcggagctggagcgcatgaatcctggcccaggcgggaagctgggacacgccctgcgggtggcctgtggggactcagtgctggcgcggatgctgcgggagctgggggacagcctgcggcggccgcagctgcgcctgtggtccctctggtgggtcttcaactcggccggctactacctggtggtctactacgtgcacatcctgtggaacgaggtggaccccaccaccaacagtgcgcgggtctacaacggcgcggcagatgctgcctccacgctgctgggcgccatcacgtccttcgccgcgggcttcgtgaagatccgctgggcgcgctggtccaagctgctcatcgcgggcgtcacggccacgcaggcggggctggtcttccttctggcgcacacgcgccacccgagcagcatctggctgtgctatgcggccttcgtgctgttccgcggctcctaccagttcctcgtgcccatcgccacctttcagattgcatcttctctgtctaaagagctctgtgccctggtcttcggggtcaacacgttctttgccaccatcgtcaagaccatcatcactttcattgtctcggacgtgcggggcctgggcctcccggtccgcaagcagttccagttatactccgtgtacttcctgatcctgtccatcatctacttcttgggggccatgctggatggcctgcggcactgccagcggggccaccacccgcggcagcccccggcccagggcctgaggagtgccgcggaggagaaggcagcacaggcactgagcgtgcaggacaagggcctcggaggcctgcagccagcccagagcccgccgctttccccagaagacagcctgggggctgtggggccagcctccctggagcagagacagagcgacccatacctggcccaggccccggccccgcaggcagctgaattcctgagcccagtgacaaccccttccccctgcactctgtgctccgcccaagcctcaggccctgaggctgcagatgagacttgtccccagctggctgtccatcctcctggtgtcagcaagctgggtttgcagtgtcttccaagcgacggtgttcagaatgtgaaccagtgactctcgggcgcccctgtggtaactttgcaggcggccctcagtgcatccccacgacccctgcctcgagggccgcctgccttagcaatgggggcctccgcttatcctgctagcaggccccctaggattccccctgccctgtg

SEQ ID NO: 183074 - DNA, 2029 bp, Homo sapiens
  Payload ID: 16069
  Gene Symbol: SLC19A1
  Gene Name: solute carrier family 19 (folate transporter), member 1
  ENST ID: ENST00000567670
  CDS Start-End: 325-1962
actcctcgcagtcctcaatggaggtttctgtaagttcttcacgagtctcctggctcttccctcagagcagctgcctctagattacaactgccaagtgctgttggtggcagaagccctacctccccactccgaagcagctcctgcaggaaacctgggccttgtgtggctggggaactcccaggactcctgccacgcagggggacccgagggcagcttgggcaggcccctcgcggccgggggcggattcgctcggctacacctgaccggagagacaggcacagcgtcaccttcgtcccctccggagctgcacgtggcctgagcaggatggtgccctccagcccagcggtggagaagcaggtgcccgtggaacctgggcctgaccccgagctccggtcctggcggcacctcgtgtgctacctttgcttctacggcttcatggcgcagatacggccaggggagagcttcatcaccccctacctcctggggcccgacaagaacttcacgcgggagcaggtcacgaacgagatcacgccggtgctgtcgtactcctacctggccgtgctggtgcccgtgttcctgctcaccgactacctgcgctacacgccggtgctgctgctgcaggggctcagcttcgtgtcggtgtggctgctgctgctgctgggccactcggtggcgcacatgcagctcatggagctcttctacagcgtcaccatggccgcgcgcatcgcctattcctcctacatcttctctctcgtgcggcccgcgcgctaccagcgtgtggccggctactcgcgcgctgcggtgctgctgggcgtgttcaccagctccgtgctgggccagctgctggtcactgtgggccgagtctccttctccacgctcaactacatctcgctggccttcctcaccttcagcgtggtcctcgccctcttcctgaagcgccccaagcgcagcctcttcttcaaccgcgacgaccgggggcggtgcgaaacctcggcttcggagctggagcgcatgaatcctggcccaggcgggaagctgggacacgccctgcgggtggcctgtggggactcagtgctggcgcggatgctgcgggagctgggggacagcctgcggcggccgcagctgcgcctgtggtccctctggtgggtcttcaactcggccggctactacctggtggtctactacgtgcacatcctgtggaacgaggtggaccccaccaccaacagtgcgcgggtctacaacggcgcggcagatgctgcctccacgctgctgggcgccatcacgtccttcgccgcgggcttcgtgaagatccgctgggcgcgctggtccaagctgctcatcgcgggcgtcacggccacgcaggcggggctggtcttccttctggcgcacacgcgccacccgagcagcatctggctgtgctatgcggccttcgtgctgttccgcggctcctaccagttcctcgtgcccatcgccacctttcagattgcatcttctctgtctaaagagctctgtgccctggtcttcggggtcaacacgttctttgccaccatcgtcaagaccatcatcactttcattgtctcggacgtgcggggcctgggcctcccggtccgcaagcaggccttaaggatgtcccggcccagactcggcctctgcctgcctggtcccttcccaccccagagtgcagccccagcaagagcaggtatggcggcctcctctgcagaggaccctggcagcgagaggggaccctggcggcgagcggggaccgtggcggcgagaggggaccctggcggcgagaggggaccgtggcggcgagaggggaccctggcggcgagaggggaccctggcggcgagaggggaccgtggtggcgagagggaaccctggcggtgagaggggaccctggcggcgagaggggaccgtggcggcgagaggggaccctggtggtgaaaggcgcccgaggctagcctggctctctgggcttctgctctgccagcccccagacatcctcaaacagtggttttctcacatttt

SEQ ID NO: 183075 - DNA, 3671 bp, Homo sapiens
  Payload ID: 16070
  Gene Symbol: SLC19A2
  Gene Name: solute carrier family 19 (thiamine transporter), member 2
  Uniprot ID: O60779
  ENST ID: ENST00000236137
  CDS Start-End: 238-1731
ggcagagggtgggccttaggacgggtctcccttaaactgggcgatcaggcagcgaccctagaggcgtctgtagggtaaagctgggggttctgtagccggaggcggcggcgagtccagaacgtcctggccttacagggagaaggcgtcactcgcggttacaagtgcctgaccctcactccagttggcggaggaggagaaggaaggggccgggccgggtcccctcccctcgcgccccggatggatgtgcccggcccggtgtctcggcgggcggcggcggcggcggccactgtgctcctgcggaccgctcgggtccgtcgcgaatgctggttcttgccgaccgcgctgctctgcgcctacggcttcttcgccagcctcaggccgtccgagcccttcctgaccccgtacctgctggggccggacaagaacctgaccgagagggaggtcttcaatgaaatttatccagtatggacttactcttacctggtgctactgtttcctgtgttccttgccacagactacctccgttataaacctgttgttctactgcaggggctcagccttattgttacatggtttatgctgctctatgcccagggactgctggccattcaatttctagaatttttttatggcatcgccacagccactgaaattgcctattactcttatatctacagtgtggtggacctgggcatgtaccagaaagtcacaagttactgtcgaagtgccactttggtgggctttacagtgggctctgtcctagggcaaatccttgtctcagtggcaggctggtcgctgttcagcctgaatgtcatctctcttacctgtgtttcagtggcttttgctgtggcctggtttttacctatgccacagaagagcctcttctttcaccacattccttctacctgccagagagtgaatggcatcaaggtacaaaatggtggcattgttactgacaccccagcttctaaccaccttcctggctgggaggacattgagtcaaaaatccctctaaatatggaggagcctcccgtggaggaaccggaacccaagccagaccgtctccttgtattgaaagtactatggaatgatttcctgatgtgctactcctctcgccctcttctctgctggtctgtgtggtgggccctctctacctgtggctattttcaagttgtgaactacacacagggcctgtgggagaaagtgatgccttctcgctatgctgctatctataatggtggcgtggaggccgtttcaaccttactgggtgctgttgctgtgtttgcagttggttatataaaaatatcctggtcaacttggggagaaatgacattatctctcttttctctcctgattgctgctgcagtgtatatcatggacactgtgggtaacatttgggtgtgctatgcatcctatgttgtcttcagaatcatctacatgttactcatcacgatagcaacttttcaaattgctgcaaacctcagcatggaacgctatgccctagtatttggtgtaaataccttcattgccctggcactgcagacgctgctcactctaattgtggtagatgccagtggccttggattagaaattaccactcagtttttgatctatgccagttattttgcactcatcgctgtggttttcctggccagtggtgcagtcagtgttatgaagaaatgtagaaagctggaagatccacaatcaagttctcaagtaaccacttcataatatactgctgaagggcttcttcttatagcaagaactctgcacagcaactgcctggatgtgtttgattttttaaagcgtagacatatatttatgaatgtgcatttcttgacttcacagcagccacttgactaataccttgtgttccgggaataacatgatactattcagaggagccagaagtaaagtttatttcatggattatttatgagagctaatttaaggatgactttttttctgattcaaaagtgaacttgattttaaaaaccagtcaagagcaatcaaagcagcacatggtgttgtatacttcattagcaagtgagtttggtgttttataggtcacatatgtctgtatctacttagccagatgcttggcctggtgggaccagggctccacagaggccacaaaatgttgcaagtcatgatggatggaaatatgttctaacagcatctgcctctattcaatttaattcttatttctgtgttactcatgtacattggtctttctacatagttattctatcactggcaatatttgttctggtttagtgttctgtattttaaggtgtacgtatcatttctaattttaagttattttaaaaaaattcatcatatgaatgttcttggttcccattgtgacgattatttatttctgtaaaatttgtttagaagtacgtttttgcattattcatatgcttcccagagaagctcatttagttagaaaataaggcaagttttgaagcctgctaaatgaagagacttaagaaagcttaaggtacgcttgcttgtctttaaatcttcaatatgaaggactattaattccaagattaaaagttcatatataggctaaagatgtaactaggccatttgtatttgtattcccttttatttccaaaataaaatgaaaaatctttttttaataatttcatccctatttatagtttttatattaatttgtttttcttatccaagtaaagatgtcaataggaattgcattagtccaaggcctttttcataaactgagcctcttttcaattatttcaatgggacaggaactaggatagatgtgattcctgcatttttttaccttaaatctgcctttgtttctaaaggtagatcatcttgaatatttgcttaaaattgctagtgatttcattaccaagttacttgaaaaaatgttctatatgcatttaattctgaaatcagtctaccaaggggctgctagtatatgtcagacatgaaaactattttaaagctgactttgttgccttatcttgaaaagaatctagataggtgcttttaactggggtattaacttttttagaatgacacagctgaacagtgttaataatagtgtgtcaagattgcaaagtcgacatactcatttggtttaagcaggaatcctagaagcaaatggatggggataagaataggtcattttctattcaccatcctttactattaagggaaaggaaaagaacactagctaaggaagggaaagggaagtgatatcataaaagtagcaaccttcattttacattctgtctgtttttctttttttgctttgttttgtttgtgctaatttgggaattgtgtactccgaaacaagtagaaaagtgctgtttgagggattttattaaatctttttttaatggaatgtggtacaaattgttcatgttaccaaagcaatatttccctggaatttaattcaaagtttgtggcatacaacctgagccttttcttatataagacaagaatatgttcacatcttggtatgtggccatatttatagaatgctgaactcaatgtgcaagttgtactgtatgcagttttgtaaataagtgaaaataatttgttgtactttttattcaattctgtatagattataaaattatttttattaaataaatattttacagtatattttctctttttaatcaaaa

SEQ ID NO: 183076 - DNA, 2976 bp, Homo sapiens
  Payload ID: 16070
  Gene Symbol: SLC19A2
  Gene Name: solute carrier family 19 (thiamine transporter), member 2
  Uniprot ID: O60779
  ENST ID: ENST00000367804
  CDS Start-End: 166-1056
gggtaaagctgggggttctgtagccggaggcggcggcgagtccagaacgtcctggccttacagggagaaggcgtcactcgcggttacaagtgcctgaccctcactccagttggcggaggaggagaaggaaggggccgggccgggtcccctcccctcgcgccccggatggatgtgcccggcccggtgtctcggcgggcggcggcggcggcggccactgtgctcctgcggaccgctcgggtccgtcgcgaatgctggttcttgccgaccgcgctgctctgcgcctacggcttcttcgccagcctcaggccgtccgagcccttcctgaccccgtacctgctggggccggacaagaacctgaccgagagggaggaacccaagccagaccgtctccttgtattgaaagtactatggaatgatttcctgatgtgctactcctctcgccctcttctctgctggtctgtgtggtgggccctctctacctgtggctattttcaagttgtgaactacacacagggcctgtgggagaaagtgatgccttctcgctatgctgctatctataatggtggcgtggaggccgtttcaaccttactgggtgctgttgctgtgtttgcagttggttatataaaaatatcctggtcaacttggggagaaatgacattatctctcttttctctcctgattgctgctgcagtgtatatcatggacactgtgggtaacatttgggtgtgctatgcatcctatgttgtcttcagaatcatctacatgttactcatcacgatagcaacttttcaaattgctgcaaacctcagcatggaacgctatgccctagtatttggtgtaaataccttcattgccctggcactgcagacgctgctcactctaattgtggtagatgccagtggccttggattagaaattaccactcagtttttgatctatgccagttattttgcactcatcgctgtggttttcctggccagtggtgcagtcagtgttatgaagaaatgtagaaagctggaagatccacaatcaagttctcaagtaaccacttcataatatactgctgaagggcttcttcttatagcaagaactctgcacagcaactgcctggatgtgtttgattttttaaagcgtagacatatatttatgaatgtgcatttcttgacttcacagcagccacttgactaataccttgtgttccgggaataacatgatactattcagaggagccagaagtaaagtttatttcatggattatttatgagagctaatttaaggatgactttttttctgattcaaaagtgaacttgattttaaaaaccagtcaagagcaatcaaagcagcacatggtgttgtatacttcattagcaagtgagtttggtgttttataggtcacatatgtctgtatctacttagccagatgcttggcctggtgggaccagggctccacagaggccacaaaatgttgcaagtcatgatggatggaaatatgttctaacagcatctgcctctattcaatttaattcttatttctgtgttactcatgtacattggtctttctacatagttattctatcactggcaatatttgttctggtttagtgttctgtattttaaggtgtacgtatcatttctaattttaagttattttaaaaaaattcatcatatgaatgttcttggttcccattgtgacgattatttatttctgtaaaatttgtttagaagtacgtttttgcattattcatatgcttcccagagaagctcatttagttagaaaataaggcaagttttgaagcctgctaaatgaagagacttaagaaagcttaaggtacgcttgcttgtctttaaatcttcaatatgaaggactattaattccaagattaaaagttcatatataggctaaagatgtaactaggccatttgtatttgtattcccttttatttccaaaataaaatgaaaaatctttttttaataatttcatccctatttatagtttttatattaatttgtttttcttatccaagtaaagatgtcaataggaattgcattagtccaaggcctttttcataaactgagcctcttttcaattatttcaatgggacaggaactaggatagatgtgattcctgcatttttttaccttaaatctgcctttgtttctaaaggtagatcatcttgaatatttgcttaaaattgctagtgatttcattaccaagttacttgaaaaaatgttctatatgcatttaattctgaaatcagtctaccaaggggctgctagtatatgtcagacatgaaaactattttaaagctgactttgttgccttatcttgaaaagaatctagataggtgcttttaactggggtattaacttttttagaatgacacagctgaacagtgttaataatagtgtgtcaagattgcaaagtcgacatactcatttggtttaagcaggaatcctagaagcaaatggatggggataagaataggtcattttctattcaccatcctttactattaagggaaaggaaaagaacactagctaaggaagggaaagggaagtgatatcataaaagtagcaaccttcattttacattctgtctgtttttctttttttgctttgttttgtttgtgctaatttgggaattgtgtactccgaaacaagtagaaaagtgctgtttgagggattttattaaatctttttttaatggaatgtggtacaaattgttcatgttaccaaagcaatatttccctggaatttaattcaaagtttgtggcatacaacctgagccttttcttatataagacaagaatatgttcacatcttggtatgtggccatatttatagaatgctgaactcaatgtgcaagttgtactgtatgcagttttgtaaataagtgaaaataatttgttgtactttttattcaattctgtatagattataaaattatttttattaaataaatattttacagtata

SEQ ID NO: 183077 - DNA, 3105 bp, Homo sapiens
  Payload ID: 16071
  Gene Symbol: SLC19A3
  Gene Name: solute carrier family 19 (thiamine transporter), member 3
  Uniprot ID: Q9BZV2
  ENST ID: ENST00000258403
  CDS Start-End: 73-1563
atccgacagccgcgggtgcgtggtcgtgcggcaagtgagcgatttggtgaacagacactcccttctgtagccatggattgttacagaacttcactaagcagttcctggatttaccccactgtgatcctctgcttatttggttttttctccatgatgagaccctcagaaccattccttatcccatatttatctggaccagataaaaacctgaccagtgcagagataacaaatgagatcttccccgtttggacatactcctacctggtgctgctgctgcctgtgtttgtcctcaccgattatgtccgctacaagccagtcatcatcttgcaaggtatcagtttcatcattacctggctgctgctgttgtttggccaaggagtgaagaccatgcaggttgtagagttcttctatgggatggtcaccgccgccgaggtggcctactacgcctacatatacagcgtggtcagccccgagcactaccagagagtgagcggctactgcaggagcgtcacgctggccgcctacacagcagggtcggtgctggctcaactcttggtatccctggcgaacatgtcgtacttttacctcaacgtcatatccttggcctctgtctccgtggctttccttttctcacttttcctaccaatgcccaagaaaagcatgttttttcatgcaaaacccagcagagaaataaagaagtcatcaagcgtgaatccagtattagaggaaactcacgaaggtgaagcaccaggctgtgaagagcagaaacccacatcagaaatactcagcacttcagggaagctgaataagggccagctgaacagcctgaaaccaagcaatgtgactgtggacgtttttgtgcagtggttccaagatttgaaggagtgctactcctcaaaacgtcttttctactggtctctatggtgggctttcgccacagcaggttttaaccaggttttgaactatgttcaaatcctgtgggattacaaggcgccatcccaagattcttccatctataatggggccgtagaagctattgcaacctttggaggggctgtggctgcctttgcagtgggttatgtgaaagtcaactgggaccttctgggagagctggctctggtggtcttctcagttgtcaatgccggttctttatttctcatgcattacacagccaatatctgggcgtgctatgctggctatttgatattcaagtccagctatatgcttcttataaccatagcagtatttcagattgcagttaatctgaatgtggaacgctatgccttggtatttggaatcaacacctttattgccttggtgattcagaccatcatgactgtgattgtagtagatcagagagggctcaacttgccagtcagcattcagtttttagtttatgggagctattttgcagtaattgctggaattttcctaatgagaagcatgtatattacctactcaaccaaatcccagaaggatgtacagagccctgctccaagtgagaatccagatgtgtctcacccagaggaagagagtaatatcatcatgtcaacaaaactctaacctcatcgcaacaaacgcaacagtggctttcaaagttatgcaataataaggaaagattttgagatgggtggcatatgttttgccataacttgacatgctttgcaaatctggattccaatggacctttcaaaaccacaacaaaacctcagttttagatgagttctctatgtgaccaattttactggatgcaattgacaggacccgtcatcataattaaacaacccatattggggaccccctgtgactagtagcagctggaaaattctggtttttatcacttgtaaagacatgcagatggcgtggaaccaaaccatgagaaaactccagccatcctggagttgatattcaccatttgtgaggagaaatactaactggactgaccctattgctaggcttaaatacttatttgatcttaccaaagaagtcaacacatgggacctttgtgtcacatgaaccattttctttcctcttctattaagtgtatttctgtttaagttacagttctctaagagaattacaatgtttgtcccatttctaagggcttctcttcaactctaataacagcattattcacgttatgatttgatagtattattatttaatttttttatgattattttccattttgtgctctgagttttgctgttgaaagtctccctcaagaatagcttcagatcctcttgtgtatttgcagaatacacaaggtcatttcccagtggcctgggagaggcagtgagccttctctccaccaccatagacaggtgttaatgcatctatgggccaggtgcagtggctcactcctgtaatccgagcaatttgggaggccaaggtgggagttttgcttgaggccagaggttcaagaccagcctgggcaacacagtgacacctgactctactaaaaaattaaaaaattagctgggcagcgtggtgtgtgcctgtagtctcagctacttgggaggccatggtgggaggatgggttgagcacaggagtcagaggctacagtgagctatgattgcaccattgcactccagcctgggcaacagagtaagactctcatccccctcctcccaaaaaagagcacctgtgtggtgtctgtctaaaataggaaaacttaaaggaggtttctagaagtattagaaataagaaaacactgatggggggagtggaataaaacacctgattttgttttgttttggtttttgagacagtctcgctctctcacccaggctggaatgcaatggcgtgatcttggctcactgcaaacttcacctcctgagttcaagccattctcctacctcagcctcccaagtagctgggactatgggtgcacaccaccacgcctggctaatttttgtatttttagtggagatggggtttcacaatgttggccaggctggtctcaaactcctgacttcaggtgatctgtctgcctcggcctcccaaagagctgagattacaggcgtgagccaccatgcctggccaaaacacctgatttttaaatggtagcaattgtgctaaataaaatgtgtaaaaattttaaa

SEQ ID NO: 183078 - DNA, 644 bp, Homo sapiens
  Payload ID: 16071
  Gene Symbol: SLC19A3
  Gene Name: solute carrier family 19 (thiamine transporter), member 3
  ENST ID: ENST00000409287
  CDS Start-End: 71-349
ccgacagccgcgggtgcgtggtcgtgcggcaagtgagcgatttggtgaacagacactcccttctgtagccatggattgttacagaacttcactaagcagttcctggatttaccccactgtgatcctctgcttatttggttttttctccatgatgagaccctcagaaccattccttatcccatatttatctggaccagataaaaacctgaccagtgcagagataacaaatgagatcttccccgtttggacatactcctacctggtgctgctgctgcctgtgtttgtcctcaccgattatgtccgctacaagccagtcatcatcttgcaaggctggaatgcaatggcgtgatcttggctcactgcaaacttcacctcctgagttcaagccattctcctacctcagcctcccaagtagctgggactatgggtgcacaccaccacgcctggctaatttttgtatttttagtggagatggggtttcacaatgttggccaggctggtctcaaactcctgacttcaggtgatctgtctgcctcggcctcccaaagagctgagattacaggcgtgagccaccatgcctggccaaaacacctgatttttaaatggtagcaattgtgctaaataaaatgtgtaaaaattttaaa

SEQ ID NO: 183079 - DNA, 594 bp, Homo sapiens
  Payload ID: 16071
  Gene Symbol: SLC19A3
  Gene Name: solute carrier family 19 (thiamine transporter), member 3
  ENST ID: ENST00000409456
  CDS Start-End: 433-594
gcgggtgcgtggtcgtgcggcaagtgagcgatttggtgaacagacactcccttctgtagtgacaaatgagatcctctattgggctttatgtctaaagcttgcatttcaagcaatttcctcactcgaggtcaggagttcaagaccagcctggccaacatggtgaaaccccatctctactaaaaatacaaaattatccagtcatggtggcaggcacctgtaatcccagctacttgggaggctgaggcaggagaatggcttgagcccgggaggcacaggttgcaatgggctgagatcatgccactgcacttcagcctggacaacagagcgaccctccatctcaaaaaaaaaaaaaaaatcaggttttcatcgcatcaaggatgctaaaaagaataagcatcacttaattttctctttgtttccatttgatcagccatggattgttacagaacttcactaagcagttcctggatttaccccactgtgatcctctgcttatttggttttttctccatgatgagaccctcagaaccattccttatcccatatttatctggaccagataaaaacctgaccagtgcagagataacaaatgag

SEQ ID NO: 183080 - DNA, 3517 bp, Homo sapiens
  Payload ID: 16071
  Gene Symbol: SLC19A3
  Gene Name: solute carrier family 19 (thiamine transporter), member 3
  Uniprot ID: Q9BZV2
  ENST ID: ENST00000425817
  CDS Start-End: 71-1561
ccgacagccgcgggtgcgtggtcgtgcggcaagtgagcgatttggtgaacagacactcccttctgtagccatggattgttacagaacttcactaagcagttcctggatttaccccactgtgatcctctgcttatttggttttttctccatgatgagaccctcagaaccattccttatcccatatttatctggaccagataaaaacctgaccagtgcagagataacaaatgagatcttccccgtttggacatactcctacctggtgctgctgctgcctgtgtttgtcctcaccgattatgtccgctacaagccagtcatcatcttgcaaggtatcagtttcatcattacctggctgctgctgttgtttggccaaggagtgaagaccatgcaggttgtagagttcttctatgggatggtcaccgccgccgaggtggcctactacgcctacatatacagcgtggtcagccccgagcactaccagagagtgagcggctactgcaggagcgtcacgctggccgcctacacagcagggtcggtgctggctcaactcttggtatccctggcgaacatgtcgtacttttacctcaacgtcatatccttggcctctgtctccgtggctttccttttctcacttttcctaccaatgcccaagaaaagcatgttttttcatgcaaaacccagcagagaaataaagaagtcatcaagcgtgaatccagtattagaggaaactcacgaaggtgaagcaccaggctgtgaagagcagaaacccacatcagaaatactcagcacttcagggaagctgaataagggccagctgaacagcctgaaaccaagcaatgtgactgtggacgtttttgtgcagtggttccaagatttgaaggagtgctactcctcaaaacgtcttttctactggtctctatggtgggctttcgccacagcaggttttaaccaggttttgaactatgttcaaatcctgtgggattacaaggcgccatcccaagattcttccatctataatggggccgtagaagctattgcaacctttggaggggctgtggctgcctttgcagtgggttatgtgaaagtcaactgggaccttctgggagagctggctctggtggtcttctcagttgtcaatgccggttctttatttctcatgcattacacagccaatatctgggcgtgctatgctggctatttgatattcaagtccagctatatgcttcttataaccatagcagtatttcagattgcagttaatctgaatgtggaacgctatgccttggtatttggaatcaacacctttattgccttggtgattcagaccatcatgactgtgattgtagtagatcagagagggctcaacttgccagtcagcattcagtttttagtttatgggagctattttgcagtaattgctggaattttcctaatgagaagcatgtatattacctactcaaccaaatcccagaaggatgtacagagccctgctccaagtgagaatccagatgtgtctcacccagaggaagagagtaatatcatcatgtcaacaaaactctaacctcatcgcaacaaacgcaacagtggctttcaaagttatgcaataataaggaaagattttgagatgggtggcatatgttttgccataacttgacatgctttgcaaatctggattccaatggacctttcaaaaccacaacaaaacctcagttttagatgagttctctatgtgaccaattttactggatgcaattgacaggacccgtcatcataattaaacaacccatattggggaccccctgtgactagtagcagctggaaaattctggtttttatcacttgtaaagacatgcagatggcgtggaaccaaaccatgagaaaactccagccatcctggagttgatattcaccatttgtgaggagaaatactaactggactgaccctattgctaggcttaaatacttatttgatcttaccaaagaagtcaacacatgggacctttgtgtcacatgaaccattttctttcctcttctattaagtgtatttctgtttaagttacagttctctaagagaattacaatgtttgtcccatttctaagggcttctcttcaactctaataacagcattattcacgttatgatttgatagtattattatttaatttttttatgattattttccattttgtgctctgagttttgctgttgaaagtctccctcaagaatagcttcagatcctcttgtgtatttgcagaatacacaaggtcatttcccagtggcctgggagaggcagtgagccttctctccaccaccatagacaggtgttaatgcatctatgggccaggtgcagtggctcactcctgtaatccgagcaatttgggaggccaaggtgggagttttgcttgaggccagaggttcaagaccagcctgggcaacacagtgacacctgactctactaaaaaattaaaaaattagctgggcagcgtggtgtgtgcctgtagtctcagctacttgggaggccatggtgggaggatgggttgagcacaggagtcagaggctggaatgcaatggcgtgatcttggctcactgcaaacttcacctcctgagttcaagccattctcctacctcagcctcccaagtagctgggactatgggtgcacaccaccacgcctggctaatttttgtatttttagtggagatggggtttcacaatgttggccaggctggtctcaaactcctgacttcaggtgatctgtctgcctcggcctcccaaagagctgagattacaggcgtgagccaccatgcctggccaaaacacctgatttttaaatggtagcaattgtgctaaataaaatgtgtaaaaattttaaagagttgttaacattttttgatgaattctgctgaaaattatctgaacatacctgtttttcgaaacttcaagaaacttcaataagggatgcattgagcagtctgacagtgagaataaagaatgctgagtcaagatttatattaaggctggaagctgtggctcacacctgtaatcccagcattttgggaggctgaagtgagaggttaatttgagggtaggggtatgagaccatcttggccaatatagcaagaccctgtgtctaaaacaaacaaaaaaatttttaattggattttgatatggtttggatctgtgtccccaccaaatctcacgttgaagtgtaatccccaatgttagaggtggggccggctgggaggcgactggatcatgggtgtgaagccttcatgaatggtttggcaccgtcccctcagtgctggtctcatgacagtgagttatcgtgagatctggtagtttaaaagtgtgtagcacctccccactctctctttctcctgctttggccacgtgaagatgcctgctcccactttgccttctgccatgagtaaaaattccccgaggactccctagaagcagatgttgccacgcttcctatatagcctgtgagctaattaaaccccttttcttacaaacta

SEQ ID NO: 183081 - DNA, 852 bp, Homo sapiens
  Payload ID: 16071
  Gene Symbol: SLC19A3
  Gene Name: solute carrier family 19 (thiamine transporter), member 3
  ENST ID: ENST00000419059
  CDS Start-End: 660-852
aaatgatatctgtcttacagttattatgtagatttaaggagatagtatgcagaaaagcatcatacaacaaattagtttccttcctataaatgtatctcagagaacttagccacatgcaggaccatcaaaaatctataaacattacaataaggcaaagcttgagctaaaatgtggaggaattagtgaattttcctgtgcacatgataattcacatgagatagcaagatgttttcaaatatagctgccatacaatgattgttttttgttttttgtttcttctgtgcagtgacaaatgagatcctctattgggctttatgtctaaagcttgcatttcaagcaatttcctcactcgaggtcaggagttcaagaccagcctggccaacatggtgaaaccccatctctactaaaaatacaaaattatccagtcatggtggcaggcacctgtaatcccagctacttgggaggctgaggcaggagaatggcttgagcccgggaggcacaggttgcaatgggctgagatcatgccactgcacttcagcctggacaacagagcgaccctccatctcaaaaaaaaaaaaaaaatcaggttttcatcgcatcaaggatgctaaaaagaataagcatcacttaattttctctttgtttccatttgatcagccatggattgttacagaacttcactaagcagttcctggatttaccccactgtgatcctctgcttatttggttttttctccatgatgagaccctcagaaccattccttatcccatatttatctggaccagataaaaacctgaccagtgcagagataacaaatgagatcttccccgtttggacatactcctacctgg

SEQ ID NO: 183082 - DNA, 563 bp, Homo sapiens
  Payload ID: 16071
  Gene Symbol: SLC19A3
  Gene Name: solute carrier family 19 (thiamine transporter), member 3
  ENST ID: ENST00000456524
  CDS Start-End: 167-563
attgctcttggcagctctgtctgaaggaggaggacaagagactccagggtatggaaagggattttcatagtggcgggcagcaggaaggagcagaagttggacctgaaggcaggaagccagcttggttctagaaagaaagaaactgggggcacagaaaaaaacagccatggattgttacagaacttcactaagcagttcctggatttaccccactgtgatcctctgcttatttggttttttctccatgatgagaccctcagaaccattccttatcccatatttatctggaccagataaaaacctgaccagtgcagagataacaaatgagatcttccccgtttggacatactcctacctggtgctgctgctgcctgtgtttgtcctcaccgattatgtccgctacaagccagtcatcatcttgcaaggtatcagtttcatcattacctggctgctgctgttgtttggccaaggagtgaagaccatgcaggttgtagagttcttctatgggatggtcaccgccgccgaggtggcctactacgcctacatatacagcgtggtcagcc

SEQ ID NO: 183083 - DNA, 573 bp, Homo sapiens
  Payload ID: 16071
  Gene Symbol: SLC19A3
  Gene Name: solute carrier family 19 (thiamine transporter), member 3
  ENST ID: ENST00000431622
  CDS Start-End: 60-230
gggtgcgtggtcgtgcggcaagtgagcgatttggtgaacagacactcccttctgtagccatggattgttacagaacttcactaagcagttcctggatttaccccactgtgatcctctgcttatttggttttttctccatgatgagaccctcagaaccattccttatcccatatttatctggaccagataaaaacctgaccagtgcagaggttgaagcatgccacaattaagacaacaaaggacagatgcagggtcagaagcaactcaatgaatccactgggttctgcttctcgagccactgtggaccagttaacagaccttccctccaaggagcagctcagttgtgtggtctttgctctgtggcctcctgctttctccagcaacctcagtgatccaggtgtcaagataacaaatgagatcttccccgtttggacatactcctacctggtgctgctgctgcctgtgtttgtcctcaccgattatgtccgctacaagccagtcatcatcttgcaaggtatcagtttcatcattacctggctgctgctgttgtttggccaaggagtgaagaccatg

SEQ ID NO: 183084 - DNA, 533 bp, Homo sapiens
  Payload ID: 16072
  Gene Symbol: SLC2A1
  Gene Name: solute carrier family 2 (facilitated glucose transporter), member 1
  ENST ID: ENST00000372500
  CDS Start-End: 186-533
ggtcgctagtcgcgggtccccgagtgagcacgccagggagcaggagaccaaacgacgggggtcggagtcagagtcgcagtgggagtccccggaccggagcacgagcctgagcgggagagcgccgctcgcacgcccgtcgccacccgcgtacccggcgcagccagagccaccagcgcagcgctgccatggagcccagcagcaaggtgatcgaggagttctacaaccagacatgggtccaccgctatggggagagcatcctgcccaccacgctcaccacgctctggtccctctcagtggccatcttttctgttgggggcatgattggctccttctctgtgggccttttcgttaaccgctttggccggcggaattcaatgctgatgatgaacctgctggccttcgtgtccgccgtgctcatgggcttctcgaaactgggcaagtcctttgagatgctgatcctgggccgcttcatcatcggtgtgtactgcggcctgaccacaggcttcgtgcccatgtatgtgggtgaagtgtca

SEQ ID NO: 183085 - DNA, 865 bp, Homo sapiens
  Payload ID: 16072
  Gene Symbol: SLC2A1
  Gene Name: solute carrier family 2 (facilitated glucose transporter), member 1
  ENST ID: ENST00000439722
  CDS Start-End: 1-135
tccctctcagtggccatcttttctgttgggggcatgattggctccttctctgtgggccttttcgttaaccgctttggccgggtattacctctgacccagcccctcggagcccaaggaatgtgggcactggcctgacctgtgaccccgtccccaggcggaattcaatgctgatgatgaacctgctggccttcgtgtccgccgtgctcatgggcttctcgaaactgggcaagtcctttgagatgctgatcctgggccgcttcatcatcggtgtgtactgcggcctgaccacaggcttcgtgcccatgtatgtgggtgaagtgtcacccacagcccttcgtggggccctgggcaccctgcaccagctgggcatcgtcgtcggcatcctcatcgcccaggtgttcggcctggactccatcatgggcaacaaggacctgtggcccctgctgctgagcatcatcttcatcccggccctgctgcagtgcatcgtgctgcccttctgccccgagagtccccgcttcctgctcatcaaccgcaacgaggagaaccgggccaagagtgtgctaaagaagctgcgcgggacagctgacgtgacccatgacctgcaggagatgaaggaagagagtcggcagatgatgcgggagaagaaggtcaccatcctggagctgttccgctcccccgcctaccgccagcccatcctcatcgctgtggtgctgcagctgtcccagcagctgtctggcatcaacgctgtcttctattactccacgagcatcttcgagaaggcgggggtgcagcagcctgtgtatgccaccattggctccggtatcgtcaacacggccttcactgtcgtgtcgctgtttgtggtgga

SEQ ID NO: 183086 - DNA, 3667 bp, Homo sapiens
  Payload ID: 16072
  Gene Symbol: SLC2A1
  Gene Name: solute carrier family 2 (facilitated glucose transporter), member 1
  Uniprot ID: P11166
  ENST ID: ENST00000426263
  CDS Start-End: 523-2001
accattttgctagagaaggccgcggaggctcagagaggtgcgcacacttgccctgagtcacacagcgaatgccctccgcggtcccaacgcagagagaacgagccgatcggcagcctgagcgaggcagtggttagggggggccccggccccggccactcccctcaccccctccccgcagagcgccgcccaggacaggctgggccccaggccccgccccgaggtcctgcccacacacccctgacacaccggcgtcgccagccaatggccggggtcctataaacgctacggtccgcgcgctctctggcaagaggcaagaggtagcaacagcgagcgtgccggtcgctagtcgcgggtccccgagtgagcacgccagggagcaggagaccaaacgacgggggtcggagtcagagtcgcagtgggagtccccggaccggagcacgagcctgagcgggagagcgccgctcgcacgcccgtcgccacccgcgtacccggcgcagccagagccaccagcgcagcgctgccatggagcccagcagcaagaagctgacgggtcgcctcatgctggccgtgggaggagcagtgcttggctccctgcagtttggctacaacactggagtcatcaatgccccccagaaggtgatcgaggagttctacaaccagacatgggtccaccgctatggggagagcatcctgcccaccacgctcaccacgctctggtccctctcagtggccatcttttctgttgggggcatgattggctccttctctgtgggccttttcgttaaccgctttggccggcggaattcaatgctgatgatgaacctgctggccttcgtgtccgccgtgctcatgggcttctcgaaactgggcaagtcctttgagatgctgatcctgggccgcttcatcatcggtgtgtactgcggcctgaccacaggcttcgtgcccatgtatgtgggtgaagtgtcacccacagcccttcgtggggccctgggcaccctgcaccagctgggcatcgtcgtcggcatcctcatcgcccaggtgttcggcctggactccatcatgggcaacaaggacctgtggcccctgctgctgagcatcatcttcatcccggccctgctgcagtgcatcgtgctgcccttctgccccgagagtccccgcttcctgctcatcaaccgcaacgaggagaaccgggccaagagtgtgctaaagaagctgcgcgggacagctgacgtgacccatgacctgcaggagatgaaggaagagagtcggcagatgatgcgggagaagaaggtcaccatcctggagctgttccgctcccccgcctaccgccagcccatcctcatcgctgtggtgctgcagctgtcccagcagctgtctggcatcaacgctgtcttctattactccacgagcatcttcgagaaggcgggggtgcagcagcctgtgtatgccaccattggctccggtatcgtcaacacggccttcactgtcgtgtcgctgtttgtggtggagcgagcaggccggcggaccctgcacctcataggcctcgctggcatggcgggttgtgccatactcatgaccatcgcgctagcactgctggagcagctaccctggatgtcctatctgagcatcgtggccatctttggctttgtggccttctttgaagtgggtcctggccccatcccatggttcatcgtggctgaactcttcagccagggtccacgtccagctgccattgccgttgcaggcttctccaactggacctcaaatttcattgtgggcatgtgcttccagtatgtggagcaactgtgtggtccctacgtcttcatcatcttcactgtgctcctggttctgttcttcatcttcacctacttcaaagttcctgagactaaaggccggaccttcgatgagatcgcttccggcttccggcaggggggagccagccaaagtgacaagacacccgaggagctgttccatcccctgggggctgattcccaagtgtgagtcgccccagatcaccagcccggcctgctcccagcagccctaaggatctctcaggagcacaggcagctggatgagacttccaaacctgacagatgtcagccgagccgggcctggggctcctttctccagccagcaatgatgtccagaagaatattcaggacttaacggctccaggattttaacaaaagcaagactgttgctcaaatctattcagacaagcaacaggttttataatttttttattactgattttgttatttttatatcagcctgagtctcctgtgcccacatcccaggcttcaccctgaatggttccatgcctgagggtggagactaagccctgtcgagacacttgccttcttcacccagctaatctgtagggctggacctatgtcctaaggacacactaatcgaactatgaactacaaagcttctatcccaggaggtggctatggccacccgttctgctggcctggatctccccactctaggggtcaggctccattaggatttgccccttcccatctcttcctacccaaccactcaaattaatctttctttacctgagaccagttgggagcactggagtgcagggaggagaggggaagggccagtctgggctgccgggttctagtctcctttgcactgagggccacactattaccatgagaagagggcctgtgggagcctgcaaactcactgctcaagaagacatggagactcctgccctgttgtgtatagatgcaagatatttatatatatttttggttgtcaatattaaatacagacactaagttatagtatatctggacaagccaacttgtaaatacaccacctcactcctgttacttacctaaacagatataaatggctggtttttagaaacatggttttgaaatgcttgtggattgagggtaggaggtttggatgggagtgagacagaagtaagtggggttgcaaccactgcaacggcttagacttcgactcaggatccagtcccttacacgtacctctcatcagtgtcctcttgctcaaaaatctgtttgatccctgttacccagagaatatatacattctttatcttgacattcaaggcatttctatcacatatttgatagttggtgttcaaaaaaacactagttttgtgccagccgtgatgctcaggcttgaaatgcattattttgaatgtgaagtaaatactgtacctttattggacaggctcaaagaggttatgtgcctgaagtcgcacagtgaataagctaaaacacctgcttttaacaatggtaccatacaaccactactccattaactccacccacctcctgcacccctccccacacacacaaaatgaaccacgttctttgtatgggcccaatgagctgtcaagctgccctgtgttcatttcatttggaattgccccctctggttcctctgtatactactgcttcatctctaaagacagctcatcctcctccttcacccctgaatttccagagcacttcatctgctccttcatcacaagtccagttttctgccactagtctgaatttcatgagaagatgccgatttggttcctgtgggtcctcagcactattcagtacagtgcttgatgcacagcaggcactcagaaaatactggaggaaataaaacaccaaagatatttgtc

SEQ ID NO: 183087 - DNA, 2398 bp, Homo sapiens
  Payload ID: 16072
  Gene Symbol: SLC2A1
  Gene Name: solute carrier family 2 (facilitated glucose transporter), member 1
  ENST ID: ENST00000630287
  CDS Start-End: 198-719
agcgagcgtgccggtcgctagtcgcgggtccccgagtgagcacgccagggagcaggagaccaaacgacgggggtcggagtcagagtcgcagtgggagtccccggaccggagcacgagcctgagcgggagagcgccgctcgcacgcccgtcgccacccgcgtacccggcgcagccagagccaccagcgcagcgctgccatggagcccagcagcaagaagctgacgggtcgcctcatgctggccgtgggaggagcagtgcttggctccctgcagtttggctacaacactggagtcatcaatgccccccagaaggtgatcgaggagttctacaaccagacatgggtccaccgctatggggagagcatcctgcccaccacgctcaccacgctctggtccctctcagtggccatcttttctgttgggggcatgattggctccttctctgtgggccttttcgttaaccgctttggccggcggaattcaatgctgatgatgaacctgctggccttcgtgtccgccgtgctcatgggcttctcgaaactgggcaagtcctttgagatgctgatcctgggccgcttcatcatcggtgtgtactgcggcctgaccacaggcttcgtgcccatgtatgtgggtgaagtgtcacccacagcccttcgtggggccctgggcaccctgcaccagctgggcatcgtcgtcggcatcctcatcgcccagtgctaaagaagctgcgcgggacagctgacgtgacccatgacctgcaggagatgaaggaagagagtcggcagatgatgcgggagaagaaggtcaccatcctggagctgttccgctcccccgcctaccgccagcccatcctcatcgctgtggtgctgcagctgtcccagcagctgtctggcatcaacgctgtcttctattactccacgagcatcttcgagaaggcgggggtgcagcagcctgtgtatgccaccattggctccggtatcgtcaacacggccttcactgtcgtgtcgctgtttgtggtggagcgagcaggccggcggaccctgcacctcataggcctcgctggcatggcgggttgtgccatactcatgaccatcgcgctagcactgctggagcagctaccctggatgtcctatctgagcatcgtggccatctttggctttgtggccttctttgaagtgggtcctggccccatcccatggttcatcgtggctgaactcttcagccagggtccacgtccagctgccattgccgttgcaggcttctccaactggacctcaaatttcattgtgggcatgtgcttccagtatgtggagcaactgtgtggtccctacgtcttcatcatcttcactgtgctcctggttctgttcttcatcttcacctacttcaaagttcctgagactaaaggccggaccttcgatgagatcgcttccggcttccggcaggggggagccagccaaagtgacaagacacccgaggagctgttccatcccctgggggctgattcccaagtgtgagtcgccccagatcaccagcccggcctgctcccagcagccctaaggatctctcaggagcacaggcagctggatgagacttccaaacctgacagatgtcagccgagccgggcctggggctcctttctccagccagcaatgatgtccagaagaatattcaggacttaacggctccaggattttaacaaaagcaagactgttgctcaaatctattcagacaagcaacaggttttataatttttttattactgattttgttatttttatatcagcctgagtctcctgtgcccacatcccaggcttcaccctgaatggttccatgcctgagggtggagactaagccctgtcgagacacttgccttcttcacccagctaatctgtagggctggacctatgtcctaaggacacactaatcgaactatgaactacaaagcttctatcccaggaggtggctatggccacccgttctgctggcctggatctccccactctaggggtcaggctccattaggatttgccccttcccatctcttcctacccaaccactcaaattaatctttctttacctgagaccagttgggagcactggagtgcagggaggagaggggaagggccagtctgggctgccgggttctagtctcctttgcactgagggccacactattaccatgagaagagggcctgtgggagcctgcaaactcactgctcaagaagacatggagactcctgccctgttgtgtatagatgcaagatatttatatatatttttggttgtcaatattaaatacagacactaagttatagtatatctggacaagccaacttgtaaatacaccacctcactcctgttacttacctaaacagatataaatggctggtttttagaaa

SEQ ID NO: 183088 - DNA, 598 bp, Homo sapiens
  Payload ID: 16072
  Gene Symbol: SLC2A1
  Gene Name: solute carrier family 2 (facilitated glucose transporter), member 1
  ENST ID: ENST00000475162
  CDS Start-End: 1-427
tgccccccagaaggtgatcgaggagttctacaaccagacatgggtccaccgctatggggagagcatcctgcccaccacgctcaccacgctctggtccctctcagtggccatcttttctgttgggggcatgattggctccttctctgtgggccttttcgttaaccgctttggccggcggaattcaatgctgatgatgaacctgctggccttcgtgtccgccgtgctcatgggcttctcgaaactgggcaagtcctttgagatgctgatcctgggccgcttcatcatcggtgtgtactgcggcctgaccacaggcttcgtgcccatgtatgtgggtgaagtgtcacccacagcccttcgtggggccctgggcaccctgcaccagctgggcatcgtcgtcggcatcctcatcgcccaggcagctggatgagacttccaaacctgacagatgtcagccgagccgggcctggggctcctttctccagccagcaatgatgtccagaagaatattcaggacttaacggctccaggattttaacaaaagcaagactgttgctcaaatctattcagacaagcaacaggttttataatttttttatta

SEQ ID NO: 183089 - DNA, 4389 bp, Homo sapiens
  Payload ID: 16073
  Gene Symbol: SLC2A10
  Gene Name: solute carrier family 2 (facilitated glucose transporter), member 10
  Uniprot ID: O95528
  ENST ID: ENST00000359271
  CDS Start-End: 251-1876
ggagggggtccttgccaggcctggggcggccgggggcggtcctgggctcccctccgtcccgcctccaggcctcggggcctggctggccgacgtggcgttggcggcgctgcgcgcgggagggcagggcaggagggacagaggcgggggcgggccggaaagtttgtccggcggcagcggcgttggggactccggcgggggatgcgcgcccggcccctcagcgcccccagcacgccgccgagtcccgctcgccatgggccactccccacctgtcctgcctttgtgtgcctctgtgtctttgctgggtggcctgacctttggttatgaactggcagtcatatcaggtgccctgctgccactgcagcttgactttgggctaagctgcttggagcaggagttcctggtgggcagcctgctcctgggggctctcctcgcctccctggttggtggcttcctcattgactgctatggcaggaagcaagccatcctcgggagcaacttggtgctgctggcaggcagcctgaccctgggcctggctggttccctggcctggctggtcctgggccgcgctgtggttggcttcgccatttccctctcctccatggcttgctgtatctacgtgtcagagctggtggggccacggcagcggggagtgctggtgtccctctatgaggcaggcatcaccgtgggcatcctgctctcctatgccctcaactatgcactggctggtaccccctggggatggaggcacatgttcggctgggccactgcacctgctgtcctgcaatccctcagcctcctcttcctccctgctggtacagatgagactgcaacacacaaggacctcatcccactccagggaggtgaggcccccaagctgggcccggggaggccacggtactcctttctggacctcttcagggcacgcgataacatgcgaggccggaccacagtgggcctggggctggtgctcttccagcaactaacagggcagcccaacgtgctgtgctatgcctccaccatcttcagctccgttggtttccatgggggatcctcagccgtgctggcctctgtggggcttggcgcagtgaaggtggcagctaccctgaccgccatggggctggtggaccgtgcaggccgcagggctctgttgctagctggctgtgccctcatggccctgtccgtcagtggcataggcctcgtcagctttgccgtgcccatggactcaggcccaagctgtctggctgtgcccaatgccaccgggcagacaggcctccctggagactctggcctgctgcaggactcctctctacctcccattccaaggaccaatgaggaccaaagggagccaatcttgtccactgctaagaaaaccaagccccatcccagatctggagacccctcagcccctcctcggctggccctgagctctgccctccctgggccccctctgcccgctcgggggcatgcactgctgcgctggaccgcactgctgtgcctgatggtctttgtcagtgccttctcctttgggtttgggccagtgacctggcttgtcctcagcgagatctaccctgtggagatacgaggaagagccttcgccttctgcaacagcttcaactgggcggccaacctcttcatcagcctctccttcctcgatctcattggcaccatcggcttgtcctggaccttcctgctctacggactgaccgctgtcctcggcctgggcttcatctatttatttgttcctgaaacaaaaggccagtcgttggcagagatagaccagcagttccagaagagacggttcaccctgagctttggccacaggcagaactccactggcatcccgtacagccgcatcgagatctctgcggcctcctgaggaatccgtctgcctggaaattctggaactgtggctttggcagaccatctccagcatcctgcttcctaggccccagagcacaagttccagctggtcttttgggagtggcccctgcccccaaaggtggtctgcttttgctggggtaaaaaggatgaaagtctgagaatgcccaactcttcattttgagtctcaggccctgaaggttcctgaggatctagcttcatgcctcagtttccccattgacttgcacatctctgcagtatttataagaagaatattctatgaagtctttgttgcaccatggacttttctcaaagaatctcaagggtaccaatcctggcaggaagtctctcccgatatcacccctaaatccaaatgaggatatcatcttttctaatctcttttttcaactggctgggacattttcggaagggggaagtctctttttttactcttatcattttttttttttgaggtggagtctcattctgttgcccaggctggcctgatcttggctcactgcaacctccacctcctgagttcaagcgattcttgtgcctcagcctcctaagcagctgggactacaggcgcatgcaaccatacccagctaatttatttttagcagagatggggtttcactgtgttggccaggctggtcgtgaactcctgagctcaagtgatccacccacctcagcctcccagagtgctaggattacaggccttttgactcttttatctgagttttattgacccctctaattctcttacccagaatatttatccttcaccagcaactctgactctttgacgggaggcctcagttctagtccttggtctgctggtgtcattgctgtaggaatgaccacgggcctcagtttccccatttgtataatgggaagcctgtaccaggtcattcttaagatttctcctgactccagtgagctggaattctaaatgctggtctaggagctgtctccaggatggtgcaggatggctttgcggaaaggagatgggtttggaggccaacaaacctgcttgtcaatattgcctttgcctcttggcagcccttgaacttgagtaaataacaactccctgaacctcagtttcctcatctgcagaatggggataattatgtcccaggggtatatttagaccctgtttcctttcaggagggtccccagctggtccagggcctgggaaatttctacttatcctcattacccaggtccctcctttggaccctgtaaagggtcagggtgaatcagatgggggactgagcaagtagctatgactgcagatcatgtaaggaagggactgacaagaagctcccagatgctggggagaatgaagagctaaaatagatcctaggtgctggatgctttgtcatccatgcgtgcacatatgggtgctggcagagcccccaaggactctggcctctcgagttctcctatcttctccattctagatgcttcccttgtatccagtgatgtgctggagctggctttgccaagcttgtgagagctggttgctacattttcaggatttttacaagttggtaaacacagccattataaaaaattaaatgatttaaatttataattaagtaaattacattaaaacaaaaaaattatactcaaaattcattacttaattttactacctgttactattatctgtgcttttgaggctatttctacatagtaactcttatggagacctaggggagacaccgcgcatctcttcctgattccccactcaatgacatcatgttagtctttggttgcttaactggctgtggggagtgtttttgtatcacaaagattagagaggactacacatcagggcttgatttattgtttgttgattttctagacttcagaacatgctggataaaatgtcagtaatgcaaattaaactttaaagtatgtcttgtttgtagccaatacatggtgtatagcaccaaaaaatggagggattattcttccagtagttgaacactgtcatccgtttcagctgacagctgctcaaatcatttaagaaggagttctgacattcattttcattgttttacttttgtcttcctcactagtgtaaacaaaaatttcaaccagcattcatgccgaacctatacccattcttcagtgcctagctgtacagttatcagggatttttatttgtagtctaattttgtcaaatcatggccaaatcgcagtgatagttgactttggatacaaggtttggcaaaaaaaaaaatattaacaaaatattctgtaagaatcaattgtctatatggaatttaggataaagaatatttacaataaagaatatttacaataaagagtttattattatttgtaagttgtgtgcaacaaacataccctttatctctgtaaaatttatacacacaaaaattaacaaaagattctgtaagaattaattggctatatggaatttaggatagaatatttacaataaagagtatttacaataaagagtttgttattatttgtaaa

SEQ ID NO: 183090 - DNA, 497 bp, Homo sapiens
  Payload ID: 16073
  Gene Symbol: SLC2A10
  Gene Name: solute carrier family 2 (facilitated glucose transporter), member 10
  ENST ID: ENST00000486000
  CDS Start-End: 39-80
cctcagcgcccccagcacgccgccgagtcccgctcgccatggcgcccactcgggcccaggcactctcccgggcgccctgatccgacagccccaggcaagtgcagctgttcctggtctgcagatgaagaaatggaggctccgaaagaagcaaagcagttcatcgattcgctgagcgcggttgtgccccaggcgctgttgtgggcctggggacgctgtcgcgaacgaaactgcgaacaaaacagacgaaccccctcctctggacgtgattctgcagagaggggacagagaaggagattctaacacagcattggggtgggacgcgtggggaatggctttgttgccactcgggactagggctctatttttctctctgcattcagaagcctcgaaggatcagtcgttgattcttgagtgagcacctactacgtgccagacattgatataggggttagagcttcagcaatgaacaaaatagacaataaacctctctctcatgg

SEQ ID NO: 183091 - DNA, 1436 bp, Homo sapiens
  Payload ID: 16074
  Gene Symbol: SLC2A11
  Gene Name: solute carrier family 2 (facilitated glucose transporter), member 11
  ENST ID: ENST00000255830
  CDS Start-End: 15-311
cccaggacgcacagatgagagcgctccgaagactgattcagggcaggatcctgctcctgaccatctgcgctgccggcattggtgggacttttcagtttggctataacctctctatcatcaatgccccgaccttgcacattcaggaattcaccaatgagacatggcaggcgcgtactggagagccactgcccgatcacctagtcctgcttatgtggtccctcatcgtgtctctgtatcccctgggaggcctctttggagcactgcttgcaggtcccttggccatcacgctgggaagaagtccctcctggtgaataacatctttgtggtgtcagcagcaatcctgtttggattcagccgcaaagcaggctcctttgagatgatcatgctgggaagactgctcgtgggagtcaatgcaggtgtgagcatgaacatccagcccatgtacctgggggagagcgcccctaaggagctccgaggagctgtggccatgagctcagccatctttacggctctggggatcgtgatgggacaggtggtcggactcagcactacggcggctccggggctccggggacttggcaggggagctggaggagctggaggaggagcgcgctgcctgccagggctgccgtgcccggcgcccatgggagctgttccagcatcgggccctgaggagacaggtgacaagcctcgtggttctgggcagtgccatggagctctgcgggaatgactcggtgtacgcctacgcctcctccgtgttccggaaggcaggagtgccggaagcgaagatccagtacgcgatcatcgggactgggagctgcgagctgctcacggcggttgttagttgtgtggtaatcgagagggtgggtcggcgcgtgctgctcatcggtgggtacagcctgatgacctgctgggggagcatcttcactgtggccctgtgcctgcagagctccttcccctggacactctacctggccatggcctgcatctttgccttcatcctcagctttggcattggccctgccggagtgacggggatcctggccacagagctgtttgaccagatggccaggcctgctgcctgcatggtctgcggggcgctcatgtggatcatgctcatcctggtcggcctgggatttccctttatcatggaggccttgtcccacttcctctatgtccctttccttggtgtctgtgtctgtggggccatctacactggcctgttccttcctgagaccaaaggcaagaccttccaagagatctccaaggaattacacagactcaacttccccaggcgggcccagggccccacgtggaggagcctggaggttatccagtcaacagaactctagtcccaaaggggtggccagagccaaagccagctactgtcctgtcctctgcttcctgccagggccctggtcctcactccctcctgc

SEQ ID NO: 183092 - DNA, 1555 bp, Homo sapiens
  Payload ID: 16074
  Gene Symbol: SLC2A11
  Gene Name: solute carrier family 2 (facilitated glucose transporter), member 11
  Uniprot ID: Q9BYW1
  ENST ID: ENST00000316185
  CDS Start-End: 38-1537
tgggacagcaagacctccgctcaggcccctctttcgaatgctccacgccctcctgcgatctagaatgattcagggcaggatcctgctcctgaccatctgcgctgccggcattggtgggacttttcagtttggctataacctctctatcatcaatgccccgaccttgcacattcaggaattcaccaatgagacatggcaggcgcgtactggagagccactgcccgatcacctagtcctgcttatgtggtccctcatcgtgtctctgtatcccctgggaggcctctttggagcactgcttgcaggtcccttggccatcacgctgggaaggaagaagtccctcctggtgaataacatctttgtggtgtcagcagcaatcctgtttggattcagccgcaaagcaggctcctttgagatgatcatgctgggaagactgctcgtgggagtcaatgcaggtgtgagcatgaacatccagcccatgtacctgggggagagcgcccctaaggagctccgaggagctgtggccatgagctcagccatctttacggctctggggatcgtgatgggacaggtggtcggactcagggagctcctaggtggccctcaggcctggcccctgctgctggccagctgcctggtgcccggggcgctccagctcgcctccctgcctctgctccctgaaagcccgcgctacctcctcattgactgtggagacaccgaggcctgcctggcagcactacggcggctccggggctccggggacttggcaggggagctggaggagctggaggaggagcgcgctgcctgccagggctgccgtgcccggcgcccatgggagctgttccagcatcgggccctgaggagacaggtgacaagcctcgtggttctgggcagtgccatggagctctgcgggaatgactcggtgtacgcctacgcctcctccgtgttccggaaggcaggagtgccggaagcgaagatccagtacgcgatcatcgggactgggagctgcgagctgctcacggcggttgttagttgtgtggtaatcgagagggtgggtcggcgcgtgctgctcatcggtgggtacagcctgatgacctgctgggggagcatcttcactgtggccctgtgcctgcagagctccttcccctggacactctacctggccatggcctgcatctttgccttcatcctcagctttggcattggccctgccggagtgacggggatcctggccacagagctgtttgaccagatggccaggcctgctgcctgcatggtctgcggggcgctcatgtggatcatgctcatcctggtcggcctgggatttccctttatcatggaggccttgtcccacttcctctatgtccctttccttggtgtctgtgtctgtggggccatctacactggcctgttccttcctgagaccaaaggcaagaccttccaagagatctccaaggaattacacagactcaacttccccaggcgggcccagggccccacgtggaggagcctggaggttatccagtcaacagaactctagtcccaaaggggtggccag

SEQ ID NO: 183093 - DNA, 3219 bp, Homo sapiens
  Payload ID: 16074
  Gene Symbol: SLC2A11
  Gene Name: solute carrier family 2 (facilitated glucose transporter), member 11
  Uniprot ID: Q9BYW1
  ENST ID: ENST00000345044
  CDS Start-End: 269-1759
ctatgtttctgtgaccacaaatagcatctttggcaagtctagtttcagttggtctttgtccagctcctggattcctccatgcagggcctgagaagccctgagggataaaagattaatccggttcagtggactctgtggttcctcaactccaagtgcccccagcataagtcggacctgcctctcacgcaatggatcccctggcggcaacccgagaccggttctcctacccgcattccgccaagtctctcgctctgcccaggacgcacagatgagagcgctccgaagactgattcagggcaggatcctgctcctgaccatctgcgctgccggcattggtgggacttttcagtttggctataacctctctatcatcaatgccccgaccttgcacattcaggaattcaccaatgagacatggcaggcgcgtactggagagccactgcccgatcacctagtcctgcttatgtggtccctcatcgtgtctctgtatcccctgggaggcctctttggagcactgcttgcaggtcccttggccatcacgctgggaaggaagaagtccctcctggtgaataacatctttgtggtgtcagcagcaatcctgtttggattcagccgcaaagcaggctcctttgagatgatcatgctgggaagactgctcgtgggagtcaatgcaggtgtgagcatgaacatccagcccatgtacctgggggagagcgcccctaaggagctccgaggagctgtggccatgagctcagccatctttacggctctggggatcgtgatgggacaggtggtcggactcagggagctcctaggtggccctcaggcctggcccctgctgctggccagctgcctggtgcccggggcgctccagctcgcctccctgcctctgctccctgaaagcccgcgctacctcctcattgactgtggagacaccgaggcctgcctggcagcactacggcggctccggggctccggggacttggcaggggagctggaggagctggaggaggagcgcgctgcctgccagggctgccgtgcccggcgcccatgggagctgttccagcatcgggccctgaggagacaggtgacaagcctcgtggttctgggcagtgccatggagctctgcgggaatgactcggtgtacgcctacgcctcctccgtgttccggaaggcaggagtgccggaagcgaagatccagtacgcgatcatcgggactgggagctgcgagctgctcacggcggttgttagttgtgtggtaatcgagagggtgggtcggcgcgtgctgctcatcggtgggtacagcctgatgacctgctgggggagcatcttcactgtggccctgtgcctgcagagctccttcccctggacactctacctggccatggcctgcatctttgccttcatcctcagctttggcattggccctgccggagtgacggggatcctggccacagagctgtttgaccagatggccaggcctgctgcctgcatggtctgcggggcgctcatgtggatcatgctcatcctggtcggcctgggatttccctttatcatggaggccttgtcccacttcctctatgtccctttccttggtgtctgtgtctgtggggccatctacactggcctgttccttcctgagaccaaaggcaagaccttccaagagatctccaaggaattacacagactcaacttccccaggcgggcccagggccccacgtggaggagcctggaggttatccagtcaacagaactctagtcccaaaggggtggccagagccaaagccagctactgtcctgtcctctgcttcctgccagggccctggtcctcactccctcctgcattcctcatttaaggagtgtttattgagcaccctttgtgtgcagacatggctccaggtgcttagcaatcaatggtgagcgtggtattccaggctaaaggtaattaactgacagaaaatcagtaacaacataattacaggctggttgtggcagctcatgactgtaatcccagcactttgggaggccaaggtgggaggatcaattgaggccagagtttgaaaccagcctaggtaacatagtgagaccccctatctctacaaaaaattttaaacattagctgggcatggtggtatgtgctaacagctctagctactcaggaggctgaggcagcaggatcacttgagtccaagagttcaaggtagcagtaagctacaatcacaccactgcatgccagactgggtgacagagggagacttcatctctttaaaacataataataataattacagactcaggaaatgcagtgaaagaaaaatacaggttggccaggtgaggtggctgatgcctgtaatcccagcactttgggaggccaagatgggaagattgctttgagaccagaagtttgagaccagcctgggccacatagtaagatcctgtttctaccaaaaaaaaaaaaaaaaaaaattagctgggtgtggtggtacatgcctgtggtcccagctactcaggaggctgaaatgggaggatcacttgagcctgggaggtcgaggctgcagtgagtcctaattgagccactgcactccagcctggacaacagaaagagaccatgtttcaaaaaaaataaatacaggttgtagtgggtatgggtatgcataccaggaggcccgacctcgtctgagaggggagtggtcagaaaagaattttctgaggaattgatgtttttaatcaactttattgaggtataatttatacataaccaactgcatccattttaagtatatatttggcgagttttgagttctaagtatagttttggtgagtgtatacacttgggaaacaccaccgtgatcaagatggaacctttaccctaccccaaggcacccacatgcccatttgctatcagtaacccaccccagtcccagacctggggaaccactgacctgctttctgcctcaattggtcagatttgccttttttcagaatctgaagtcattccgtactgtatgtacacatttgtgtctggcttggctccagataaagtttttgggattcatgaatgttgttgcacgtattaggagagactcctttgtattgctgagtagtattcccctctgtggttagaccatgatttatttatccatctacctgttggtgaacattttggctgtttctaattcttggccatcatgaataaaactgctgtgaatgttcctacaa

SEQ ID NO: 183094 - DNA, 2388 bp, Homo sapiens
  Payload ID: 16074
  Gene Symbol: SLC2A11
  Gene Name: solute carrier family 2 (facilitated glucose transporter), member 11
  Uniprot ID: Q9BYW1
  ENST ID: ENST00000398356
  CDS Start-End: 190-1701
cggacctgcctctcacgcaatggatcccctggcggcaacccgagaccggttctcctacccgcattccgccaagtctctcgctctgcccaggacgcacagatgagagcgctccgaagactgagatgagcttggggcttagccgagtaaggagtgagcggcttttcagcctcagtgctgcggcagaggcggatggaggatgaactggagccgtccttacggcctcggacgcagattcagggcaggatcctgctcctgaccatctgcgctgccggcattggtgggacttttcagtttggctataacctctctatcatcaatgccccgaccttgcacattcaggaattcaccaatgagacatggcaggcgcgtactggagagccactgcccgatcacctagtcctgcttatgtggtccctcatcgtgtctctgtatcccctgggaggcctctttggagcactgcttgcaggtcccttggccatcacgctgggaaggaagaagtccctcctggtgaataacatctttgtggtgtcagcagcaatcctgtttggattcagccgcaaagcaggctcctttgagatgatcatgctgggaagactgctcgtgggagtcaatgcaggtgtgagcatgaacatccagcccatgtacctgggggagagcgcccctaaggagctccgaggagctgtggccatgagctcagccatctttacggctctggggatcgtgatgggacaggtggtcggactcagggagctcctaggtggccctcaggcctggcccctgctgctggccagctgcctggtgcccggggcgctccagctcgcctccctgcctctgctccctgaaagcccgcgctacctcctcattgactgtggagacaccgaggcctgcctggcagcactacggcggctccggggctccggggacttggcaggggagctggaggagctggaggaggagcgcgctgcctgccagggctgccgtgcccggcgcccatgggagctgttccagcatcgggccctgaggagacaggtgacaagcctcgtggttctgggcagtgccatggagctctgcgggaatgactcggtgtacgcctacgcctcctccgtgttccggaaggcaggagtgccggaagcgaagatccagtacgcgatcatcgggactgggagctgcgagctgctcacggcggttgttagttgtgtggtaatcgagagggtgggtcggcgcgtgctgctcatcggtgggtacagcctgatgacctgctgggggagcatcttcactgtggccctgtgcctgcagagctccttcccctggacactctacctggccatggcctgcatctttgccttcatcctcagctttggcattggccctgccggagtgacggggatcctggccacagagctgtttgaccagatggccaggcctgctgcctgcatggtctgcggggcgctcatgtggatcatgctcatcctggtcggcctgggatttccctttatcatggaggccttgtcccacttcctctatgtccctttccttggtgtctgtgtctgtggggccatctacactggcctgttccttcctgagaccaaaggcaagaccttccaagagatctccaaggaattacacagactcaacttccccaggcgggcccagggccccacgtggaggagcctggaggttatccagtcaacagaactctagtcccaaaggggtggccagagccaaagccagctactgtcctgtcctctgcttcctgccagggccctggtcctcactccctcctgcattcctcatttaaggagtgtttattgagcaccctttgtgtgcagacatggctccaggtgcttagcaatcaatggtgagcgtggtattccaggctaaaggtaattaactgacagaaaatcagtaacaacataattacaggctggttgtggcagctcatgactgtaatcccagcactttgggaggccaaggtgggaggatcaattgaggccagagtttgaaaccagcctaggtaacatagtgagaccccctatctctacaaaaaattttaaacattagctgggcatggtggtatgtgctaacagctctagctactcaggaggctgaggcagcaggatcacttgagtccaagagttcaaggtagcagtaagctacaatcacaccactgcatgccagactgggtgacagagggagacttcatctctttaaaacataataataataattacagactcaggaaatgcagtgaaagaaaaatacaggttggccaggtgaggtggctgatgcctgtaatcccagcactttgggaggccaagatgggaagattgctttgagaccagaagtttgagaccagcctgggccacatagtaagatcctgtttctacc

SEQ ID NO: 183095 - DNA, 730 bp, Homo sapiens
  Payload ID: 16074
  Gene Symbol: SLC2A11
  Gene Name: solute carrier family 2 (facilitated glucose transporter), member 11
  ENST ID: ENST00000405847
  CDS Start-End: 38-577
attccgccaagtctctcgctctgcccaggacgcacagatgagagcgctccgaagactgattcagggcaggatcctgctcctgaccatctgcgctgccggcattggtgggacttttcagtttggctataacctctctatcatcaatgccccgaccttgcacattcaggaattcaccaatgagacatggcaggcgcgtactggagagccactgcccgatcacctagtcctgcttatgtggtccctcatcgtgtctctgtatcccctgggaggcctctttggagcactgcttgcaggtcccttggccatcacgctgggaaggaagaagtccctcctggtgaataacatctttgtggtgtcagcagcaatcctgtttggattcagccgcaaagcaggctcctttgagatgatcatgctgggaagactgctcgtgggagtcaatgcaggtgtgagcatgaacatccagcccatgtacctgggggagagcgcccctaaggagctccgaggagctgtggccatgagctcagccatctttacggctctggggatcgtgatgggacaggtggtcggactcaggtaagcacccctcccccacatgcattgagtatttcggagataccagtaaaagcgtttcttcacctaaatgtctcccctacccactagtagattaaagcattattgctttgcatgaaggcatcgaatcctctatccacatctctgctgccaattcacg

SEQ ID NO: 183096 - DNA, 2748 bp, Homo sapiens
  Payload ID: 16074
  Gene Symbol: SLC2A11
  Gene Name: solute carrier family 2 (facilitated glucose transporter), member 11
  ENST ID: ENST00000405340
  CDS Start-End: 218-886
caggctgccggctcaccgcttgctaatggcagccggggtctccctgggacagcaagacctccgctcaggcccctctttcgaatgctccacgccctcctgcgatctagaatggtatgaattctcatacttgcccagaccaggcgtttcagatgagggattgcggacctgagtgaactgcgcaggtgcagccacctgggaggcttaactaagtcgtcaaatgttcaaaaatatcgtgcttattcagggcaggatcctgctcctgaccatctgcgctgccggcattggtgggacttttcagtttggctataacctctctatcatcaatgccccgaccttgcacattcaggaattcaccaatgagacatggcaggcgcgtactggagagccactgcccgatcacctagtcctgcttatgtggtccctcatcgtgtctctgtatcccctgggaggcctctttggagcactgcttgcaggtcccttggccatcacgctgggaaggaagaagtccctcctggtgaataacatctttgtggtgtcagcagcaatcctgtttggattcagccgcaaagcaggctcctttgagatgatcatgctgggaagactgctcgtgggagtcaatgcaggtgtgagcatgaacatccagcccatgtacctgggggagagcgcccctaaggagctccgaggagctgtggccatgagctcagccatctttacggctctggggatcgtgatgggacaggtggtcggactcaggtcagggagcaaagaacaggtcttcacagaggagagggtgaagatttgggctttcaaagacaaacgtgttccagtcattccagaaaaaagaggagaaggcagagcctggacccttgggaagaggagttgctagggatgaggtggggcagtggccctgtcctctcttggtcccaacctgggtgggagggatcttgatgttcagacccagacttggataggaagaggcacggggcaattgcagactccctgcagggaggtgtgtaggtgggcaggagagcagggtggtaggactctggcaaagaggcatctggcctggcctctcctctgcctccttagggagctcctaggtggccctcaggcctggcccctgctgctggccagctgcctggtgcccggggcgctccagctcgcctccctgcctctgctccctgaaagcccgcgctacctcctcattgactgtggagacaccgaggcctgcctggcagcactacggcggctccggggctccggggacttggcaggggagctggaggagctggaggaggagcgcgctgcctgccagggctgccgtgcccggcgcccatgggagctgttccagcatcgggccctgaggagacaggtgacaagcctcgtggttctgggcagtgccatggagctctgcgggaatgactcggtgtacgcctacgcctcctccgtgttccggaaggcaggagtgccggaagcgaagatccagtacgcgatcatcgggactgggagctgcgagctgctcacggcggttgttagttgtgtggtaatcgagagggtgggtcggcgcgtgctgctcatcggtgggtacagcctgatgacctgctgggggagcatcttcactgtggccctgtgcctgcagagctccttcccctggacactctacctggccatggcctgcatctttgccttcatcctcagctttggcattggccctgccggagtgacggggatcctggccacagagctgtttgaccagatggccaggcctgctgcctgcatggtctgcggggcgctcatgtggatcatgctcatcctggtcggcctgggatttccctttatcatggaggccttgtcccacttcctctatgtccctttccttggtgtctgtgtctgtggggccatctacactggcctgttccttcctgagaccaaaggcaagaccttccaagagatctccaaggaattacacagactcaacttccccaggcgggcccagggccccacgtggaggagcctggaggttatccagtcaacagaactctagtcccaaaggggtggccagagccaaagccagctactgtcctgtcctctgcttcctgccagggccctggtcctcactccctcctgcattcctcatttaaggagtgtttattgagcaccctttgtgtgcagacatggctccaggtgcttagcaatcaatggtgagcgtggtattccaggctaaaggtaattaactgacagaaaatcagtaacaacataattacaggctggttgtggcagctcatgactgtaatcccagcactttgggaggccaaggtgggaggatcaattgaggccagagtttgaaaccagcctaggtaacatagtgagaccccctatctctacaaaaaattttaaacattagctgggcatggtggtatgtgctaacagctctagctactcaggaggctgaggcagcaggatcacttgagtccaagagttcaaggtagcagtaagctacaatcacaccactgcatgccagactgggtgacagagggagacttcatctctttaaaacataataataataattacagactcaggaaatgcagtgaaagaaaaatacaggttggccaggtgaggtggctgatgcctgtaatcccagcactttgggaggccaagatgggaagattgctttgagaccagaagtttgagaccagcctgggccacatagtaagatcctgtttctaccaaaaaaaaaaaaaaaaa

SEQ ID NO: 183097 - DNA, 564 bp, Homo sapiens
  Payload ID: 16074
  Gene Symbol: SLC2A11
  Gene Name: solute carrier family 2 (facilitated glucose transporter), member 11
  ENST ID: ENST00000403208
  CDS Start-End: 109-423
agcataagtcggacctgcctctcacgcaatggatcccctggcggcaacccgagaccggttctcctacccgcattccgccaagtctctcgctctgcccaggacgcacagatgagagcgctccgaagactgattcagggcaggatcctgctcctgaccatctgcgctgccggcattggtgggacttttcagtttggctataacctctctatcatcaatgccccgaccttgcacattcaggaattcaccaatgagacatggcaggcgcgtactggagagccactgcccgatcacctagtcctgcttatgtggtccctcatcgtgtctctgtatcccctgggaggcctctttggagcactgcttgcaggtcccttggccatcacgctgggaaggcccacctctaaataccgttgcattggaaattaaatttcaacctgaattttggaagagacacaaaccttcaaaccatagcaccagcactggatcagcaagactggattagaccactgggctcatatctgcaccgtggggagtaggggaacagtcgcaaacaaaagtggggctctt

SEQ ID NO: 183098 - DNA, 559 bp, Homo sapiens
  Payload ID: 16074
  Gene Symbol: SLC2A11
  Gene Name: solute carrier family 2 (facilitated glucose transporter), member 11
  ENST ID: ENST00000418102
  CDS Start-End: 20-166
agtgctgcggcagaggcggatggaggatgaactggagccgtccttacggcctcggacgcagattcagggcaggatcctgctcctgaccatctgcgctgccggcattggtgggacttttcagtttggctataacctctctatcatcaatgccccgaccttgatttgatgagcttccaggttcatgaacacattgaggtgctgggaaggtggtgctcctggaggggacatggaagcctctagcaacctactctcccaggatcaggcccagtgcatctttcccatctggctattcatgagttgtatccttcataacaaaccagtaaatcacattcaggaattcaccaatgagacatggcaggcgcgtactggagagccactgcccgatcacctagtcctgcttatgtggtccctcatcgtgtctctgtatcccctgggaggcctctttggagcactgcttgcaggtcccttggccatcacgctgggaaggaagaagtccctcctggtgaataacatctttgtggtgtcagcagcaatcctgtttggattcagccgcaaagca

SEQ ID NO: 183099 - DNA, 683 bp, Homo sapiens
  Payload ID: 16074
  Gene Symbol: SLC2A11
  Gene Name: solute carrier family 2 (facilitated glucose transporter), member 11
  ENST ID: ENST00000436643
  CDS Start-End: 106-447
gcgcgctgcccttccctccgcgcacaggctgccggctcaccgcttgctaatggcagccggggtctccctgggacagcaagacctccgctcaggcccctctttcgaatgctccacgccctcctgcgatctagaatgattcagggcaggatcctgctcctgaccatctgcgctgccggcattggtgggacttttcagtttggctataacctctctatcatcaatgccccgaccttgcacattcaggaattcaccaatgagacatggcaggcgcgtactggagagccactgcccgatcacctagtcctgcttatgtggtccctcatcgtgtctctgtatcccctgggaggcctctttggagcactgcttgcaggtcccttggccatcacgctgggaagcctctctttctgtgtgtttcacttcccccaaggaagaagtccctcctggtgaataacatctttgtggtgtcagcagcaatcctgtttggattcagccgcaaagcaggctcctttgagatgatcatgctgggaagactgctcgtgggagtcaatgcaggtgtgagcatgaacatccagcccatgtacctgggggagagcgcccctaaggagctccgaggagctgtggccatgagctcagccatctttacggctctggggatcgtgatgggacaggtggtcggactcagg

SEQ ID NO: 183100 - DNA, 742 bp, Homo sapiens
  Payload ID: 16074
  Gene Symbol: SLC2A11
  Gene Name: solute carrier family 2 (facilitated glucose transporter), member 11
  ENST ID: ENST00000423972
  CDS Start-End: 74-391
gcagagatgagcttggggcttagccgagtaaggagtgagcggcttttcagcctcagtgctgcggcagaggcggatggaggatgaactggagccgtccttacggcctcggacgcagattcagggcaggatcctgctcctgaccatctgcgctgccggcattggtgggacttttcagtttggctataacctctctatcatcaatgccccgaccttgcacattcaggaattcaccaatgagacatggcaggcgcgtactggagagccactgcccgatcacctagtcctgcttatgtggtccctcatcgtgtctctgtatcccctgggaggcctctttggagcactgcttgcaggtcccttggccatcacgctgggaagaagtccctcctggtgaataacatctttgtggtgtcagcagcaatcctgtttggattcagccgcaaagcaggctcctttgagatgatcatgctgggaagactgctcgtgggagtcaatgcaggtgtgagcatgaacatccagcccatgtacctgggggagagcgcccctaaggagctccgaggagctgtggccatgagctcagccatctttacggctctggggatcgtgatgggacaggtggtcggactcaggtaagcacccctcccccacatgcattgagtatttcggagataccagtaaaagcgtttcttcacctaaatgtctcccctacccactagtagattaaagcattattgctttgcatgaa

SEQ ID NO: 183101 - DNA, 3264 bp, Homo sapiens
  Payload ID: 16074
  Gene Symbol: SLC2A11
  Gene Name: solute carrier family 2 (facilitated glucose transporter), member 11
  ENST ID: ENST00000618114
  CDS Start-End: 491-2098
atctttcggtctttcctaattttcccgtcctctggggaaaggtcggggatacctgaaccaaagtgtgtgtgtgtgggggggggggggtgtaggtggggcgtgcatagatgtgcacaaccaagggcttggccctccggagaacgcccaggggcagtggcctccgaggttctggcggccggcagtggcgaccggcgcagggaatcgcgcagggttgcggctgaggtcagaccagcgagagacagagacccgcagacatttagtccagagactgtagcaaaggagggggacgaggggccagagccggaatttcgggggaggacttgggagcgcggcgaccagagtcgcttgctggcacttgcgagggcgaatgcaggggcttggccgagatgaccttggaccagagctcccttccggcctgcagagatgagcttggggcttagccgagtaaggagtgagcggcttttcagcctcagtgctgcggcagaggcggatggaggatgaactggagccgtccttacggcctcggacgcagattcagggcaggatcctgctcctgaccatctgcgctgccggcattggtgggacttttcagtttggctataacctctctatcatcaatgccccgaccttgcacattcaggaattcaccaatgagacatggcaggcgcgtactggagagccactgcccgatcacctagtcctgcttatgtggtccctcatcgtgtctctgtatcccctgggaggcctctttggagcactgcttgcaggtcccttggccatcacgctgggaaggaagaagtccctcctggtgaataacatctttgtggtgtcagcagcaatcctgtttggattcagccgcaaagcaggctcctttgagatgatcatgctgggaagactgctcgtgggagtcaatgcaggtgtgagcatgaacatccagcccatgtacctgggggagagcgcccctaaggagctccgaggagctgtggccatgagctcagccatctttacggctctggggatcgtgatgggacaggtggtcggactcagggagctcctaggtggccctcaggcctggcccctgctgctggccagctgcctggtgcccggggcgctccagctcgcctccctgcctctgctccctgaaagcccgcgctacctcctcattgactgtggagacaccgaggcctgcctggcagcactacggcggctccggggctccggggacttggcaggggagctggaggagctggaggaggagcgcgctgcctgccagggctgccgtgcccggcgcccatgggagctgttccagcatcgggccctgaggagacaggtgacaagcctcgtggttctgggcagtgccatggagctctgcgggaatgactcggtgtacgcctacgcctcctccgtgttccggaaggcaggagtgccggaagcgaagatccagtacgcgatcatcgggactgggagctgcgagctgctcacggcggttgttagtgtagctggggtggatgagggctggggggtccaggccgggctgacttccacctcacccccgccccgtccacggcagagctccttcccctggacactctacctggccatggcctgcatctttgccttcatcctcagctttggcattggccctgccggagtgacggggatcctggccacagagctgtttgaccagatggccaggcctgctgcctgcatggtctgcggggcgctcatgtggatcatgctcatcctggtcggcctgggatttccctttatcatggtcttggggtcttttttaatccgcaggaggccttgtcccacttcctctatgtccctttccttggtgtctgtgtctgtggggccatctacactggcctgttccttcctgagaccaaaggcaagaccttccaagagatctccaaggaattacacagactcaacttccccaggcgggcccagggccccacgtggaggagcctggaggttatccagtcaacagaactctagtcccaaaggggtggccagagccaaagccagctactgtcctgtcctctgcttcctgccagggccctggtcctcactccctcctgcattcctcatttaaggagtgtttattgagcaccctttgtgtgcagacatggctccaggtgcttagcaatcaatggtgagcgtggtattccaggctaaaggtaattaactgacagaaaatcagtaacaacataattacaggctggttgtggcagctcatgactgtaatcccagcactttgggaggccaaggtgggaggatcaattgaggccagagtttgaaaccagcctaggtaacatagtgagaccccctatctctacaaaaaattttaaacattagctgggcatggtggtatgtgctaacagctctagctactcaggaggctgaggcagcaggatcacttgagtccaagagttcaaggtagcagtaagctacaatcacaccactgcatgccagactgggtgacagagggagacttcatctctttaaaacataataataataattacagactcaggaaatgcagtgaaagaaaaatacaggttggccaggtgaggtggctgatgcctgtaatcccagcactttgggaggccaagatgggaagattgctttgagaccagaagtttgagaccagcctgggccacatagtaagatcctgtttctaccaaaaaaaaaaaaaaaaaaaattagctgggtgtggtggtacatgcctgtggtcccagctactcaggaggctgaaatgggaggatcacttgagcctgggaggtcgaggctgcagtgagtcctaattgagccactgcactccagcctggacaacagaaagagaccatgtttcaaaaaaaataaatacaggttgtagtgggtatgggtatgcataccaggaggcccgacctcgtctgagaggggagtggtcagaaaagaattttctgaggaattgatgtttttaatcaactttattgaggtataatttatacataaccaactgcatccattttaagtatatatttggcgagttttgagttctaagtatagttttggtgagtgtatacacttgggaaacaccaccgtgatcaagatggaacctttaccctaccccaaggcacccacatgcccatttgctatcagtaacccaccccagtcccagacctggggaaccactgacctgctttctgcctcaattggtcagatttgccttttttcagaatctgaagtcattccgtactgtatgtacacatttgtgtc

SEQ ID NO: 183102 - DNA, 2748 bp, Homo sapiens; identical to SEQ ID NO: 183096
  Payload ID: 16074
  Gene Symbol: SLC2A11
  Gene Name: solute carrier family 2 (facilitated glucose transporter), member 11
  ENST ID: ENST00000619667
  CDS Start-End: 218-886

SEQ ID NO: 183103 - DNA, 2388 bp, Homo sapiens; identical to SEQ ID NO: 183094
  Payload ID: 16074
  Gene Symbol: SLC2A11
  Gene Name: solute carrier family 2 (facilitated glucose transporter), member 11
  Uniprot ID: Q9BYW1
  ENST ID: ENST00000619254
  CDS Start-End: 190-1701

SEQ ID NO: 183104 - DNA, 3219 bp, Homo sapiens; identical to SEQ ID NO: 183093
  Payload ID: 16074
  Gene Symbol: SLC2A11
  Gene Name: solute carrier family 2 (facilitated glucose transporter), member 11
  Uniprot ID: Q9BYW1
  ENST ID: ENST00000618502
  CDS Start-End: 269-1759

SEQ ID NO: 183105 - DNA, 3264 bp, Homo sapiens; identical to SEQ ID NO: 183101
  Payload ID: 16074
  Gene Symbol: SLC2A11
  Gene Name: solute carrier family 2 (facilitated glucose transporter), member 11
  ENST ID: ENST00000611880
  CDS Start-End: 491-2098

SEQ ID NO: 183106 - DNA, 1555 bp, Homo sapiens; identical to SEQ ID NO: 183092
  Payload ID: 16074
  Gene Symbol: SLC2A11
  Gene Name: solute carrier family 2 (facilitated glucose transporter), member 11
  Uniprot ID: Q9BYW1
  ENST ID: ENST00000620942
  CDS Start-End: 38-1537

SEQ ID NO: 183107 - DNA, 742 bp, Homo sapiens; identical to SEQ ID NO: 183100
  Payload ID: 16074
  Gene Symbol: SLC2A11
  Gene Name: solute carrier family 2 (facilitated glucose transporter), member 11
  ENST ID: ENST00000625546
  CDS Start-End: 74-391

SEQ ID NO: 183108 - DNA, 730 bp, Homo sapiens; identical to SEQ ID NO: 183095
  Payload ID: 16074
  Gene Symbol: SLC2A11
  Gene Name: solute carrier family 2 (facilitated glucose transporter), member 11
  ENST ID: ENST00000628119
  CDS Start-End: 38-577

SEQ ID NO: 183109 - DNA, 683 bp, Homo sapiens; identical to SEQ ID NO: 183099
  Payload ID: 16074
  Gene Symbol: SLC2A11
  Gene Name: solute carrier family 2 (facilitated glucose transporter), member 11
  ENST ID: ENST00000627257
  CDS Start-End: 106-447

SEQ ID NO: 183110 - DNA, 559 bp, Homo sapiens; identical to SEQ ID NO: 183098
  Payload ID: 16074
  Gene Symbol: SLC2A11
  Gene Name: solute carrier family 2 (facilitated glucose transporter), member 11
  ENST ID: ENST00000630108
  CDS Start-End: 20-166

SEQ ID NO: 183111 - DNA, 1436 bp, Homo sapiens; identical to SEQ ID NO: 183091
  Payload ID: 16074
  Gene Symbol: SLC2A11
  Gene Name: solute carrier family 2 (facilitated glucose transporter), member 11
  ENST ID: ENST00000630215
  CDS Start-End: 15-311

SEQ ID NO: 183112 - DNA, 4468 bp, Homo sapiens
  Payload ID: 16075
  Gene Symbol: SLC2A12
  Gene Name: solute carrier family 2 (facilitated glucose transporter), member 12
  Uniprot ID: Q8TD20
  ENST ID: ENST00000275230
  CDS Start-End: 157-2010
agaaacaaagttggtcacaaatcacattagctttgcccgaagtttttccccacactcttctttagcatgctattatggggaaagtgaccactcctgggagcgggggtggtcggggcggtttggtggcggggaagcggctgtaacttctacgtgaccatggtacctgttgaaaacaccgagggccccagtctgctgaaccagaaggggacagccgtggagacggagggcagcggcagccggcatcctccctgggcgagaggctgcggcatgtttaccttcctgtcatctgtcactgctgctgtcagtggcctcctggtgggttatgaacttgggatcatctctggggctcttcttcagatcaaaaccttattagccctgagctgccatgagcaggaaatggttgtgagctccctcgtcattggagccctccttgcctcactcaccggaggggtcctgatagacagatatggaagaaggacagcaatcatcttgtcatcctgcctgcttggactcggaagcttagtcttgatcctcagtttatcctacacggttcttatagtgggacgcattgccataggggtctccatctccctctcttccattgccacttgtgtttacatcgcagagattgctcctcaacacagaagaggccttcttgtgtcactgaatgagctgatgattgtcatcggcattctttctgcctatatttcaaattacgcatttgccaatgttttccatggctggaagtacatgtttggtcttgtgattcccttgggagttttgcaagcaattgcaatgtattttcttcctccaagccctcggtttctggtgatgaaaggacaagagggagctgctagcaaggttcttggaaggttaagagcactctcagatacaactgaggaactcactgtgatcaaatcctccctgaaagatgaatatcagtacagtttttgggatctgtttcgttcaaaagacaacatgcggacccgaataatgataggactaacactagtattttttgtacaaatcactggccaaccaaacatattgttctatgcatcaactgttttgaagtcagttggatttcaaagcaatgaggcagctagcctcgcctccactggggttggagtcgtcaaggtcattagcaccatccctgccactcttcttgtagaccatgtcggcagcaaaacattcctctgcattggctcctctgtgatggcagcttcgttggtgaccatgggcatcgtaaatctcaacatccacatgaacttcacccatatctgcagaagccacaattctatcaaccagtccttggatgagtctgtgatttatggaccaggaaacctgtcaaccaacaacaatactctcagagaccacttcaaagggatttcttcccatagcagaagctcactcatgcccctgagaaatgatgtggataagagaggggagacgacctcagcatccttgctaaatgctggattaagccacactgaataccagatagtcacagaccctggggacgtcccagcttttttgaaatggctgtccttagccagcttgcttgtttatgttgctgctttttcaattggtctaggaccaatgccctggctggtgctcagcgagatctttcctggtgggatcagaggacgagccatggctttaacttctagcatgaactggggcatcaatctcctcatctcgctgacatttttgactgtaactgatcttattggcctgccatgggtgtgctttatatatacaatcatgagtctagcatccctgctttttgttgttatgtttatacctgagacaaagggatgctctttggaacaaatatcaatggagctagcaaaagtgaactatgtgaaaaacaacatttgttttatgagtcatcaccaagaagaattagtgccaaaacagcctcaaaaaagaaaaccccaggagcagctcttggagtgtaacaagctgtgtggtaggggccaatccaggcagctttctccagagacctaatggcctcaacaccttctgaacgtggatagtgccagaacacttaggagggtgtctttggaccaatgcatagttgcgactcctgtgctctcttttcagtgtcatggaactggttttgaagagacactctgaaatgataaagacagcctttaatccccctcctccccagaaggaacctcaaaaggtagatgaggtacaaggtcctaagtgatctctttttctgagcaggatatcaggttaaaaaaaaaaagttactggctggtttaatactttctaccttcttcacagagcagcctttgaatagactatgtcctagtgaagacatcaacctccgccttaagctatgtatgtatggaggccagtcgcagctttattatgcagacacacaagtggtctggacatgagggtacagtttctgcctaccaagacactacttgcactggatcttacgcaaaaaagaaccagaacacacagtgtggacaactgcccatatattctatctagattaggagagggtcctggctaggattttagtggtaattcctagttacattcaacaagtataaagattatagagcttattttatgaactataaactataatttaatgcaaaatatccttttatgaatttcatgttaatattgtgaaatattaaaataattccacaatagttgagaaaaatgagcatttttttccatttttaaaaaatgcatagaaaagacaattttaaaatcctgggaccatatttatttagaagtagctgttagtaaaacattagaaaaggagtcaggccattaggttatttatccaaatctctaagcaattaggttgaagttattaagtcaagcctagaaaagctgcctccttgtaaggctttcatgacaatgtatagtaatccacagtgtccaattcttcacactcctcaggaatatcactacctcaggttacggtacacaggctataattgatgatgatgttcagataactgaagacacaataaatgacattcagacatcaggacaattccctcatgttcttttctatgatggccacctgtaccagcaacgtgggtttcacccacacaacgatgaactgttctcttacttctccagttgattttaaagacttgttaagaggtcttactaataaaatttgggtatgatagaaaatccacaatcaaatcttgaaccaaataacatattaaattactaatatttaagtgatggaagacacacaaaaaacttaaaagcacgaacaacctaacttgaaaaagaattttaaaatatgattaacctgaagaaaagagaatcctaagagccaaagctcctttttatttagcttggaattttcctattggttcctaacaaactgtcccaatgtcatataaggaaacatgatctattacattcctttataacaatgtggagagactataaacctatgtaagtagtaaaactatatcagagactcaggagactgactaaaaggcctggatctgcagtgtattatctgtataaaaattggcagggggaagctaaaaggaaaggagattggagatctcaattctatcatggtgtatttcatacgcaaatcagagcatgcattgttttttgtttttggaaagagaagggaagtgtgttctgccccatgtttccttccgtgtttatagttcaaactctatatatacttcaggtattttttgtttagcccttcattataaatgggcaggaaattgtttatcaacctagccagtttattactagtgaccttgacttcagtatcttgagcattcttttatatttttcttttattatcctgagtctgtaactaaacaattttgtcttcaaatttttatccaatatccattgcaccacaccaaatcaagcttcttgattttcaaaaataaaaagggggaaatacttacaacttgtacatatatattcacagtttttatttataaaaaaaatttacagtacttatggagagccagcagaagacatcagagcactcacttcttcccatctttgttaaggttagcgaattacccatggacactgttaggtgaggctcattcggcagccctgaaaacaaacctggtcacactgtctttaccctctcccttcagataaagcacttcgattatctattgatctgcccagttttcaagtcatgcgaatactaaaaaggttacatcatctggatctgtaccttggctatataagcatgttttccccctattctatgtttctttttttggtgaacattgaaaaacaggaggtgacttattactgttaattaaaactaaatgaaaaatgtcaagtctttaaaacagtgagcttgtaactctttcatgtaattttattctctatgaatttggctatcctactgaatcttaaaataaaggaaataaacactttttttttaaaaaaaaggaaaaatacaagtctaaaaatctcaatg

SEQ ID NO: 183113 - DNA, 7003 bp, Homo sapiens
  Payload ID: 16076
  Gene Symbol: SLC2A13
  Gene Name: solute carrier family 2 (facilitated glucose transporter), member 13
  Uniprot ID: Q96QE2
  ENST ID: ENST00000280871
  CDS Start-End: 52-1998
ctgccggcccgcggagccgcgtccccccgggcagccccgggcccctgccctatgtcccgcaaggcaagcgagaatgtggagtacacgctgcggagcctgagcagcctgatgggcgagcggcgcaggaagcagccggagccggacgcggcgagcgcggccggggagtgcagcctcctggctgccgccgaatcgagcaccagcctgcagagcgcgggcgcgggcggcggcggcgtcggggacctggagcgcgcggcgcggcggcagttccagcaggacgagacccccgccttcgtgtacgtggtggccgtcttctccgcgctgggcggcttcctgtttggctatgacaccggggtggtgtcaggggccatgctgctgctcaagcggcagctcagtctggacgcgctgtggcaggagctgctggtgtccagcacggtgggggcggctgccgtctcggcgctggccggaggcgccctcaacggcgtcttcggccgccgcgctgccatcctcctggccagtgccctcttcaccgccggctccgcggtgctggctgcggccaacaacaaggagacactgctcgccggccgcctggtcgtgggactcggcatcggcattgcttctatgacagtgccagtgtacattgcggaggtctcaccacccaatttaagaggccgattagtcaccattaataccctcttcatcacaggagggcagttctttgcaagtgttgttgatggagccttcagttatctccagaaggatggatggaggtacatgttgggacttgcagcagttccggcggttatacagttttttggctttctctttttgcctgaaagccctcgatggcttattcagaaaggacagactcagaaggcccgtagaattttatctcagatgcgtggtaaccagaccattgatgaggaatatgatagcatcaaaaacaacattgaagaggaggaaaaagaggttggctcagctggacctgtgatctgcagaatgctgagttatcccccaactcgccgagctttaattgtgggttgtggcctacaaatgttccagcagctctcaggcattaacaccatcatgtactacagtgcaaccattctgcagatgtctggtgttgaagatgatagacttgcaatatggctggcttcagttacagccttcacaaatttcattttcacacttgtgggagtctggcttgttgagaaggtgggccgcagaaagcttacctttggtagtttagcaggtaccaccgtagcactcattattcttgccttgggatttgtgctatcagcccaagtttccccacgcatcacttttaagccaatagctccgtcaggtcagaacgccacttgcacaagatacagttactgtaatgaatgtatgttggatccagactgcggtttctgctacaagatgaacaaatcaactgtcattgactcctcctgtgttccagttaataaagcatctacaaatgaggcagcctggggcaggtgtgaaaatgaaaccaagttcaaaacagaagatatattttgggcttacaatttctgccctactccatactcctggactgcacttctgggccttattttatatcttgtcttctttgcacctggaatgggaccaatgccttggactgtgaattctgaaatatatcccctttgggcaagaagtacaggaaatgcatgttcatctggaataaactggattttcaatgtcctggtttcactaacatttttacacacagcagagtatcttacatactatggagctttcttcctctatgctggatttgctgctgtgggactccttttcatctatggctgtcttcctgagaccaaaggcaaaaaattagaggaaattgaatcactctttgacaacaggctatgtacatgtggcacttcagattctgatgaagggagatatattgaatatattcgggtaaagggaagtaactatcatctttctgacaatgatgcttctgatgtggaataattttcagctgctcatatatttagttatttaaacaaactggggggagaagaacagcaattggtgacttcactgccctgcttctaatctggttctttccacagcctagttttgattgacttcatattctagaatacttgattaggaggaagatacaaccatgatgactttttttttccacaaggaacaatattttaaaaaatatttacagagattttaatctaataattcttaagcaaatgtgtgtaatgccttcctgaaatagtctaaaatgaatattgtacccagtgacttcagtggtatccttttttcctaagaccatttataattattagtggcaacagagtcagtgctaatctagccaaattacatatgtataatatatttataaaggattctgggagatggtccaagggtgttctgtgtcaaaagatggcctattggccctcagttttcctacagagtagtggcttatctctgatcagctgttacaaactaaattccatgtaagctttcatcaacaaattccaaagtgcctcctacaagggcacagctgtccgtatctcctttggattccatatttttgtttctctccaattcagatattgggagttcttcagatactgactctgcacactatcttttgaacattatgaaaatataatctgtcgggttgttttcatacttcttttttttgcatcagtgataaggcatacatttgcgcagatgagctaggaagttttgagaagtaccttttatgttcagaaagtaacagattaaaggtttttatgggttccaaattggttagtcacttaggtatgcaattataaatgcaaaatagtgccagatctttaactgtatatcagggtcagtttttgttcatgcccaaatcactacaccttcctcattggccttggagtcctactatttcgtgccttcatttgtgttacatacatagctgcaagcaaaccatttttcccctttcttttattcaaacaataatttttgaaacaaaaaagaggaaggaaatcagtggcagaaataatcctgctgttattggtgtttgtttaataaaaataatgggacttttttcttaactttttattagctcttcctaagggaaatgtcacatattattatttaattgtacttgtctttttttactttaagagcataaactcgtttttattttgcacacttttctcattttcctgagaatttaccagaaaaaaaaaagatacatagatttgtctctgtgtttttcttattcttggcttagtttttccttcttgtgtaaaaattgagattgcctattggaacagataattggttctaatatagcacgtctataagaaatgcaggcttaattatatttccacaatgtctttccaaggtattcattggtttttatggtaattcatcactgaactcttaatttttgcttttctattaagaactatatagtatgtacaaaattacttgatcacaaaattacttgctagttccaggaaaaatatgaatgaatcttctgtggccagttaggaatacatcagtttgatgcatttttaaatggctctaaacatctaataaggtactgtatttggagagaaaaggtggctatctccatattcaaaatatttcttccagtctccaagatactctattcttttaatgtctggcttgttcctatcacagttatcaagctgagaatacagctgaggaagttcattctctaagtcaccagaggtataatatgtgcttaaactgtcaatttagtgccctaaaaatccattaaccaaaaacaaaaacgttttctccctttggtcatttcatataataaaaaaaattaatattttatagaggttttttccttgaattaggtgctttaacaattgatttccaagggaatattagtattgattttttcctcagaaaagcagatatgatttaatagggaaaattattattctattgatatttcttatctcataagaaatttcttatctaatattttacacaggtaaattgaagtgaaaaataagctactatatggtacaatcaaaatataataaggagaaaaagtagaccaataaagtgctctctaaaaatttattttttggacttaatcaaaataattgcctcaatccttctctttattgtatatgtagccttaactaactatatacttataaactcagctgggctgatgcacagtaactttattaaaggagaaactggactcttgttatttcctaaagcagaacatggcctgttctccctgatataagaaaacaatgttttcaactttataaccataaatgcacataataacagggaaaattagccacagttctcctcccctactcccctgagcccctactttaaaggactatttgttatttatatagtgttaaagataatattccatatctttgaagtataagacagagaggcacagtataagaattatttataactttttagaaacaattacttgaaaaggaaccttatacaattagggtattatttttagatttggtgaacatttatagtatattaaaaattaaatgtttaaattttgcaggtttttttatattaggcaccttttaagttcccagcatatttggctaccactatcaacttggaaacattccatttgtagtatcatcaaatatatattttgtaggacaatttatatatgatgtgatttgacctaccatattaaagcagacacagattacgtatcatgctttcaaccaaaattacagacttcctttgaaacatgctgcagatttgatagaggtatattatgtcttaggaaaatacaatgaagaaggtccaaatccctattgaggctggatgtctgatctgcactagacttaagaggatatatcatttcatctgcatataaacacatagggctgaatgtgatgtcaaaagggtttgccgttaataattttcttcaatgtaaacattcctaataattttgattgttgctccttagtcaatcatttcccaaaacatgattatttttaatatatgtaaaatatttaaataataaataataaaaggtaatgtgtccattttaaattttgttcccagccatacacagtagttccctgatacaaaatgctatgagaataccgactattttttcataatttaattttaccactgaacctgattttagtacataagagtctaaatattaagttattcactctaaaaggggaaatcagtaaaagcaaggaatttatgaaatttttgctgtaatttcagtatctgttatacaggggaagaatgatcaggaaaaatataagctgacaacttacccttttgctttttaacaacaaaataatattgaaaatatattagaataactcacagatccagaagttggtggaaatggaagaatgttttagaaaataccatccatatgtttatctaagaaagtctcagaatttagtgacactaatacagttcataaatactgtaatacagtggagagagttggaatgttattttggttttatttcatcagcacaattattaaaaacaacaaaattaatgagacgttttgttataatcagatttttttttaccatattgcaagttataaaatgtcaacttatactaagtacctaacaactgacttttattcacttgttgtgacaagtttttaattaccaaattaagaccttttcagtatctatgagtaaaagaaatagatgattatatcagaccaggagcagagaatttataatatgtgctttatagcaaaatgtattaaattgtggttaaaatttatagctcatatgtagctgctgccaataagaaggctcagaattgttctgtggattaatttttacatcctgttttctgtcacttttaccaatcttcttggcctcatgtacaataatgtaaagccaatttgatgaaatggttcaggttgtagcagtctataaattgtcggtacattcagctcttctaggtgagcaatactgctgctatttttctagaaatagcaatcatttaaaaatgccaaatagctaactgctaccaactctttcttgtatcttgtctctttagagaaggaaatttttgtgtgccagtaatcatcaaagaggtgttttataagagtgttgatgttcagaagttcatgaaagtattttatccgtataatttgctagtgagctaaaacaatataatttatgtaaatctttatatgtacaaaatatatagtctgttgtacttgagtaatttggtctatggaattttaaatgccttcatttagcagtaatattcacatttttattttagacagttaagttcatgtgtttgattttgtcatgtcagcataaatgagaaaaagaagtggatcatgcagctaatgagtaaccaacattttgtaaagttttaaagttttagcaaacaacattattccatctcatttaaaggttaaaaaagaagagacaactctagccaaagtagaaatttatattctacacgtccaaactgtctcctagcagcttttggactatatatcacttgatgttaaagtatcttttatttgtaataaatattcaaatttctatttagaagctctaatgtatacctagattaaatcaaatcacagttttatgcttttaaaatatatgtatttcaaactgtatattttaatttctgagtgcatgttatatagtatttaatacttcagatgtcttggcaaattcaatataagtatttattcccacaagcgatatatgggatatctcttaaaaattatgaatatgtaccatttccttcaaagtcatcctagcctatgctgtatcaaaagtattgtatattttatggagatttagtgatatacatgtaaatgttttttaagttattttattgaagttcaatctttacataaaattaaaatctttttttaaaaaaagtgtcagtgccagaactgtaaatgaaaataatcaaataaaagttaaaataattcattactcattaa

SEQ ID NO: 183114 - DNA, 3082 bp, Homo sapiens
  Payload ID: 16076
  Gene Symbol: SLC2A13
  Gene Name: solute carrier family 2 (facilitated glucose transporter), member 13
  ENST ID: ENST00000380858
  CDS Start-End: 282-1355
cgcctcccgcccgctccgcagcgccagctcggcaggcgcggggcgtgagtgtggagtgagacccgccgggctccaactccgcagcgtcggagcgcggcgggcagcaactttctccccggagcggccgtggcggcggctgctgccgtggcagccggagcggaagccgggaggaagaaagcggcggcagcggcggttgctcccgccggctcgggctgtctagctcgccgagactgccggcccgcggagccgcgtccccccgggcagccccgggcccctgccctatgtcccgcaaggcaagcgagaatgtggagtacacgctgcggagcctgagcagcctgatgggcgagcggcgcaggaagcagccggagccggacgcggcgagcgcggccggggagtgcagcctcctggctgccgccgaatcgagcaccagcctgcagagcgcgggcgcgggcggcggcggcgtcggggacctggagcgcgcggcgcggcggcagttccagcaggacgagacccccgccttcgtgtacgtggtggccgtcttctccgcgctgggcggcttcctgtttggctatgacaccggggtggtgtcaggggccatgctgctgctcaagcggcagctcagtctggacgcgctgtggcaggagctgctggtgtccagcacggtgggggcggctgccgtctcggcgctggccggaggcgccctcaacggcgtcttcggccgccgcgctgccatcctcctggccagtgccctcttcaccgccggctccgcggtgctggctgcggccaacaacaaggagacactgctcgccggccgcctggtcgtgggactcggcatcggcattgcttctatgacagtgccagtgtacattgcggaggtctcaccacccaatttaagaggccgattagtcaccattaataccctcttcatcacaggagggcagttctttgcaagtgttgttgatggagccttcagttatctccagaaggatggatggaggtacatgttgggacttgcagcagttccggcggttatacagttttttggctttctctttttgcctgaaagccctcgatggcttattcagaaaggacagactcagaaggcccgtagaattttatctcagatgcgtggtaaccagaccattgatgaggaatatgatagcatcaaaaacaacattgaagaggaggaaaaagaggttggctcagctggacctgtgatctgcagaatgctgagttatcccccaactcgccgagctttaattgtgggttgtggcctacaaatgttccagcagctctcaggcattaacaccatcatgtatgtatttctttctggctttttactgaaaagattgtgaaaggattattttatgtgaaatagtgaaaagtatttcatgtaaatactagactcagtgatttgttctgattaaatgtatgaattctccttttgggagatactgactttacaattttttaattccagtaatttgttactagataaaggtgatttattttgtttgttatatgattggctttatttgattccataaaatttctcttttacgccatccaatacctccttgtattctgagcttaaatgtgtcattttttctaagccatttcttgatgctggttggaaagcaaaatagaaggaaatcacctggcattgccagagattatgggcacacagataactaattcatttctttttggtgcagtctactacagtgcaatgtgataaggacattagtagaagtacgtttattataaccagagtatggtagaggggagattgagtgggaaggagagtgaggaatacagaaaaattccctgttctctaattttaagagtaattcccaaagctgtatgtgtgctgagggtgggaaggactaaatattaagggctctactaggtttccctcattcagtattaaacccatttttgagggcctctgttgcactagacctacagcagtaactaaaatagacctgggtcttgtcctcatggatgtacaggctggtagaggaagcacacattaaataaactcacagttaaatataagatttcaaactatgataagggccatacaggactctctcaattctctacagagtagacttttaagatcctaaatcataaaatacagtttagagaaggttatgtgctttcccagggcacatattgttagattaaaagctgccacatcttagaagtcctccccactccctgcctattgattgaatttttttcattaagaaaatacaaattatgtaaaattaaattttctttggtaaaccatttgtatttgagactcttgattttttttaattacttgagatatgatgagttatttagtgactgtttgagaagagtgaattgattaaaatatttttaaaaaagaaggattaggacccaatgagccagtatattaaatcaagatttgttgagaaactccattttctatacattcacacactttgtggatttgactttaatcataatccctgttgaacttcaactttcgagactacatgttcaatattttgttctctcctgcttctctctgacattaactttcattttttctcacctttaccagctctattaaggcccatctgttggtctagtgccaggcacgtttgattgcttgttctctgaatttggcacatcatgacttgttctgagatgtgtccaccttctgcagtctggtggaagtatagaattgcagctaggctaggaccaagcatcaaataattaaatccattaataatcctatgtgaattcgttagttgaccaacctaatatttgttctggttttgaaaatatgttttgtttgttatgctttttttcctaagcatttaaacttgacaagtataaaagcatagaaagtgaaggatttttcttgtactttttttgttttcacttaaaactggtatcacaaacagagccaactctagtttatgggtagtgactggggccagtgtattcctagtttgaaatgactgtcataatccattagcagtagctagtgtaaattgagctgattgatgctgtcaaattttaataaaacattcatttctccaaa

SEQ ID NO: 183115 - DNA, 3699 bp, Homo sapiens
  Payload ID: 16077
  Gene Symbol: SLC2A14
  Gene Name: solute carrier family 2 (facilitated glucose transporter), member 14
  Uniprot ID: Q8TDB8
  ENST ID: ENST00000340749
  CDS Start-End: 402-1895
gttgagcgaagccgcggggcccaaccgcagtcgcggggtctgggagccctctattggagattctgcctcccctgggacagatggcttcttgagcacactcccacgatgggtggctgctctgggtattcatccatggggttcttccgcggtgaagccagcttgtcgtgctgtcccccttgtcattgaagccatcatggttctggtcaatcatgttgaaagcctccttaaactcctggatgtggaactggtcgaacatcacgaagacattggatgtggccccttgtgctgtggtcgcttcttggtggtcttggctttggtccacttgctgaacattttggcttcaggaagcagtaccttgaagagaaattggagagggagtcaattcctaggatagcagagagatggacaacagacagaatgtcaccccagctctgatctttgccatcacagttgctacaatcggctctttccagtttggctacaacactggggtcatcaatgctcctgagacgatcataaaggaatttatcaataaaactttgacggacaaggcaaatgcccctccctctgaggtgctgctcacgaatctctggtccttgtctgtggccatattttccgtcgggggtatgatcggctccttttccgtcggactctttgttaaccgctttggcaggcgcaattcaatgctgattgtcaacctgttggctgccactggtggctgccttatgggactgtgtaaaatagctgagtcagttgaaatgctgatcctgggccgcttggttattggcctcttctgcggactctgcacaggttttgtgcccatgtacattggagagatctcgcctactgccctgaggggtgcctttggcactctcaaccagctgggcatagttattggaattctggtggcccagatctttggtctggaactcatccttgggtctgaagagctatggccggtgctattaggctttaccatccttccagctatcctgcaaagtgcagcccttccatgttgccctgaaagtcccagatttttgctcattaacagaaaaaaagaggagaatgctacgcggatcctccagcggttgtggggcacccaggatgtatcccaagacatccaggagatgaaagatgagagtgcaaggatgtcacaagaaaagcaagtcaccgtgctggagctctttagagtgtccagctaccgacagcccatcatcatttccattgtgctccagctctctcagcagctctctgggatcaatgctgtgttctattactcaacaggaatcttcaaggatgcaggtgttcaacagcccatctatgccaccatcagcgcgggtgtggttaatactatcttcactttactttctctatttctggtggaaagggcaggaagaaggactctgcatatgataggccttggagggatggctttttgttccacgctcatgactgtttctttgttattaaagaatcactataatgggatgagctttgtctgtattggggctatcttggtctttgtggcctgttttgaaattggaccaggccccattccctggtttattgtggccgaactcttcagccagggcccccgcccagctgcgatggcagtggccggctgctccaactggacctccaacttcctagtcggattgctcttcccctctgctgcttactatttaggagcctacgtttttattatcttcaccggcttcctcattaccttcttggcctttaccttcttcaaagtccctgagacccgtggcaggacttttgaggatatcacacgggcctttgaagggcaggcacacggtgcagatagatctgggaaggacggcgtcatggggatgaacagcatcgagcctgctaaggagaccaccaccaatgtctaagtcatgcctccttccacctccctcccggcatgggaaagccacctctccctcaacaagggagagactttatcaggatgaacccaggactgcttctgaatgctgctacttgatttctttctcatcccacgcactccatgagcaccccaaggctgcagtttgttggatcttcaatggctttttaaattttatttcctggacatcctcttctgcttaggagagaccgagtgaacctaccttcatttcaggagggattggccgcttggcacatgacaactttgccagcttttcctcccttgggttctgatattgccgcactagaggatataggagaggaaaagtaaggtgcagttgccccaacctcagacttaccaggaagcagatacatatgagtgtggaagccggagggtgtttatgtaagagcaccttcctcacttccatacagctctacgcggcaaattaacttgagttttatttatcttatcctctggtttaattacataaatatttattttttaagtgtaattttgccaaataataaaaacagaaggaaattgagattagagggaggtgtttaaagagaggttatagagtaaaagatttgatgctggagaggttaaggtgcaataagaattcagggagaaatgttgttcattattggagggtaaatgatgtggtgcctgaggtctgtacattacctcttaacaatttctgtccttcagatggaaactctttgatttctcagaaaagttgtatgcctatttaataaagctactcatttcctttggaactttatctttaagataatagtttacatgtagtagtacttgaaatctaggattattaactaatatgggcattgtagttaatggcggttgatgggttctaattttggatggagtccagggaagagaaagtgatttctagaaagcctgttcccctcactggacgaaataactccttgtagtagtctcattacttttgaagtaatcccgccacctatctagtgggagagccatccaaatgagaaacctaaaataattggttcttggtagagattcattatttctccactttgttctttaggagattttaggtgttgattttctgttttattttaactcatacctttaaaggaattccccaaagaatgtttacagcaaacttggaatttgtaacctcagctctgggagaggatttttttctgagcgattattatctaaagtgtgttgttgctttaggctcacggcacgcttgcgtatgtctgttaccatgtcactgtggtcctatgccgaatgccctcaggggacttgaatctttccaataaaccaggtttagacagtatgagtcaatgtgcagtgcagcccacacttgagaggatgaatgtatgtgcactgtcactttgctctgggtggaagtatgttattgttgacttattttctctgtgtttgttcctacagcccctttttcatatgttgctcagtctccctttcccttcttggtgcttacacatctcagaccctttagccaaacccttgccagtgacagtattttggttctcagttctcactgttccctctgctcctggagcctttgaataaaaatgcacgtagctatggagtggggtttagctggaaaggtggccttccaacttcacgtcaacttctggctcctcagtttggcagtaaggcagggaagttgttttcctatttctcactgagaagattgtgaatatttccatatggattttccattattgtttgtttgattctttgttttaaaataaaaattctgaatgtacatgaca

SEQ ID NO: 183116 - DNA, 2335 bp, Homo sapiens
  Payload ID: 16077
  Gene Symbol: SLC2A14
  Gene Name: solute carrier family 2 (facilitated glucose transporter), member 14
  Uniprot ID: Q8TDB8
  ENST ID: ENST00000396589
  CDS Start-End: 258-1820
ggacccctgctctgaccgcaggtgggtgcttgtcttgcttacggagggctcccgatgaaccgagtcacgttttgtaaccacattaacggaccattcaaagtcgaatcctaggcttttcgaggcagttagtgggtcccaacggctgcaggcggggccggcgggggcgcagcggcccgggaggaagcagtaccttgaagagaaattggagagggagtcaattcctaggatagcagagagatggacaacagacagaatagatggagtttcacaatggtggccatgtgtctggaattggtgggttcttggtctcactgacttcaagaatgaagccgcacaccctcgcagtcaccccagctctgatctttgccatcacagttgctacaatcggctctttccagtttggctacaacactggggtcatcaatgctcctgagacgatcataaaggaatttatcaataaaactttgacggacaaggcaaatgcccctccctctgaggtgctgctcacgaatctctggtccttgtctgtggccatattttccgtcgggggtatgatcggctccttttccgtcggactctttgttaaccgctttggcaggcgcaattcaatgctgattgtcaacctgttggctgccactggtggctgccttatgggactgtgtaaaatagctgagtcagttgaaatgctgatcctgggccgcttggttattggcctcttctgcggactctgcacaggttttgtgcccatgtacattggagagatctcgcctactgccctgaggggtgcctttggcactctcaaccagctgggcatagttattggaattctggtggcccagatctttggtctggaactcatccttgggtctgaagagctatggccggtgctattaggctttaccatccttccagctatcctgcaaagtgcagcccttccatgttgccctgaaagtcccagatttttgctcattaacagaaaaaaagaggagaatgctacgcggatcctccagcggttgtggggcacccaggatgtatcccaagacatccaggagatgaaagatgagagtgcaaggatgtcacaagaaaagcaagtcaccgtgctggagctctttagagtgtccagctaccgacagcccatcatcatttccattgtgctccagctctctcagcagctctctgggatcaatgctgtgttctattactcaacaggaatcttcaaggatgcaggtgttcaacagcccatctatgccaccatcagcgcgggtgtggttaatactatcttcactttactttctctatttctggtggaaagggcaggaagaaggactctgcatatgataggccttggagggatggctttttgttccacgctcatgactgtttctttgttattaaagaatcactataatgggatgagctttgtctgtattggggctatcttggtctttgtggcctgttttgaaattggaccaggccccattccctggtttattgtggccgaactcttcagccagggcccccgcccagctgcgatggcagtggccggctgctccaactggacctccaacttcctagtcggattgctcttcccctctgctgcttactatttaggagcctacgtttttattatcttcaccggcttcctcattaccttcttggcctttaccttcttcaaagtccctgagacccgtggcaggacttttgaggatatcacacgggcctttgaagggcaggcacacggtgcagatagatctgggaaggacggcgtcatggggatgaacagcatcgagcctgctaaggagaccaccaccaatgtctaagtcatgcctccttccacctccctcccggcatgggaaagccacctctccctcaacaagggagagactttatcaggatgaacccaggactgcttctgaatgctgctacttgatttctttctcatcccacgcactccatgagcaccccaaggctgcagtttgttggatcttcaatggctttttaaattttatttcctggacatcctcttctgcttaggagagaccgagtgaacctaccttcatttcaggagggattggccgcttggcacatgacaactttgccagcttttcctcccttgggttctgatattgccgcactagaggatataggagaggaaaagtaaggtgcagttgccccaacctcagacttaccaggaagcagatacatatgagtgtggaagccggagggtgtttatgtaagagcaccttcctcacttccatacagctctacgcggcaaattaacttgagttttatttatcttatcctctggtttaattacataaatatttatttttta

SEQ ID NO: 183117 - DNA, 3458 bp, Homo sapiens
  Payload ID: 16077
  Gene Symbol: SLC2A14
  Gene Name: solute carrier family 2 (facilitated glucose transporter), member 14
  Uniprot ID: Q8TDB8
  ENST ID: ENST00000431042
  CDS Start-End: 168-1661
agttagtgggtcccaacggctgcaggcggggccggcgggggcgcagcggcccgggaggtgcgtggttgagcgaagccgcggggcccaaccgcagtcgcggggtctgggaggaagcagtaccttgaagagaaattggagagggagtcaattcctaggatagcagagagatggacaacagacagaatgtcaccccagctctgatctttgccatcacagttgctacaatcggctctttccagtttggctacaacactggggtcatcaatgctcctgagacgatcataaaggaatttatcaataaaactttgacggacaaggcaaatgcccctccctctgaggtgctgctcacgaatctctggtccttgtctgtggccatattttccgtcgggggtatgatcggctccttttccgtcggactctttgttaaccgctttggcaggcgcaattcaatgctgattgtcaacctgttggctgccactggtggctgccttatgggactgtgtaaaatagctgagtcagttgaaatgctgatcctgggccgcttggttattggcctcttctgcggactctgcacaggttttgtgcccatgtacattggagagatctcgcctactgccctgaggggtgcctttggcactctcaaccagctgggcatagttattggaattctggtggcccagatctttggtctggaactcatccttgggtctgaagagctatggccggtgctattaggctttaccatccttccagctatcctgcaaagtgcagcccttccatgttgccctgaaagtcccagatttttgctcattaacagaaaaaaagaggagaatgctacgcggatcctccagcggttgtggggcacccaggatgtatcccaagacatccaggagatgaaagatgagagtgcaaggatgtcacaagaaaagcaagtcaccgtgctggagctctttagagtgtccagctaccgacagcccatcatcatttccattgtgctccagctctctcagcagctctctgggatcaatgctgtgttctattactcaacaggaatcttcaaggatgcaggtgttcaacagcccatctatgccaccatcagcgcgggtgtggttaatactatcttcactttactttctctatttctggtggaaagggcaggaagaaggactctgcatatgataggccttggagggatggctttttgttccacgctcatgactgtttctttgttattaaagaatcactataatgggatgagctttgtctgtattggggctatcttggtctttgtggcctgttttgaaattggaccaggccccattccctggtttattgtggccgaactcttcagccagggcccccgcccagctgcgatggcagtggccggctgctccaactggacctccaacttcctagtcggattgctcttcccctctgctgcttactatttaggagcctacgtttttattatcttcaccggcttcctcattaccttcttggcctttaccttcttcaaagtccctgagacccgtggcaggacttttgaggatatcacacgggcctttgaagggcaggcacacggtgcagatagatctgggaaggacggcgtcatggggatgaacagcatcgagcctgctaaggagaccaccaccaatgtctaagtcatgcctccttccacctccctcccggcatgggaaagccacctctccctcaacaagggagagactttatcaggatgaacccaggactgcttctgaatgctgctacttgatttctttctcatcccacgcactccatgagcaccccaaggctgcagtttgttggatcttcaatggctttttaaattttatttcctggacatcctcttctgcttaggagagaccgagtgaacctaccttcatttcaggagggattggccgcttggcacatgacaactttgccagcttttcctcccttgggttctgatattgccgcactagaggatataggagaggaaaagtaaggtgcagttgccccaacctcagacttaccaggaagcagatacatatgagtgtggaagccggagggtgtttatgtaagagcaccttcctcacttccatacagctctacgcggcaaattaacttgagttttatttatcttatcctctggtttaattacataaatatttattttttaagtgtaattttgccaaataataaaaacagaaggaaattgagattagagggaggtgtttaaagagaggttatagagtaaaagatttgatgctggagaggttaaggtgcaataagaattcagggagaaatgttgttcattattggagggtaaatgatgtggtgcctgaggtctgtacattacctcttaacaatttctgtccttcagatggaaactctttgatttctcagaaaagttgtatgcctatttaataaagctactcatttcctttggaactttatctttaagataatagtttacatgtagtagtacttgaaatctaggattattaactaatatgggcattgtagttaatggcggttgatgggttctaattttggatggagtccagggaagagaaagtgatttctagaaagcctgttcccctcactggacgaaataactccttgtagtagtctcattacttttgaagtaatcccgccacctatctagtgggagagccatccaaatgagaaacctaaaataattggttcttggtagagattcattatttctccactttgttctttaggagattttaggtgttgattttctgttttattttaactcatacctttaaaggaattccccaaagaatgtttacagcaaacttggaatttgtaacctcagctctgggagaggatttttttctgagcgattattatctaaagtgtgttgttgctttaggctcacggcacgcttgcgtatgtctgttaccatgtcactgtggtcctatgccgaatgccctcaggggacttgaatctttccaataaaccaggtttagacagtatgagtcaatgtgcagtgcagcccacacttgagaggatgaatgtatgtgcactgtcactttgctctgggtggaagtatgttattgttgacttattttctctgtgtttgttcctacagcccctttttcatatgttgctcagtctccctttcccttcttggtgcttacacatctcagaccctttagccaaacccttgccagtgacagtattttggttctcagttctcactgttccctctgctcctggagcctttgaataaaaatgcacgtagctatggagtggggtttagctggaaaggtggccttccaacttcacgtcaacttctggctcctcagtttggcagtaaggcagggaagttgttttcctatttctcactgagaagattgtgaatatttccatatggattttccattattgtttgtttgattctttgttttaaaataaaaattctgaatgta

SEQ ID NO: 183118 - DNA, 533 bp, Homo sapiens
  Payload ID: 16077
  Gene Symbol: SLC2A14
  Gene Name: solute carrier family 2 (facilitated glucose transporter), member 14
  ENST ID: ENST00000535266
  CDS Start-End: 174-533
agcagccgccggggctggaccgtgcggtgcgcaggtgagaagccgggaggggccggacaaccccgaccgcgagccggacccctgctctgaccgcaggaagcagtaccttgaagagaaattggagagggagtcaattcctaggatagcagagagatggacaacagacagaatagatggagtttcacaatggtggccatgtgtctggaattggtgggttcttggtctcactgacttcaagaatgaagccgcacaccctcgcagtcaccccagctctgatctttgccatcacagttgctacaatcggctctttccagtttggctacaacactggggtcatcaatgctcctgagacgatcataaaggaatttatcaataaaactttgacggacaaggcaaatgcccctccctctgaggtgctgctcacgaatctctggtccttgtctgtggccatattttccgtcgggggtatgatcggctccttttccgtcggactctttgttaaccgctttggcaggcgcaattcaatgctgatt

SEQ ID NO: 183119 - DNA, 682 bp, Homo sapiens
  Payload ID: 16077
  Gene Symbol: SLC2A14
  Gene Name: solute carrier family 2 (facilitated glucose transporter), member 14
  ENST ID: ENST00000542782
  CDS Start-End: 226-682
tgaccgcaggtgggtgcttgtcttgcttacggagggctcccgatgaaccgagtcacgttttgtaaccacattaacggaccattcaaagtcgaatcctaggcttttcgaggcagttagtgggtcccaacggctgcaggcggggccggcgggggcgcagcggcccgggaggaagcagtaccttgaagagaaattggagagggagtcaattcctaggatagcagagagatggacaacagacagaatgtcaccccagctctgatctttgccatcacagttgctacaatcggctctttccagtttggctacaacactggggtcatcaatgctcctgagacgatcataaaggaatttatcaataaaactttgacggacaaggcaaatgcccctccctctgaggtgctgctcacgaatctctggtccttgtctgtggccatattttccgtcgggggtatgatcggctccttttccgtcggactctttgttaaccgctttggcaggcgcaattcaatgctgattgtcaacctgttggctgccactggtggctgccttatgggactgtgtaaaatagctgagtcagttgaaatgctgatcctgggccgcttggttattggcctcttctgcggactctgcacaggttttgtgcccatgtacattggagagatctcgcctactgccctgaggg

SEQ ID NO: 183120 - DNA, 1650 bp, Homo sapiens
  Payload ID: 16077
  Gene Symbol: SLC2A14
  Gene Name: solute carrier family 2 (facilitated glucose transporter), member 14
  Uniprot ID: Q8TDB8
  ENST ID: ENST00000542505
  CDS Start-End: 378-863
gtatctttgaaaatagatacgttcacaccctcctaacggcggcgccaagggtggtgggtcccaaaactgtttccccgtaaagagttcccccgcccggtcgcaggaagacgcctgagggggcgctcggagggatccccagcagccgccggggctggaccgtgcggtgcgcaggtgagaagccgggaggggccggacaaccccgaccgcgagccggacccctgctctgaccgcaggtgttctattactcaacaggaatcttcaaggatgcaggtgttcaacagcccatctatgccaccatcagcgcgggtgtggttaatactatcttcactttactttctctatttctggtggaaagggcaggaagaaggactctgcatatgataggccttggagggatggctttttgttccacgctcatgactgtttctttgttattaaagaatcactataatgggatgagctttgtctgtattggggctatcttggtctttgtggcctgttttgaaattggaccaggccccattccctggtttattgtggccgaactcttcagccagggcccccgcccagctgcgatggcagtggccggctgctccaactggacctccaacttcctagtcggattgctcttcccctctgctgcttactatttaggagcctacgtttttattatcttcaccggcttcctcattaccttcttggcctttaccttcttcaaagtccctgagacccgtggcaggacttttgaggatatcacacgggcctttgaagggcaggcacacggtgcagatagatctgggaaggacggcgtcatggggatgaacagcatcgagcctgctaaggagaccaccaccaatgtctaagtcatgcctccttccacctccctcccggcatgggaaagccacctctccctcaacaagggagagactttatcaggatgaacccaggactgcttctgaatgctgctacttgatttctttctcatcccacgcactccatgagcaccccaaggctgcagtttgttggatcttcaatggctttttaaattttatttcctggacatcctcttctgcttaggagagaccgagtgaacctaccttcatttcaggagggattggccgcttggcacatgacaactttgccagcttttcctcccttgggttctgatattgccgcactagaggatataggagaggaaaagtaaggtgcagttgccccaacctcagacttaccaggaagcagatacatatgagtgtggaagccggagggtgtttatgtaagagcaccttcctcacttccatacagctctacgcggcaaattaacttgagttttatttatcttatcctctggtttaattacataaatatttattttttaagtgtaattttgccaaataataaaaacagaaggaaattgagattagagggaggtgtttaaagagaggttatagagtaaaagatttgatgctggagaggttaaggtgcaataagaattcagggagaaatgttgttcattattggagggtaaatgatgtggtgcctgaggtctgtacattacctcttaacaatttctgtccttcagatggaaactctttgatttctcagaaaagttgtatgcctatttaataaagctactcatttcctttggaa

SEQ ID NO: 183121 - DNA, 548 bp, Homo sapiens
  Payload ID: 16077
  Gene Symbol: SLC2A14
  Gene Name: solute carrier family 2 (facilitated glucose transporter), member 14
  ENST ID: ENST00000535587
  CDS Start-End: 482-548
gggggcgcagcggcccgggagccctctattggagattctgcctcccctgggacagatggcttcttgagcacactcccacgatgggtggctgctctggtacatctcatccacttcttcatctgtgaagctgtcacccatggtggtgagcagctcctggaggtggtcctcatgaatgaaacctgaggattcctcgttgaagcaggtattcatccatggggttcttccgcggtgaagccagcttgtcgtgctgtcccccttgtcattgaagccatcatggttctggtcaatcatgttgaaagcctccttaaactcctggatgtggaactggtcgaacatcacgaagacattggatgtggccccttgtgctgtggtcgcttcttggtggtcttggctttggtccacttgctgaacattttggcttcaggaagcagtaccttgaagagaaattggagagggagtcaattcctaggatagcagagagatggacaacagacagaatgtcaccccagctctgatctttgccatcacagttgctacaatcggctctt

SEQ ID NO: 183122 - DNA, 854 bp, Homo sapiens
  Payload ID: 16077
  Gene Symbol: SLC2A14
  Gene Name: solute carrier family 2 (facilitated glucose transporter), member 14
  ENST ID: ENST00000546234
  CDS Start-End: 348-854
gcagcggcccgggaggtgcgtggttgagcgaagccgcggggcccaaccgcagtcgcggggtctgggaggtattcatccatggggttcttccgcggtgaagccagcttgtcgtgctgtcccccttgtcattgaagccatcatggttctggtcaatcatgttgaaagcctccttaaactcctggatgtggaactggtcgaacatcacgaagacattggatgtggccccttgtgctgtggtcgcttcttggtggtcttggctttggtccacttgctgaacattttggcttcaggaagcagtaccttgaagagaaattggagagggagtcaattcctaggatagcagagagatggacaacagacagaatgtcaccccagctctgatctttgccatcacagttgctacaatcggctctttccagtttggctacaacactggggtcatcaatgctcctgagacgatcataaaggaatttatcaataaaactttgacggacaaggcaaatgcccctccctctgaggtgctgctcacgaatctctggtccttgtctgtggccatattttccgtcgggggtatgatcggctccttttccgtcggactctttgttaaccgctttggcaggcgcaattcaatgctgattgtcaacctgttggctgccactggtggctgccttatgggactgtgtaaaatagctgagtcagttgaaatgctgatcctgggccgcttggttattggcctcttctgcggactctgcacaggttttgtgcccatgtacattggagagatctcgcctactgccctgaggggtgcctttggcactctcaaccagctgggcatagttattggaattctggtg

SEQ ID NO: 183123 - DNA, 578 bp, Homo sapiens
  Payload ID: 16077
  Gene Symbol: SLC2A14
  Gene Name: solute carrier family 2 (facilitated glucose transporter), member 14
  ENST ID: ENST00000537557
  CDS Start-End: 155-578
ggcgggggcgcagcggcccgggaggtgcgtggttgagcgaagccgcggggcccaaccgcagtcgcggggtctgggaggaagcagtaccttgaagagaaattggagagggagtcaattcctaggatagcagagagatggacaacagacagaatagatggagtttcacaatggtggccatgtgtctggaattggtgggttcttggtctcactgacttcaagaatgaagccgcacaccctcgcagtcaccccagctctgatctttgccatcacagttgctacaatcggctctttccagtttggctacaacactggggtcatcaatgctcctgagacgatcataaaggaatttatcaataaaactttgacggacaaggcaaatgcccctccctctgaggtgctgctcacgaatctctggtccttgtctgtggccatattttccgtcgggggtatgatcggctccttttccgtcggactctttgttaaccgctttggcaggcgcaattcaatgctgattgtcaacctgttggctgccactggtggctgccttatgggactgtgtaaaatagctgagtcagttg

SEQ ID NO: 183124 - DNA, 4125 bp, Homo sapiens
  Payload ID: 16077
  Gene Symbol: SLC2A14
  Gene Name: solute carrier family 2 (facilitated glucose transporter), member 14
  Uniprot ID: Q8TDB8
  ENST ID: ENST00000543909
  CDS Start-End: 761-2323
agtcgcggggtctgggaggagacctgaatgaaatgagggagccttgggagcatgatccaggcggagggaactggattcgggaggaggaactgccttggccttgaaagatacctaccaggagttcaagtgctgtgcgggtgcatcagctttgtagatttgtgcaagatgaaaattggaattgtcttaggaaattatggatcattcatttattcagtgctggattcattcagtgatttatgtctgaagtgtgacagaaggggagtaaggccaagtgtccttgccctctattggagattctgcctcccctgggacagatggcttcttgagcacactcccacgatgggtggctgctctggtacatctcatccacttcttcatctgtgaagctgtcacccatggtggtgagcagctcctggaggtggtcctcatgaatgaaacctgaggattcctcgttgaagcaggtattcatccatggggttcttccgcggtgaagccagcttgtcgtgctgtcccccttgtcattgaagccatcatggttctggtcaatcatgttgaaagcctccttaaactcctggatgtggaactggtcgaacatcacgaagacattggatgtggccccttgtgctgtggtcgcttcttggtggtcttggctttggtccacttgctgaacattttggcttcaggaagcagtaccttgaagagaaattggagagggagtcaattcctaggatagcagagagatggacaacagacagaatagatggagtttcacaatggtggccatgtgtctggaattggtgggttcttggtctcactgacttcaagaatgaagccgcacaccctcgcagtcaccccagctctgatctttgccatcacagttgctacaatcggctctttccagtttggctacaacactggggtcatcaatgctcctgagacgatcataaaggaatttatcaataaaactttgacggacaaggcaaatgcccctccctctgaggtgctgctcacgaatctctggtccttgtctgtggccatattttccgtcgggggtatgatcggctccttttccgtcggactctttgttaaccgctttggcaggcgcaattcaatgctgattgtcaacctgttggctgccactggtggctgccttatgggactgtgtaaaatagctgagtcagttgaaatgctgatcctgggccgcttggttattggcctcttctgcggactctgcacaggttttgtgcccatgtacattggagagatctcgcctactgccctgaggggtgcctttggcactctcaaccagctgggcatagttattggaattctggtggcccagatctttggtctggaactcatccttgggtctgaagagctatggccggtgctattaggctttaccatccttccagctatcctgcaaagtgcagcccttccatgttgccctgaaagtcccagatttttgctcattaacagaaaaaaagaggagaatgctacgcggatcctccagcggttgtggggcacccaggatgtatcccaagacatccaggagatgaaagatgagagtgcaaggatgtcacaagaaaagcaagtcaccgtgctggagctctttagagtgtccagctaccgacagcccatcatcatttccattgtgctccagctctctcagcagctctctgggatcaatgctgtgttctattactcaacaggaatcttcaaggatgcaggtgttcaacagcccatctatgccaccatcagcgcgggtgtggttaatactatcttcactttactttctctatttctggtggaaagggcaggaagaaggactctgcatatgataggccttggagggatggctttttgttccacgctcatgactgtttctttgttattaaagaatcactataatgggatgagctttgtctgtattggggctatcttggtctttgtggcctgttttgaaattggaccaggccccattccctggtttattgtggccgaactcttcagccagggcccccgcccagctgcgatggcagtggccggctgctccaactggacctccaacttcctagtcggattgctcttcccctctgctgcttactatttaggagcctacgtttttattatcttcaccggcttcctcattaccttcttggcctttaccttcttcaaagtccctgagacccgtggcaggacttttgaggatatcacacgggcctttgaagggcaggcacacggtgcagatagatctgggaaggacggcgtcatggggatgaacagcatcgagcctgctaaggagaccaccaccaatgtctaagtcatgcctccttccacctccctcccggcatgggaaagccacctctccctcaacaagggagagactttatcaggatgaacccaggactgcttctgaatgctgctacttgatttctttctcatcccacgcactccatgagcaccccaaggctgcagtttgttggatcttcaatggctttttaaattttatttcctggacatcctcttctgcttaggagagaccgagtgaacctaccttcatttcaggagggattggccgcttggcacatgacaactttgccagcttttcctcccttgggttctgatattgccgcactagaggatataggagaggaaaagtaaggtgcagttgccccaacctcagacttaccaggaagcagatacatatgagtgtggaagccggagggtgtttatgtaagagcaccttcctcacttccatacagctctacgcggcaaattaacttgagttttatttatcttatcctctggtttaattacataaatatttattttttaagtgtaattttgccaaataataaaaacagaaggaaattgagattagagggaggtgtttaaagagaggttatagagtaaaagatttgatgctggagaggttaaggtgcaataagaattcagggagaaatgttgttcattattggagggtaaatgatgtggtgcctgaggtctgtacattacctcttaacaatttctgtccttcagatggaaactctttgatttctcagaaaagttgtatgcctatttaataaagctactcatttcctttggaactttatctttaagataatagtttacatgtagtagtacttgaaatctaggattattaactaatatgggcattgtagttaatggcggttgatgggttctaattttggatggagtccagggaagagaaagtgatttctagaaagcctgttcccctcactggacgaaataactccttgtagtagtctcattacttttgaagtaatcccgccacctatctagtgggagagccatccaaatgagaaacctaaaataattggttcttggtagagattcattatttctccactttgttctttaggagattttaggtgttgattttctgttttattttaactcatacctttaaaggaattccccaaagaatgtttacagcaaacttggaatttgtaacctcagctctgggagaggatttttttctgagcgattattatctaaagtgtgttgttgctttaggctcacggcacgcttgcgtatgtctgttaccatgtcactgtggtcctatgccgaatgccctcaggggacttgaatctttccaataaaccaggtttagacagtatgagtcaatgtgcagtgcagcccacacttgagaggatgaatgtatgtgcactgtcactttgctctgggtggaagtatgttattgttgacttattttctctgtgtttgttcctacagcccctttttcatatgttgctcagtctccctttcccttcttggtgcttacacatctcagaccctttagccaaacccttgccagtgacagtattttggttctcagttctcactgttccctctgctcctggagcctttgaataaaaatgcacgtagctatggagtggggtttagctggaaaggtggccttccaacttcacgtcaacttctggctcctcagtttggcagtaaggcagggaagttgttttcctatttctcactgagaagattgtgaatatttccatatggattttccattattgtttgtttgattctttgttttaaaataaaaattctgaatgtacatga

SEQ ID NO: 183125 - DNA, 1732 bp, Homo sapiens
  Payload ID: 16077
  Gene Symbol: SLC2A14
  Gene Name: solute carrier family 2 (facilitated glucose transporter), member 14
  Uniprot ID: Q8TDB8
  ENST ID: ENST00000535295
  CDS Start-End: 201-1436
gttgagcgaagccgcggggcccaaccgcagtcgcggggtctgggaggaagcagtaccttgaagagaaattggagagggagtcaattcctaggatagcagagagatggacaacagacagaatgtcaccccagctctgatctttgccatcacagttgctacaatcggctctttccagtttggctacaacactggggtcatcaatgctcctgagacggcgcaattcaatgctgattgtcaacctgttggctgccactggtggctgccttatgggactgtgtaaaatagctgagtcagttgaaatgctgatcctgggccgcttggttattggcctcttctgcggactctgcacaggttttgtgcccatgtacattggagagatctcgcctactgccctgaggggtgcctttggcactctcaaccagctgggcatagttattggaattctggtggcccagatctttggtctggaactcatccttgggtctgaagagctatggccggtgctattaggctttaccatccttccagctatcctgcaaagtgcagcccttccatgttgccctgaaagtcccagatttttgctcattaacagaaaaaaagaggagaatgctacgcggatcctccagcggttgtggggcacccaggatgtatcccaagacatccaggagatgaaagatgagagtgcaaggatgtcacaagaaaagcaagtcaccgtgctggagctctttagagtgtccagctaccgacagcccatcatcatttccattgtgctccagctctctcagcagctctctgggatcaatgctgtgttctattactcaacaggaatcttcaaggatgcaggtgttcaacagcccatctatgccaccatcagcgcgggtgtggttaatactatcttcactttactttctctatttctggtggaaagggcaggaagaaggactctgcatatgataggccttggagggatggctttttgttccacgctcatgactgtttctttgttattaaagaatcactataatgggatgagctttgtctgtattggggctatcttggtctttgtggcctgttttgaaattggaccaggccccattccctggtttattgtggccgaactcttcagccagggcccccgcccagctgcgatggcagtggccggctgctccaactggacctccaacttcctagtcggattgctcttcccctctgctgcttactatttaggagcctacgtttttattatcttcaccggcttcctcattaccttcttggcctttaccttcttcaaagtccctgagacccgtggcaggacttttgaggatatcacacgggcctttgaagggcaggcacacggtgcagatagatctgggaaggacggcgtcatggggatgaacagcatcgagcctgctaaggagaccaccaccaatgtctaagtcatgcctccttccacctccctcccggcatgggaaagccacctctccctcaacaagggagagactttatcaggatgaacccaggactgcttctgaatgctgctacttgatttctttctcatcccacgcactccatgagcaccccaaggctgcagtttgttggatcttcaatggctttttaaattttatttcctggacatcctcttctgcttaggagagaccgagtgaacctaccttcatttcaggagggattggccgcttggcacatgacaactttgccagcttttcctcccttg

SEQ ID NO: 183126 - DNA, 543 bp, Homo sapiens
  Payload ID: 16077
  Gene Symbol: SLC2A14
  Gene Name: solute carrier family 2 (facilitated glucose transporter), member 14
  ENST ID: ENST00000536594
  CDS Start-End: 113-229
aggtgcgtggttgagcgaagccgcggggcccaaccgcagtcgcggggtctgggaggaagcagtaccttgaagagaaattggagagggagtcaattcctaggatagcagagagatggacaacagacagaatagacagggtctccttgtgtcgcccaggctggtccaaaagggggaaataagaactcctggactcaagcgatcctcccgccttgacctccaaaagtgctgagattacaggcatgagccatcgagcctggcctccgaagccccttctgtatgggtattactccctccatggaggcagagccctcatgactcagtcacttcccaaaaggtcaccccagctctgatctttgccatcacagttgctacaatcggctctttccagtttggctacaacactggggtcatcaatgctcctgagacgatcataaaggaatttatcaataaaactttgacggacaaggcaaatgcccctccctctgaggtgctgctcacgaatctctggtccttgtctgtggccatattttccgtcgggggtat

SEQ ID NO: 183127 - DNA, 580 bp, Homo sapiens
  Payload ID: 16077
  Gene Symbol: SLC2A14
  Gene Name: solute carrier family 2 (facilitated glucose transporter), member 14
  ENST ID: ENST00000542916
  CDS Start-End: 328-580
tttggcaggagacctgaatgaaatgagggagccttgggagcatgatccaggcggagggaactggattcgggaggaggaactgccttggccttgaaagatacctaccaggagttcaagtgctgtgcgggtgcatcagctttgtagatttgtgcaagatgaaaattggaattgtcttaggaaattatggatcattcatttattcagtgctggattcattcagtgatttatgtctgaagtgtgacagaaggggagtaaggccaagtgtccttggaagcagtaccttgaagagaaattggagagggagtcaattcctaggatagcagagagatggacaacagacagaatgtcaccccagctctgatctttgccatcacagttgctacaatcggctctttccagtttggctacaacactggggtcatcaatgctcctgagacgatcataaaggaatttatcaataaaactttgacggacaaggcaaatgcccctccctctgaggtgctgctcacgaatctctggtccttgtctgtggccatattttccgtcgggggtatgatcggctccttttccgtcggactct

SEQ ID NO: 183128 - DNA, 665 bp, Homo sapiens
  Payload ID: 16077
  Gene Symbol: SLC2A14
  Gene Name: solute carrier family 2 (facilitated glucose transporter), member 14
  ENST ID: ENST00000535383
  CDS Start-End: 524-665
tttttagtaaagactgggtttcgccatgttggccaggctggtctcgaacccctgacctcaagttatccgctctcctcggcctccaaaagtgctaggattacaggtgtgagccaccgtgcgcggcccgaaataactctttacaggatctcgccctgggccttcccagcccagccggcccgcccgcggggatagcccgggcactatctccctgctgcaggcggtgaggggctcgggtatctttgaaaatagatacgttcacaccctcctaacggcggcgccaagggtggtgggtcccaaaactgtttccccgtaaagagttcccccgcccggtcgcaggaagacgcctgagggggcgctcggagggatccccagcagccgccggggctggaccgtgcggtgcgcaggtgagaagccgggaggggccggacaaccccgaccgcgagccggacccctgctctgaccgcaggaagcagtaccttgaagagaaattggagagggagtcaattcctaggatagcagagagatggacaacagacagaatgtcaccccagctctgatctttgccatcacagttgctacaatcggctctttccagtttggctacaacactggggtcatcaatgctcctgagacgatcataaaggaatttatcaataaaactttga

SEQ ID NO: 183129 - DNA, 561 bp, Homo sapiens
  Payload ID: 16077
  Gene Symbol: SLC2A14
  Gene Name: solute carrier family 2 (facilitated glucose transporter), member 14
  ENST ID: ENST00000535344
  CDS Start-End: 139-561
gtgcgccgcgccgtccctgcggccggggggtgcgggaatgaggacctgagctggggtagaggtggccgagctagagtagaggaagcagtaccttgaagagaaattggagagggagtcaattcctaggatagcagagagatggacaacagacagaatgtcaccccagctctgatctttgccatcacagttgctacaatcggctctttccagtttggctacaacactggggtcatcaatgctcctgagacgatcataaaggaatttatcaataaaactttgacggacaaggcaaatgcccctccctctgaggtgctgctcacgaatctctggtccttgtctgtggccatattttccgtcgggggtatgatcggctccttttccgtcggactctttgttaaccgctttggcaggcgcaattcaatgctgattgtcaacctgttggctgccactggtggctgccttatgggactgtgtaaaatagctgagtcagttgaaatgctgatcctgggccgcttggttattggcctcttctgcggactctgcacaggttttgtgcccatg

SEQ ID NO: 183130 - DNA, 3120 bp, Homo sapiens
  Payload ID: 16077
  Gene Symbol: SLC2A14
  Gene Name: solute carrier family 2 (facilitated glucose transporter), member 14
  Uniprot ID: Q8TDB8
  ENST ID: ENST00000542546
  CDS Start-End: 82-1317
aggtcaccccagctctgatctttgccatcacagttgctacaatcggctctttccagtttggctacaacactggggtcatcaatgctcctgagacggcgcaattcaatgctgattgtcaacctgttggctgccactggtggctgccttatgggactgtgtaaaatagctgagtcagttgaaatgctgatcctgggccgcttggttattggcctcttctgcggactctgcacaggttttgtgcccatgtacattggagagatctcgcctactgccctgaggggtgcctttggcactctcaaccagctgggcatagttattggaattctggtggcccagatctttggtctggaactcatccttgggtctgaagagctatggccggtgctattaggctttaccatccttccagctatcctgcaaagtgcagcccttccatgttgccctgaaagtcccagatttttgctcattaacagaaaaaaagaggagaatgctacgcggatcctccagcggttgtggggcacccaggatgtatcccaagacatccaggagatgaaagatgagagtgcaaggatgtcacaagaaaagcaagtcaccgtgctggagctctttagagtgtccagctaccgacagcccatcatcatttccattgtgctccagctctctcagcagctctctgggatcaatgctgtgttctattactcaacaggaatcttcaaggatgcaggtgttcaacagcccatctatgccaccatcagcgcgggtgtggttaatactatcttcactttactttctctatttctggtggaaagggcaggaagaaggactctgcatatgataggccttggagggatggctttttgttccacgctcatgactgtttctttgttattaaagaatcactataatgggatgagctttgtctgtattggggctatcttggtctttgtggcctgttttgaaattggaccaggccccattccctggtttattgtggccgaactcttcagccagggcccccgcccagctgcgatggcagtggccggctgctccaactggacctccaacttcctagtcggattgctcttcccctctgctgcttactatttaggagcctacgtttttattatcttcaccggcttcctcattaccttcttggcctttaccttcttcaaagtccctgagacccgtggcaggacttttgaggatatcacacgggcctttgaagggcaggcacacggtgcagatagatctgggaaggacggcgtcatggggatgaacagcatcgagcctgctaaggagaccaccaccaatgtctaagtcatgcctccttccacctccctcccggcatgggaaagccacctctccctcaacaagggagagactttatcaggatgaacccaggactgcttctgaatgctgctacttgatttctttctcatcccacgcactccatgagcaccccaaggctgcagtttgttggatcttcaatggctttttaaattttatttcctggacatcctcttctgcttaggagagaccgagtgaacctaccttcatttcaggagggattggccgcttggcacatgacaactttgccagcttttcctcccttgggttctgatattgccgcactagaggatataggagaggaaaagtaaggtgcagttgccccaacctcagacttaccaggaagcagatacatatgagtgtggaagccggagggtgtttatgtaagagcaccttcctcacttccatacagctctacgcggcaaattaacttgagttttatttatcttatcctctggtttaattacataaatatttattttttaagtgtaattttgccaaataataaaaacagaaggaaattgagattagagggaggtgtttaaagagaggttatagagtaaaagatttgatgctggagaggttaaggtgcaataagaattcagggagaaatgttgttcattattggagggtaaatgatgtggtgcctgaggtctgtacattacctcttaacaatttctgtccttcagatggaaactctttgatttctcagaaaagttgtatgcctatttaataaagctactcatttcctttggaactttatctttaagataatagtttacatgtagtagtacttgaaatctaggattattaactaatatgggcattgtagttaatggcggttgatgggttctaattttggatggagtccagggaagagaaagtgatttctagaaagcctgttcccctcactggacgaaataactccttgtagtagtctcattacttttgaagtaatcccgccacctatctagtgggagagccatccaaatgagaaacctaaaataattggttcttggtagagattcattatttctccactttgttctttaggagattttaggtgttgattttctgttttattttaactcatacctttaaaggaattccccaaagaatgtttacagcaaacttggaatttgtaacctcagctctgggagaggatttttttctgagcgattattatctaaagtgtgttgttgctttaggctcacggcacgcttgcgtatgtctgttaccatgtcactgtggtcctatgccgaatgccctcaggggacttgaatctttccaataaaccaggtttagacagtatgagtcaatgtgcagtgcagcccacacttgagaggatgaatgtatgtgcactgtcactttgctctgggtggaagtatgttattgttgacttattttctctgtgtttgttcctacagcccctttttcatatgttgctcagtctccctttcccttcttggtgcttacacatctcagaccctttagccaaacccttgccagtgacagtattttggttctcagttctcactgttccctctgctcctggagcctttgaataaaaatgcacgtagctatggagtggggtttagctggaaaggtggccttccaacttcacgtcaacttctggctcctcagtttggcagtaaggcagggaagttgttttcctatttctcactgagaagattgtgaatatttccatatggattttccattattgtttgtttgattctttgttttaaaataaaaattctgaatgtacatgac

SEQ ID NO: 183131 - DNA, 440 bp, Homo sapiens
  Payload ID: 16077
  Gene Symbol: SLC2A14
  Gene Name: solute carrier family 2 (facilitated glucose transporter), member 14
  ENST ID: ENST00000539234
  CDS Start-End: 402-440
gttgagcgaagccgcggggcccaaccgcagtcgcggggtctgggagccctctattggagattctgcctcccctgggacagatggcttcttgagcacactcccacgatgggtggctgctctgggtattcatccatggggttcttccgcggtgaagccagcttgtcgtgctgtcccccttgtcattgaagccatcatggttctggtcaatcatgttgaaagcctccttaaactcctggatgtggaactggtcgaacatcacgaagacattggatgtggccccttgtgctgtggtcgcttcttggtggtcttggctttggtccacttgctgaacattttggcttcaggaagcagtaccttgaagagaaattggagagggagtcaattcctaggatagcagagagatggacaacagacagaatagatggagtttcacaatggtg

SEQ ID NO: 183132 - DNA, 1873 bp, Homo sapiens
  Payload ID: 16077
  Gene Symbol: SLC2A14
  Gene Name: solute carrier family 2 (facilitated glucose transporter), member 14
  Uniprot ID: Q8TDB8
  ENST ID: ENST00000539924
  CDS Start-End: 22-1629
acaacctgacttttgttcacaatgcaaagactccaactgttgagagtagaagtactcctgggtgtgaaacaaggagatgaaatgcggcatttctttttttcttctcagacctccactctggagaagagtcagaatgggggcgtcggggaggaggtcaccccagctctgatctttgccatcacagttgctacaatcggctctttccagtttggctacaacactggggtcatcaatgctcctgagacgatcataaaggaatttatcaataaaactttgacggacaaggcaaatgcccctccctctgaggtgctgctcacgaatctctggtccttgtctgtggccatattttccgtcgggggtatgatcggctccttttccgtcggactctttgttaaccgctttggcaggcgcaattcaatgctgattgtcaacctgttggctgccactggtggctgccttatgggactgtgtaaaatagctgagtcagttgaaatgctgatcctgggccgcttggttattggcctcttctgcggactctgcacaggttttgtgcccatgtacattggagagatctcgcctactgccctgaggggtgcctttggcactctcaaccagctgggcatagttattggaattctggtggcccagatctttggtctggaactcatccttgggtctgaagagctatggccggtgctattaggctttaccatccttccagctatcctgcaaagtgcagcccttccatgttgccctgaaagtcccagatttttgctcattaacagaaaaaaagaggagaatgctacgcggatcctccagcggttgtggggcacccaggatgtatcccaagacatccaggagatgaaagatgagagtgcaaggatgtcacaagaaaagcaagtcaccgtgctggagctctttagagtgtccagctaccgacagcccatcatcatttccattgtgctccagctctctcagcagctctctgggatcaatgctgtgttctattactcaacaggaatcttcaaggatgcaggtgttcaacagcccatctatgccaccatcagcgcgggtgtggttaatactatcttcactttactttctctatttctggtggaaagggcaggaagaaggactctgcatatgataggccttggagggatggctttttgttccacgctcatgactgtttctttgttattaaagaatcactataatgggatgagctttgtctgtattggggctatcttggtctttgtggcctgttttgaaattggaccaggccccattccctggtttattgtggccgaactcttcagccagggcccccgcccagctgcgatggcagtggccggctgctccaactggacctccaacttcctagtcggattgctcttcccctctgctgcttactatttaggagcctacgtttttattatcttcaccggcttcctcattaccttcttggcctttaccttcttcaaagtccctgagacccgtggcaggacttttgaggatatcacacgggcctttgaagggcaggcacacggtgcagatagatctgggaaggacggcgtcatggggatgaacagcatcgagcctgctaaggagaccaccaccaatgtctaagtcatgcctccttccacctccctcccggcatgggaaagccacctctccctcaacaagggagagactttatcaggatgaacccaggactgcttctgaatgctgctacttgatttctttctcatcccacgcactccatgagcaccccaaggctgcagtttgttggatcttcaatggctttttaaattttatttcctggacatcctcttctgcttaggagagaccgagtgaacctaccttcatttca

SEQ ID NO: 183133 - DNA, 3366 bp, Homo sapiens
  Payload ID: 16077
  Gene Symbol: SLC2A14
  Gene Name: solute carrier family 2 (facilitated glucose transporter), member 14
  Uniprot ID: Q8TDB8
  ENST ID: ENST00000616981
  CDS Start-End: 1-1563
atggagtttcacaatggtggccatgtgtctggaattggtgggttcttggtctcactgacttcaagaatgaagccgcacaccctcgcagtcaccccagctctgatctttgccatcacagttgctacaatcggctctttccagtttggctacaacactggggtcatcaatgctcctgagacgatcataaaggaatttatcaataaaactttgacggacaaggcaaatgcccctccctctgaggtgctgctcacgaatctctggtccttgtctgtggccatattttccgtcgggggtatgatcggctccttttccgtcggactctttgttaaccgctttggcaggcgcaattcaatgctgattgtcaacctgttggctgccactggtggctgccttatgggactgtgtaaaatagctgagtcagttgaaatgctgatcctgggccgcttggttattggcctcttctgcggactctgcacaggttttgtgcccatgtacattggagagatctcgcctactgccctgaggggtgcctttggcactctcaaccagctgggcatagttattggaattctggtggcccagatctttggtctggaactcatccttgggtctgaagagctatggccggtgctattaggctttaccatccttccagctatcctgcaaagtgcagcccttccatgttgccctgaaagtcccagatttttgctcattaacagaaaaaaagaggagaatgctacgcggatcctccagcggttgtggggcacccaggatgtatcccaagacatccaggagatgaaagatgagagtgcaaggatgtcacaagaaaagcaagtcaccgtgctggagctctttagagtgtccagctaccgacagcccatcatcatttccattgtgctccagctctctcagcagctctctgggatcaatgctgtgttctattactcaacaggaatcttcaaggatgcaggtgttcaacagcccatctatgccaccatcagcgcgggtgtggttaatactatcttcactttactttctctatttctggtggaaagggcaggaagaaggactctgcatatgataggccttggagggatggctttttgttccacgctcatgactgtttctttgttattaaagaatcactataatgggatgagctttgtctgtattggggctatcttggtctttgtggcctgttttgaaattggaccaggccccattccctggtttattgtggccgaactcttcagccagggcccccgcccagctgcgatggcagtggccggctgctccaactggacctccaacttcctagtcggattgctcttcccctctgctgcttactatttaggagcctacgtttttattatcttcaccggcttcctcattaccttcttggcctttaccttcttcaaagtccctgagacccgtggcaggacttttgaggatatcacacgggcctttgaagggcaggcacacggtgcagatagatctgggaaggacggcgtcatggggatgaacagcatcgagcctgctaaggagaccaccaccaatgtctaagtcatgcctccttccacctccctcccggcatgggaaagccacctctccctcaacaagggagagactttatcaggatgaacccaggactgcttctgaatgctgctacttgatttctttctcatcccacgcactccatgagcaccccaaggctgcagtttgttggatcttcaatggctttttaaattttatttcctggacatcctcttctgcttaggagagaccgagtgaacctaccttcatttcaggagggattggccgcttggcacatgacaactttgccagcttttcctcccttgggttctgatattgccgcactagaggatataggagaggaaaagtaaggtgcagttgccccaacctcagacttaccaggaagcagatacatatgagtgtggaagccggagggtgtttatgtaagagcaccttcctcacttccatacagctctacgcggcaaattaacttgagttttatttatcttatcctctggtttaattacataaatatttattttttaagtgtaattttgccaaataataaaaacagaaggaaattgagattagagggaggtgtttaaagagaggttatagagtaaaagatttgatgctggagaggttaaggtgcaataagaattcagggagaaatgttgttcattattggagggtaaatgatgtggtgcctgaggtctgtacattacctcttaacaatttctgtccttcagatggaaactctttgatttctcagaaaagttgtatgcctatttaataaagctactcatttcctttggaactttatctttaagataatagtttacatgtagtagtacttgaaatctaggattattaactaatatgggcattgtagttaatggcggttgatgggttctaattttggatggagtccagggaagagaaagtgatttctagaaagcctgttcccctcactggacgaaataactccttgtagtagtctcattacttttgaagtaatcccgccacctatctagtgggagagccatccaaatgagaaacctaaaataattggttcttggtagagattcattatttctccactttgttctttaggagattttaggtgttgattttctgttttattttaactcatacctttaaaggaattccccaaagaatgtttacagcaaacttggaatttgtaacctcagctctgggagaggatttttttctgagcgattattatctaaagtgtgttgttgctttaggctcacggcacgcttgcgtatgtctgttaccatgtcactgtggtcctatgccgaatgccctcaggggacttgaatctttccaataaaccaggtttagacagtatgagtcaatgtgcagtgcagcccacacttgagaggatgaatgtatgtgcactgtcactttgctctgggtggaagtatgttattgttgacttattttctctgtgtttgttcctacagcccctttttcatatgttgctcagtctccctttcccttcttggtgcttacacatctcagaccctttagccaaacccttgccagtgacagtattttggttctcagttctcactgttccctctgctcctggagcctttgaataaaaatgcacgtagctatggagtggggtttagctggaaaggtggccttccaacttcacgtcaacttctggctcctcagtttggcagtaaggcagggaagttgttttcctatttctcactgagaagattgtgaatatttccatatggattttccattattgtttgtttgattctttgttttaaaataaaaattctgaatgtacatgac

SEQ ID NO: 183134 - DNA, 3210 bp, Homo sapiens
  Payload ID: 16078
  Gene Symbol: SLC2A2
  Gene Name: solute carrier family 2 (facilitated glucose transporter), member 2
  Uniprot ID: P11168
  ENST ID: ENST00000314251
  CDS Start-End: 81-1655
aataaacaggcaggagctagtcaggtgcatgtgccacactcacacaagacctggaattgacaggactcccaactagtacaatgacagaagataaggtcactgggaccctggttttcactgtcatcactgctgtgctgggttccttccagtttggatatgacattggtgtgatcaatgcacctcaacaggtaataatatctcactatagacatgttttgggtgttccactggatgaccgaaaagctatcaacaactatgttatcaacagtacagatgaactgcccacaatctcatactcaatgaacccaaaaccaaccccttgggctgaggaagagactgtggcagctgctcaactaatcaccatgctctggtccctgtctgtatccagctttgcagttggtggaatgactgcatcattctttggtgggtggcttggggacacacttggaagaatcaaagccatgttagtagcaaacattctgtcattagttggagctctcttgatggggttttcaaaattgggaccatctcatatacttataattgctggaagaagcatatcaggactatattgtgggctaatttcaggcctggttcctatgtatatcggtgaaattgctccaaccgctctcaggggagcacttggcacttttcatcagctggccatcgtcacgggcattcttattagtcagattattggtcttgaatttatcttgggcaattatgatctgtggcacatcctgcttggcctgtctggtgtgcgagccatccttcagtctctgctactctttttctgtccagaaagccccagatacctttacatcaagttagatgaggaagtcaaagcaaaacaaagcttgaaaagactcagaggatatgatgatgtcaccaaagatattaatgaaatgagaaaagaaagagaagaagcatcgagtgagcagaaagtctctataattcagctcttcaccaattccagctaccgacagcctattctagtggcactgatgctgcatgtggctcagcaattttccggaatcaatggcattttttactactcaaccagcatttttcagacggctggtatcagcaaacctgtttatgcaaccattggagttggcgctgtaaacatggttttcactgctgtctctgtattccttgtggagaaggcagggcgacgttctctctttctaattggaatgagtgggatgtttgtttgtgccatcttcatgtcagtgggacttgtgctgctgaataagttctcttggatgagttatgtgagcatgatagccatcttcctctttgtcagcttctttgaaattgggccaggcccgatcccctggttcatggtggctgagtttttcagtcaaggaccacgtcctgctgctttagcaatagctgcattcagcaattggacctgcaatttcattgtagctctgtgtttccagtacattgcggacttctgtggaccttatgtgtttttcctctttgctggagtgctcctggcctttaccctgttcacattttttaaagttccagaaaccaaaggaaagtcttttgaggaaattgctgcagaattccaaaagaagagtggctcagcccacaggccaaaagctgctgtagaaatgaaattcctaggagctacagagactgtgtaaaaaaaaaaccctgctttttgacatgaacagaaacaataagggaaccgtctgtttttaaatgatgattccttgagcattttatatccacatctttaagtattgttttatttttatgtgctctcatcagaaatgtcatcaaatattaccaaaaaagtatttttttaagttagagaatatatttttgatggtaagactgtaattaagtaaaccaaaaaggctagtttattttgttacactaaagggcaggtggttctaatatttttagctctgttctttataacaaggttcttctaaaattgaagagatttcaacatatcatttttttaacacataactagaaacctgaggatgcaacaaatatttatatatttgaatatcattaaattggaattttcttacccatatatcttatgttaaaggagatatggctagtggcaataagttccatgttaaaatagacaactcttccatttattgcactcagcttttttcttgagtactagaatttgtattttgcttaaaattttacttttgttctgtattttcatgtggaatggattatagagtatactaaaaaatgtctatagagaaaaactttcatttttggtaggcttatcaaaatctttcagcactcagaaaagaaaaccattttagttcctttatttaatggccaaatggtttttgcaagatttaacactaaaaaggtttcacctgatcatatagcgtgggttatcagttaacattaacatctattataaaaccatgttgattcccttctggtacaatcctttgagttatagtttgctttgctttttaattgaggacagcctggttttcacatacactcaaacaatcatgagtcagacatttggtatattacctcaaattcctaataagtttgatcaaatctaatgtaagaaaatttgaagtaaaggattgatcactttgttaaaaatattttctgaattattatgtctcaaaataagttgaaaaggtagggtttgaggattcctgagtgtgggcttctgaaacttcataaatgttcagcttcagacttttatcaaaatccctatttaattttcctggaaagactgattgttttatggtgtgttcctaacataaaataatcgtctcctttgacatttccttctttgtcttagctgtatacagattctagccaaactattctatggccattactaacacgcattgtacactatctatctgcctttacctacataggcaaattggaaatacacagatgattaaacagactttagcttacagtcaattttacaattatggaaatatagttctgatgggtcccaaaagcttagcagggtgctaacgtatctctaggctgttttctccaccaactggagcactgatcaatccttcttatgtttgctttaatgtgtattgaagaaaagcactttttaaaaagtactctttaagagtgaaataattaaaaaccactgaacatttgctttgttttctaaagttgttcacatatatgtaatttagcagtccaaagaacaagaaattgtttcttttc

SEQ ID NO: 183135 - DNA, 1533 bp, Homo sapiens
  Payload ID: 16078
  Gene Symbol: SLC2A2
  Gene Name: solute carrier family 2 (facilitated glucose transporter), member 2
  ENST ID: ENST00000469787
  CDS Start-End: 74-343
aggcaggagctagtcaggtgcatgtgccacactcacacaagacctggaattgacaggactcccaactagtacaatgacagaagataaggtcactgggaccctggttttcactgtcatcactgctgtgctgggttccttccagtttggatatgacattggtgtgatcaatgcacctcaacagaatcaaagccatgttagtagcaaacattctgtcattagttggagctctcttgatggggttttcaaaattgggaccatctcatatacttataattgctggaagaagcatatcaggactatattgtgggctaatttcaggcctggttcctatgtatatcggtgaaattgctccaaccgctctcaggggagcacttggcacttttcatcagctggccatcgtcacgggcattcttattagtcagattattggtcttgaatttatcttgggcaattatgatctgtggcacatcctgcttggcctgtctggtgtgcgagccatccttcagtctctgctactctttttctgtccagaaagccccagatacctttacatcaagttagatgaggaagtcaaagcaaaacaaagcttgaaaagactcagaggatatgatgatgtcaccaaagatattaatgaaatgagaaaagaaagagaagaagcatcgagtgagcagaaagtctctataattcagctcttcaccaattccagctaccgacagcctattctagtggcactgatgctgcatgtggctcagcaattttccggaatcaatggcattttttactactcaaccagcatttttcagacggctggtatcagcaaacctgtttatgcaaccattggagttggcgctgtaaacatggttttcactgctgtctctgtattccttgtggagaaggcagggcgacgttctctctttctaattggaatgagtgggatgtttgtttgtgccatcttcatgtcagtgggacttgtgctgctgaataagttctcttggatgagttatgtgagcatgatagccatcttcctctttgtcagcttctttgaaattgggccaggcccgatcccctggttcatggtggctgagtttttcagtcaaggaccacgtcctgctgctttagcaatagctgcattcagcaattggacctgcaatttcattgtagctctgtgtttccagtacattgcggacttctgtggaccttatgtgtttttcctctttgctggagtgctcctggcctttaccctgttcacattttttaaagttccagaaaccaaaggaaagtcttttgaggaaattgctgcagaattccaaaagaagagtggctcagcccacaggccaaaagctgctgtagaaatgaaattcctaggagctacagagactgtgtaaaaaaaaaaccctgctttttgacatgaacagaaacaataagggaaccgtctgtttttaaatgatgattccttgagcattttatatccacatctttaagtattgttttatttttatgtgctctcatcagaaatgtcatcaaatattacca

SEQ ID NO: 183136 - DNA, 2583 bp, Homo sapiens
  Payload ID: 16078
  Gene Symbol: SLC2A2
  Gene Name: solute carrier family 2 (facilitated glucose transporter), member 2
  ENST ID: ENST00000497642
  CDS Start-End: 51-458
gtgccacactcacacaagacctggaattgacaggactcccaactagtacaatgacagaagataaggtcactgggaccctggttttcactgtcatcactgctgtgctgggttccttccagtttggatatgacattggtgtgatcaatgcacctcaacaggtaataatatctcactatagacatgttttgggtgttccactggatgaccgaaaagctatcaacaactatgttatcaacagtacagatgaactgcccacaatctcatactcaatgaacccaaaaccaaccccttgggctgaggaagagactgtggcagctgctcaactaatcaccatgctctggtccctgtctgtatccagctttgcagttggtggaatgactgcatcattctttggtgggtggcttggggacacacttggaagggctaatttcaggcctggttcctatgtatatcggtgaaattgctccaaccgctctcaggggagcacttggcacttttcatcagctggccatcgtcacgggcattcttattagtcagattattggtcttgaatttatcttgggcaattatgatctgtggcacatcctgcttggcctgtctggtgtgcgagccatccttcagtctctgctactctttttctgtccagaaagccccagatacctttacatcaagttagatgaggaagtcaaagcaaaacaaagcttgaaaagactcagaggatatgatgatgtcaccaaagatattaatgaaatgagaaaagaaagagaagaagcatcgagtgagcagaaagtctctataattcagctcttcaccaattccagctaccgacagcctattctagtggcactgatgctgcatgtggctcagcaattttccggaatcaatggcattttttactactcaaccagcatttttcagacggctggtatcagcaaacctgtttatgcaaccattggagttggcgctgtaaacatggttttcactgctgtctctgtattccttgtggagaaggcagggcgacgttctctctttctaattggaatgagtgggatgtttgtttgtgccatcttcatgtcagtgggacttgtgctgctgaataagttctcttggatgagttatgtgagcatgatagccatcttcctctttgtcagcttctttgaaattgggccaggcccgatcccctggttcatggtggctgagtttttcagtcaaggaccacgtcctgctgctttagcaatagctgcattcagcaattggacctgcaatttcattgtagctctgtgtttccagtacattgcggacttctgtggaccttatgtgtttttcctctttgctggagtgctcctggcctttaccctgttcacattttttaaagttccagaaaccaaaggaaagtcttttgaggaaattgctgcagaattccaaaagaagagtggctcagcccacaggccaaaagctgctgtagaaatgaaattcctaggagctacagagactgtgtaaaaaaaaaaccctgctttttgacatgaacagaaacaataagggaaccgtctgtttttaaatgatgattccttgagcattttatatccacatctttaagtattgttttatttttatgtgctctcatcagaaatgtcatcaaatattaccaaaaaagtatttttttaagttagagaatatatttttgatggtaagactgtaattaagtaaaccaaaaaggctagtttattttgttacactaaagggcaggtggttctaatatttttagctctgttctttataacaaggttcttctaaaattgaagagatttcaacatatcatttttttaacacataactagaaacctgaggatgcaacaaatatttatatatttgaatatcattaaattggaattttcttacccatatatcttatgttaaaggagatatggctagtggcaataagttccatgttaaaatagacaactcttccatttattgcactcagcttttttcttgagtactagaatttgtattttgcttaaaattttacttttgttctgtattttcatgtggaatggattatagagtatactaaaaaatgtctatagagaaaaactttcatttttggtaggcttatcaaaatctttcagcactcagaaaagaaaaccattttagttcctttatttaatggccaaatggtttttgcaagatttaacactaaaaaggtttcacctgatcatatagcgtgggttatcagttaacattaacatctattataaaaccatgttgattcccttctggtacaatcctttgagttatagtttgctttgctttttaattgaggacagcctggttttcacatacactcaaacaatcatgagtcagacatttggtatattacctcaaattcctaataagtttgatcaaatctaatgtaagaaaatttgaagtaaaggattgatcactttgttaaaaatattttctgaattattatgtctcaaaataagttgaaaaggtagggtttgaggattcctgagtgtgggcttctgaaacttcataaatgttcagcttcagacttttatcaaaatccctatttaattttcc

SEQ ID NO: 183137 - DNA, 425 bp, Homo sapiens
  Payload ID: 16078
  Gene Symbol: SLC2A2
  Gene Name: solute carrier family 2 (facilitated glucose transporter), member 2
  ENST ID: ENST00000461867
  CDS Start-End: 117-425
gtcactgggaccctggttttcactgtcatcactgctgtgctgggttccttccagtttggatatgacattggtgtgatcaatgcacctcaacagggctaatttcaggcctggttcctatgtatatcggtgaaattgctccaaccgctctcaggggagcacttggcacttttcatcagctggccatcgtcacgggcattcttattagtcagattattggtcttgaatttatcttgggcaattatgatctgtggcacatcctgcttggcctgtctggtgtgcgagccatccttcagtctctgctactctttttctgtccagaaagccccagatacctttacatcaagttagatgaggaagtcaaagcaaaacaaagcttgaaaagactcagaggatatgatgatgtcaccaaagatattaatgaaatg

SEQ ID NO: 183138 - DNA, 3915 bp, Homo sapiens
  Payload ID: 16079
  Gene Symbol: SLC2A3
  Gene Name: solute carrier family 2 (facilitated glucose transporter), member 3
  Uniprot ID: P11169
  ENST ID: ENST00000075120
  CDS Start-End: 242-1732
gtggggtggggtggggctgggggcttgtcgccctttcaggctccaccctttgcggagattataaatagtcatgatcccagcgagacccagagatgctgtaatggtaagactttggatccttcctgaggacgtggagaaaacttgctgctgagaaggacattttgaaggttttgttggctgaaaaagctgtttctggaatcacccctagatctttcttgaagacttgaattagattacagcgatggggacacagaaggtcaccccagctctgatatttgccatcacagttgctacaatcggctctttccaatttggctacaacactggggtcatcaatgctcctgagaagatcataaaggaatttatcaataaaactttgacggacaagggaaatgccccaccctctgaggtgctgctcacgtctctctggtccttgtctgtggccatattttccgtcgggggtatgatcggctccttttccgtcggactcttcgtcaaccgctttggcaggcgcaattcaatgctgattgtcaacctgttggctgtcactggtggctgctttatgggactgtgtaaagtagctaagtcggttgaaatgctgatcctgggtcgcttggttattggcctcttctgcggactctgcacaggttttgtgcccatgtacattggagagatctcgcctactgccctgcggggtgcctttggcactctcaaccagctgggcatcgttgttggaattctggtggcccagatctttggtctggaattcatccttgggtctgaagagctatggccgctgctactgggttttaccatccttcctgctatcctacaaagtgcagcccttccattttgccctgaaagtcccagatttttgctcattaacagaaaagaagaggagaatgctaagcagatcctccagcggttgtggggcacccaggatgtatcccaagacatccaggagatgaaagatgagagtgcaaggatgtcacaagaaaagcaagtcaccgtgctagagctctttagagtgtccagctaccgacagcccatcatcatttccattgtgctccagctctctcagcagctctctgggatcaatgctgtgttctattactcaacaggaatcttcaaggatgcaggtgttcaagagcccatctatgccaccatcggcgcgggtgtggttaatactatcttcactgtagtttctctatttctggtggaaagggcaggaagaaggactctgcatatgataggccttggagggatggctttttgttccacgctcatgactgtttctttgttattaaaggataactataatgggatgagctttgtctgtattggggctatcttggtctttgtagccttctttgaaattggaccaggccccattccctggtttattgtggccgaactcttcagccagggcccccgcccagctgcgatggcagtggccggctgctccaactggacctccaacttcctagtcggattgctcttcccctccgctgctcactatttaggagcctacgtttttattatcttcaccggcttcctcattaccttcttggcttttaccttcttcaaagtccctgagacccgtggcaggacttttgaggatatcacacgggcctttgaagggcaggcacacggtgcagatagatctggaaaggacggcgtcatggagatgaacagcatcgagcctgctaaggagaccaccaccaatgtctaagtcgtgcctccttccacctccctcccggcatgggaaagccacctctccctcaacaagggagagacctcatcaggatgaacccaggacgcttctgaatgctgctacttaattcctttctcatcccacgcactccatgagcaccccaaggctgcggtttgttggatcttcaatggctttttaaattttatttcctggacatcctcttctgcttaggagagaccgagtgaacctaccttcatttcaggagggattggccgcttggcacatgacaactttgccagcttttcctcccttgggttctgatattgccgcactaggggatataggagaggaaaagtaaggtgcagttcccccaacctcagacttaccaggaagcagatacatatgagtgtggaagccggagggtgtttatgtaagagcaccttcctcacttccatacagctctacgtggcaaattaacttgagttttatttattttatcctctggtttaattacataattttttttttttaactttaagtttcaggatacatgtgccgaatgtgcaggtttgttacataggtatatatatgccatgatggaaatatttatttttttaagcgtaattttgccaaataataaaaacagaaggaaattgagattagagggaggtgtttaaagagaggttatagagtagaagatttgatgctggagaggttaaggtgcaataagaatttagggagaaatgttgttcattattggagggtaaatgatgtggtgcctgaggtctgtacgttacctcttaacaatttctgtccttcagatggaaactctttaacttctcgtaaaagtcatatacctatataataaagctactgatttcctttggagcttttttctttaagataatagtttacatgtagtagtacttgaaatctaggattattaactaatatgggcattgtagttaatgatggttgatgggttctaattttggatggagtccagggaagagaaagtgatttctagaaagcctgttcccctcactggatgaaataactccttcttgtagtagtctcattacttttgaagtaatcccgccacctatctcgtgggagagccatccaaataagaaacctaaaataattggttcttggtagagattcattatttttccactttgttctttaggagattttaggtgttgattttctgttgtattttaactcatacctttaaaggaattccccaaagaatgtttatagcaaacttggaatttgtaacctcagctctgggagaggatttttttctgagcgattattatctaaagtgtgttgttgctttaggctcacggcacgcttgcgtatgtctgttaccatgtcactgtggtcctatgccgaatgccctcaggggacttgaatctttccaataaaccaggtttagacagtatgagtcaatgtgcagtgtagcccacacttgagaggatgaatgtatgtgcactgtcactttgctctgggtggaagtacgttattgttgacttattttctctgtgtttgttcctacagcccctttttcatatgttgctcagtctccctttcccttcttggtgcttacacatctcagaccctttagccaaacccttgtcagtgacagtattttggttcttagttctcactgttccctctgctcctggagcctttgaataaaaatgcacgtagctgaggccggatgcggtggctcacgcctgtaatcccagcactttgggaggcctaggcgggcggtcaggggttcgagaccagtctggccaacatcgtgaaaccctgtctctactaaaaatgcaaaaattagccgggcgtggtggcgggcgcctgtaatcccagctacttgggaagctgaggcgggagaatcatgtgaacccgggacgcaggggttgcagtgagcggagatcgcatcattgcactctagcctgggccacagggcgagactccgtctcaaaaaaaaaaaaatgcacatagctatcaagtgtgctttagcttgaaaaggtgaccttgcaacttcatgtcaacttctggctcctcaaacagtaggttggcagtaaggcagggtcccatttctcactgagaagattgtgaatatttccatatggattttctattgttactctggttctttgttttaaaataaaaattctgaatgtacacga

SEQ ID NO: 183139 - DNA, 577 bp, Homo sapiens
  Payload ID: 16079
  Gene Symbol: SLC2A3
  Gene Name: solute carrier family 2 (facilitated glucose transporter), member 3
  ENST ID: ENST00000544291
  CDS Start-End: 153-577
gagatgctgtaatggtaagactttggatccttcctgaggacgtggagaaaacttgctgctgagaaggacattttgaaggttttgttggctgaaaaagctgtttctggaatcacccctagatctttcttgaagacttgaattagattacagcgatggggacacagaagatcataaaggaatttatcaataaaactttgacggacaagggaaatgccccaccctctgaggtgctgctcacgtctctctggtccttgtctgtggccatattttccgtcgggggtatgatcggctccttttccgtcggactcttcgtcaaccgctttggcaggcgcaattcaatgctgattgtcaacctgttggctgtcactggtggctgctttatgggactgtgtaaagtagctaagtcggttgaaatgctgatcctgggtcgcttggttattggcctcttctgcggactctgcacaggttttgtgcccatgtacattggagagatctcgcctactgccctgcggggtgcctttggcactctcaaccagctgggcatcgttgttggaattctggtggcccagatctttgg

SEQ ID NO: 183140 - DNA, 589 bp, Homo sapiens
  Payload ID: 16079
  Gene Symbol: SLC2A3
  Gene Name: solute carrier family 2 (facilitated glucose transporter), member 3
  ENST ID: ENST00000544936
  CDS Start-End: 154-300
agagatgctgtaatggtaagactttggatccttcctgaggacgtggagaaaacttgctgctgagaaggacattttgaaggttttgttggctgaaaaagctgtttctggaatcacccctagatctttcttgaagacttgaattagattacagcgatggggacacagaaggtcaccccagctctgatatttgccatcacagttgctacaatcggctctttccaatttggctacaacactggggtcatcaatgctcctgagaagtctgttcttccaccaacccttttattttgcagatcataaaggaatttatcaataaaactttgacggacaagggaaatgccccaccctctgaggtgctgctcacgtctctctggtccttgtctgtggccatattttccgtcgggggtatgatcggctccttttccgtcggactcttcgtcaaccgctttggcaggcgcaattcaatgctgattgtcaacctgttggctgtcactggtggctgctttatgggactgtgtaaagtagctaagtcggttgaaatgctgatcctgggtcgcttggttattggcctcttctgcggactctgcac

SEQ ID NO: 183141 - DNA, 3426 bp, Homo sapiens
  Payload ID: 16080
  Gene Symbol: SLC2A4
  Gene Name: solute carrier family 2 (facilitated glucose transporter), member 4
  Uniprot ID: P14672
  ENST ID: ENST00000317370
  CDS Start-End: 269-1798
gtgaagggcgtggcccgcgggggcaggagcgaggtggcgggggcttctcgcgtcttttcccccagccccgctccaccagatccgcgggagccccactgctctccgggtccttggcttgtggctgtgggtcccatcgggcccgccctcgcacgtcactccgggacccccgcggcctccgcaggttctgcgctccaggccggagtcagagactccaggatcggttctttcatcttcgccgcccctgcgcgtccagctcttctaagacgagatgccgtcgggcttccaacagataggctccgaagatggggaaccccctcagcagcgagtgactgggaccctggtccttgctgtgttctctgcggtgcttggctccctgcagtttgggtacaacattggggtcatcaatgcccctcagaaggtgattgaacagagctacaatgagacgtggctggggaggcaggggcctgagggacccagctccatccctccaggcaccctcaccaccctctgggccctctccgtggccatcttttccgtgggcggcatgatttcctccttcctcattggtatcatctctcagtggcttggaaggaaaagggccatgctggtcaacaatgtcctggcggtgctggggggcagcctcatgggcctggccaatgctgctgcctcctatgaaatgctcatccttggacgattcctcattggcgcctactcagggctgacatcagggctggtgcccatgtacgtgggggagattgctcccactcacctgcggggcgccctggggacgctcaaccaactggccattgttatcggcattctgatcgcccaggtgctgggcttggagtccctcctgggcactgccagcctgtggccactgctcctgggcctcacagtgctacctgccctcctgcagctggtcctgctgcccttctgtcccgagagcccccgctacctctacatcatccagaatctcgaggggcctgccagaaagagtctgaagcgcctgacaggctgggccgatgtttctggagtgctggctgagctgaaggatgagaagcggaagctggagcgtgagcggccactgtccctgctccagctcctgggcagccgtacccaccggcagcccctgatcattgcggtcgtgctgcagctgagccagcagctctctggcatcaatgctgttttctattattcgaccagcatcttcgagacagcaggggtaggccagcctgcctatgccaccataggagctggtgtggtcaacacagtcttcaccttggtctcggtgttgttggtggagcgggcggggcgccggacgctccatctcctgggcctggcgggcatgtgtggctgtgccatcctgatgactgtggctctgctcctgctggagcgagttccagccatgagctacgtctccattgtggccatctttggcttcgtggcattttttgagattggccctggccccattccttggttcatcgtggccgagctcttcagccagggaccccgcccggcagccatggctgtggctggtttctccaactggacgagcaacttcatcattggcatgggtttccagtatgttgcggaggctatggggccctacgtcttccttctatttgcggtcctcctgctgggcttcttcatcttcaccttcttaagagtacctgaaactcgaggccggacgtttgaccagatctcagctgccttccaccggacaccctctcttttagagcaggaggtgaaacccagcacagaacttgagtatttagggccagatgagaacgactgaggggccaggcaggggtgggagagccagctctctctacccggcccagagaccccttcctttcctctgcagcactttaaccctctcttccctattatttccgggtggaaaagaatccctgcagcctggtagaattgggaagctgggggaagggtggtctgagcaccccctcattcccctcgtgtgactctcttggattatttatgtgttgtggtttggccgtggccatcagggtgggccactctcccctccctcttccttcccccatcccctttcctccccaccttccccagactcagctccagaataccttcttcgctgctagagaagggggattggagggaagacaggtctagactttctcagtgggacaaaccagagcagagagcaggacaggagacaagaaatccagtttcccaccaccttggactcctcccacaatctgggactttcactgaattcttgccacgcagactctgggcaaaggggtttttttttttttttttttttttttttttgagacagtctcgctctgtcgcccaggctcgagtgcagtggcgtgatcttgcttcactgcaagctgtctcccaggttcacgccattctcctgcctcagcctccggagtagctgggactacaggcgcatgccaccacacctggctaatttattttgtatttttagtatatacgcggtttcaccatgttagccagaatggtctcgatctcctgacctcgtgatctgcctgcctcagcctcccaaagtgctgggattacaggcgtgagccaccgcgcctggcgaagggagttctctcttgacccctgcagggaaaaggactcacctccctcactgcaggctcagccttccagggcaagagggaacaggaaagtatgtgcccatgtgtggcaagatggaaggacggcaggctcccgcctctaggcttggggctctaccccgatggtttcccaaggctgccaagaaggagccctaactttcttcctctcccttcctggaagggtgctgcatccacaggcttttgaccaactaaggcaaagaggggatttgaaaggctgcctggaaacactgggctgggaggagcctttggatatttttatatacgtttgaaaaggggattgagagaagaaaccaaaggtcggttgtactaaatgtatatatatagatacttctataaagtcactgctgaagacaagcatcctattgtggaggtacttgaggatgggctgagacagggaccataactcttcacccctcttcctccctctgtcctgcctcagctcaaggcctcagaatcttctggatgccattgctcatgcccctactcacatttctactcgttgctttattaatagtaaatgctcaataaattgtagctgccagtgccgggcattgctcttggcatttgcagaatactcactctgtgagggaggtgtcagcccatgtcacagatgggcagtgaaacccatgataggggcactcttcaccagggacacagctggagacatggcagcaaggatgccaggccctgcccacggccccacatcccctcctccccaccttcaacagtgagttactagcgattctccaaaacagaagagatggagaccaagaccaca

SEQ ID NO: 183142 - DNA, 1852 bp, Homo sapiens
  Payload ID: 16080
  Gene Symbol: SLC2A4
  Gene Name: solute carrier family 2 (facilitated glucose transporter), member 4
  ENST ID: ENST00000424875
  CDS Start-End: 298-1653
gattccaatcctaccaaaaggcagagtgggtctggagggcctttcggggcacaggcagcaagtggattctgcgagccagggttcacccccttgcctagtaggcggcgcggcgctccggaatcggggacaccctgccctcgatccgactcgggaaagcagatccaggcgggtcttgccctccgggagctgtccgtccgtcttcgctcacgggcagtgtttcgaggaccggaggctctccgtgggcccccacccccactcctggccgccctccaggacgctgaactttcccttggccccatggatggggaaccccctcagcagcgagtgactgggaccctggtccttgctgtgttctctgcggtgcttggctccctgcagtttgggtacaacattggggtcatcaatgcccctcagaaggtgattgaacagagctacaatgagacgtggctggggaggcaggggcctgagggacccagctccatccctccaggcaccctcaccaccctctgggccctctccgtggccatcttttccgtgggcggcatgatttcctccttcctcattggtatcatctctcagtggcttggaaggaaaagggccatgctggtcaacaatgtcctggcggtgctggggggcagcctcatgggcctggccaatgctgctgcctcctatgaaatgctcatccttggacgattcctcattggcgcctactcagggctgacatcagggctggtgcccatgtacgtgggggagattgctcccactcacctgcggggcgccctggggacgctcaaccaactggccattgttatcggcattctgatcgcccaggtgctgggcttggagtccctcctgggcactgccagcctgtggccactgctcctgggcctcacagtgctacctgccctcctgcagctggtcctgctgcccttctgtcccgagagcccccgctacctctacatcatccagaatctcgaggggcctgccagaaagagtctgaagcgcctgacaggctgggccgatgtttctggagtgctggctgagctgaaggatgagaagcggaagctggagcgtgagcggccactgtccctgctccagctcctgggcagccgtacccaccggcagcccctgatcattgcggtcgtgctgcagctgagccagcagctctctggcatcaatgctgttttctattattcgaccagcatcttcgagacagcaggggtaggccagcctgcctatgccaccataggagctggtgtggtcaacacagtcttcaccttggtctcggtgttgttggtggagcgggcggggcgccggacgctccatctcctgggcctggcgggcatgtgtggctgtgccatcctgatgactgtggctctgctcctgctggagcgagttccagccatgagctacgtctccattgtggccatctttggcttcgtggcattttttgagattggccctggccccattccttggttcatcgtggccgagctcttcagccagggaccccgcccggcagccatggctgtggctggtttctccaactggacgagcaacttcatcattggcatgggtttccagtatgttgcggtaggtccccccgccccagcctcccacaccgtaggccagaggtgggcatcacacagctagcccacctgcttccccgtcagggactcctccagccacagaccatgggtctttgggtcagtttggtggaccacctgctccacagaatcaaagcaaggaagggagctgacctagattggatagtaactgaggtgtctgaaacgcaccagtggcataacttaccttactccaagaataaaatgatacactttgcattaatact

SEQ ID NO: 183143 - DNA, 1813 bp, Homo sapiens
  Payload ID: 16080
  Gene Symbol: SLC2A4
  Gene Name: solute carrier family 2 (facilitated glucose transporter), member 4
  ENST ID: ENST00000570783
  CDS Start-End: 128-787
gccctcgcacgtcactccgggacccccgcggcctccgcaggttctgcgctccaggccggagtcagagactccaggatcggttctttcatcttcgccgcccctgcgcgtccagctcttctaagacgagatgccgtcgggcttccaacagataggctccgaagatggggaaccccctcagcagcgagtgactgggaccctggtccttgctgtgttctctgcggtgcttggctccctgcagtttgggtacaacattggggtcatcaatgcccctcagaaggtgattgaacagagctacaatgagacgtggctggggaggcaggggcctgagggacccagctccatccctccaggcaccctcaccaccctctgggccctctccgtggccatcttttccgtgggcggcatgatttcctccttcctcattggtatcatctctcagtggcttggaaggaaaagggccatgctggtcaacaatgtcctggcggtgctggggggcagcctcatgggcctggccaatgctgctgcctcctatgaaatgctcatccttggacgattcctcattggcgcctactcaggtgctgggcttggagtccctcctgggcactgccagcctgtggccactgctcctgggcctcacagtgctacctgccctcctgcagctggtcctgctgcccttctgtcccgagagcccccgctacctctacatcatccagaatctcgaggggcctgccagaaagagtctgaagcgcctgacaggctgggccgatgtttctggagtgctggctgagctgaaggatgagaagcggaagctggagcgtgagcggccactgtccctgctccagctcctgggcagccgtacccaccggcagcccctgatcattgcggtcgtgctgcagctgagccagcagctctctggcatcaatgctgttttctattattcgaccagcatcttcgagacagcaggggtaggccagcctgcctatgccaccataggagctggtgtggtcaacacagtcttcaccttggtctcggtgttgttggtggagcgggcggggcgccggacgctccatctcctgggcctggcgggcatgtgtggctgtgccatcctgatgactgtggctctgctcctgctggagcgagttccagccatgagctacgtctccattgtggccatctttggcttcgtggcattttttgagattggccctggccccattccttggttcatcgtggccgagctcttcagccagggaccccgcccggcagccatggctgtggctggtttctccaactggacgagcaacttcatcattggcatgggtttccagtatgttgcggaggctatggggccctacgtcttccttctatttgcggtcctcctgctgggcttcttcatcttcaccttcttaagagtacctgaaactcgaggccggacgtttgaccagatctcagctgccttccaccggacaccctctcttttagagcaggaggtgaaacccagcacagaacttgagtatttagggccagatgagaacgactgaggggccaggcaggggtgggagagccagctctctctacccggcccagagaccccttcctttcctctgcagcactttaaccctctcttccctattatttccgggtggaaaagaatccctgcagcctggtagaattgggaagctgggggaagggtggtctgagcaccccctcattcccctcgtgtgactctcttggattatttatgtgttgtggtttggccgtggccatcagggtgggccactctcccctccctcttccttcccccatccccttt

SEQ ID NO: 183144 - DNA, 1768 bp, Homo sapiens
  Payload ID: 16080
  Gene Symbol: SLC2A4
  Gene Name: solute carrier family 2 (facilitated glucose transporter), member 4
  ENST ID: ENST00000571308
  CDS Start-End: 200-1585
gctccaccagatccgcgggagccccactgctctccgggtccttggcttgtggctgtgggtcccatcgggcccgccctcgcacgtcactccgggacccccgcggcctccgcaggttctgcgctccaggccggagtcagagactccaggatcggttctttcatcttcgccgcccctgcgcgtccagctcttctaagacgagatgccgtcgggcttccaacagataggctccgaagatggggaaccccctcagcagcgagtgactgggaccctggtccttgctgtgttctctgcggtgcttggctccctgcagtttgggtacaacattggggtcatcaatgcccctcagaaggtgattgaacagagctacaatgagacgtggctggggaggcaggggcctgagggacccagctccatccctccaggcaccctcaccaccctctgggccctctccgtggccatcttttccgtgggcggcatgatttcctccttcctcattggtatcatctctcagtggcttggaaggaaaagggccatgctggtcaacaatgtcctggcggtgctggggggcagcctcatgggcctggccaatgctgctgcctcctatgaaatgctcatccttggacgattcctcattggcgcctactcagggctgacatcagggctggtgcccatgtacgtgggggagattgctcccactcacctgcggggcgccctggggacgctcaaccaactggccattgttatcggcattctgatcgcccaggtgctgggcttggagtccctcctgggcactgccagcctgtggccactgctcctgggcctcacagtgctacctgccctcctgcagctggtcctgctgcccttctgtcccgagagcccccgctacctctacatcatccagaatctcgaggggcctgccagaaagagtctgaagcgcctgacaggctgggccgatgtttctggagtgctggctgagctgaaggatgagaagcggaagctggagcgtgagcggccactgtccctgctccagctcctgggcagccgtacccaccggcagcccctgatcattgcggtcgtgctgcagctgagccagcagctctctggcatcaatgctgttttctattattcgaccagcatcttcgagacagcaggggtaggccagcctgcctatgccaccataggagctggtgtggtcaacacagtcttcaccttggtctcggtgttgttggtggagcgggcggggcgccggacgctccatctcctgggcctggcgggcatgtgtggctgtgccatcctgatgactgtggctctgctcctgctggagcgagttccagccatgagctacgtctccattgtggccatctttggcttcgtggcattttttgagattggccctggccccattccttggttcatcgtggccgagctcttcagccagggaccccgcccggcagccatggctgtggctggtttctccaactggacgagcaacttcatcattggcatgggtttccagtatgttgcggtaggtccccccgccccagcctcccacaccgtaggccagaggtgggcatcacacagctagcccacctgcttccccgtcagggactcctccagccacagaccatgggtctttgggtcagtttggtggaccacctgctccacagaatcaaagcaaggaagggagctgacctagattggatagtaactgaggtgtctgaaacgcaccagtggcataacttaccttactccaagaataaaatgatac

SEQ ID NO: 183145 - DNA, 2995 bp, Homo sapiens
  Payload ID: 16080
  Gene Symbol: SLC2A4
  Gene Name: solute carrier family 2 (facilitated glucose transporter), member 4
  Uniprot ID: P14672
  ENST ID: ENST00000572485
  CDS Start-End: 201-1448
cgctccaccagatccgcgggagccccactgctctccgggtccttggcttgtggctgtgggtcccatcgggcccgccctcgcacgtcactccgggacccccgcggcctccgcaggttctgcgctccaggccggagtcagagactccaggatcggttctttcatcttcgccgcccctgcgcgtccagctcttctaagacgagatgccgtcgggcttccaacagataggctccgaagatggggaaccccctcagcagcgagtgactgggaccctggtccttgctgtgttctctgcggtgcttggctccctgcagtttgggtacaacattggggtcatcaatgcccctcagaaggtgattgaacagagctacaatgagacgtggctggggaggcaggggcctgagggacccagctccatccctccaggcaccctcaccaccctctgggccctctccgtggccatcttttccgtgggcggcatgatttcctccttcctcattggtatcatctctcagtggcttggaaggaaaagggccatgctggtcaacaatgtcctggcggtgctggggggcagcctcatgggcctggccaatgctgctgcctcctatgaaatgctcatccttggacgattcctcattggcgcctactcagggctgacatcagggctggtgcccatgtacgtgggggagattgctcccactcacctgcggggcgccctggggacgctcaaccaactggccattgttatcggcattctgatcgcccaggtgctgggcttggagtccctcctgggcactgccagcctgtggccactgctcctgggcctcacagtgctacctgccctcctgcagctggtcctgctgcccttctgtcccgagagcccccgctacctctacatcatccagaatctcgaggggcctgccagaaagagtctgaagcgcctgacaggctgggccgatgtttctggagtgctggctgagctgaaggatgagaagcggaagctggagcgtgagcggccactgtccctgctccagctcctgggcagccgtacccaccggcagcccctgatcattgcggtcgtgctgcagctgagccagcagctctctggcatcaatgctgttttctattattcgaccagcatcttcgagacagcaggggtaggccagcctgcctatgccaccataggagctggtgtggtcaacacagtcttcaccttggtctcggtaactgctcacctctggaatggcccgagccactggcttcacctccctgggtgtcccggaggtgttgttggtggagcgggcggggcgccggacgctccatctcctgggcctggcgggcatgtgtggctgtgccatcctgatgactgtggctctgctcctgctggagcgagttccagccatgagctacgtctccattgtggccatctttggcttcgtggcattttttgagattggccctggccccattccttggttcatcgtggccgagctcttcagccagggaccccgcccggcagccatggctgtggctggtttctccaactggacgagcaacttcatcattggcatgggtttccagtatgttgcggaggctatggggccctacgtcttccttctatttgcggtcctcctgctgggcttcttcatcttcaccttcttaagagtacctgaaactcgaggccggacgtttgaccagatctcagctgccttccaccggacaccctctcttttagagcaggaggtgaaacccagcacagaacttgagtatttagggccagatgagaacgactgaggggccaggcaggggtgggagagccagctctctctacccggcccagagaccccttcctttcctctgcagcactttaaccctctcttccctattatttccgggtggaaaagaatccctgcagcctggtagaattgggaagctgggggaagggtggtctgagcaccccctcattcccctcgtgtgactctcttggattatttatgtgttgtggtttggccgtggccatcagggtgggccactctcccctccctcttccttcccccatcccctttcctccccaccttccccagactcagctccagaataccttcttcgctgctagagaagggggattggagggaagacaggtctagactttctcagtgggacaaaccagagcagagagcaggacaggagacaagaaatccagtttcccaccaccttggactcctcccacaatctgggactttcactgaattcttgccacgcagactctgggcaaaggggtttttttttttttttttttttttttttttgagacagtctcgctctgtcgcccaggctcgagtgcagtggcgtgatcttgcttcactgcaagctgtctcccaggttcacgccattctcctgcctcagcctccggagtagctgggactacaggcgcatgccaccacacctggctaatttattttgtatttttagtatatacgcggtttcaccatgttagccagaatggtctcgatctcctgacctcgtgatctgcctgcctcagcctcccaaagtgctgggattacaggcgtgagccaccgcgcctggcgaagggagttctctcttgacccctgcagggaaaaggactcacctccctcactgcaggctcagccttccagggcaagagggaacaggaaagtatgtgcccatgtgtggcaagatggaaggacggcaggctcccgcctctaggcttggggctctaccccgatggtttcccaaggctgccaagaaggagccctaactttcttcctctcccttcctggaagggtgctgcatccacaggcttttgaccaactaaggcaaagaggggatttgaaaggctgcctggaaacactgggctgggaggagcctttggatatttttatatacgtttgaaaaggggattgagagaagaaaccaaaggtcggttgtactaaatgtatatatatagatacttctataaagtcactgctgaagacaa

SEQ ID NO: 183146 - DNA, 2301 bp, Homo sapiens
  Payload ID: 16081
  Gene Symbol: SLC2A6
  Gene Name: solute carrier family 2 (facilitated glucose transporter), member 6
  Uniprot ID: Q9UGQ3
  ENST ID: ENST00000371897
  CDS Start-End: 38-1375
ctgagcgccctccgctcgccccgagagagacccggccatgcaggagccgctgctgggagccgagggcccggactacgacaccttccccgagaagccgcccccgtcgccaggggacagggcgcgggtcgggaccctgcagaacaaaagggtgttcctggccaccttcgccgcagtgctcggcaatttcagctttgggtatgccctggtctacacatcccctgtcatcccagccctggagcgctccttggatcctgacctgcatctgaccaaatcccaggcatcctggtttgggtccgtgttcaccctgggagcagcggccggaggcctgagtgccatgatcctcaacgacctcctgggccggaagctgagcatcatgttctcagctgtgccgtcggcggccggctatgcgctcatggcgggtgcgcacggcctctggatgctgctgctcggaaggacgctgacgggcttcgccggggggctcacagctgcctgcatcccggtgtacgtgtctgagattgctcccccaggcgttcgtggggctctgggggccacaccccagctcatggcagtgttcggatccctgtccctctacgcccttggcctcctgctgccgtggcgctggctggctgtggccggggaggcgcctgtgctcatcatgatcctgctgctcagcttcatgcccaactcgccgcgcttcctgctctctcggggcagggacgaagaggccctgcgggcgctggcctggctgcgtgggacggacgtcgatgtccactgggagttcgagcagatccaggacaacgtccggagacagagcagccgagtatcgtgggctgaggcacgggccccacacgtgtgccggcccatcaccgtggccttgctgatgcgcctcctgcagcagctgacgggcatcacgcccatcctggtctacctgcagtccatcttcgacagcaccgctgtcctgctgccccccaaggacgacgcagccatcgttggggccgtgcggctcctgtccgtgctgatcgccgccctcaccatggacctcgcaggccgcaaggtgctgctcttcgtctcaggctacgccgtgggctggggtcccatcacctggctgctcatgtctgaggtcctgcccctgcgtgcccgtggcgtggcctcagggctctgcgtgctggccagctggctcaccgccttcgtcctcaccaagtccttcctgccagtggtgagcaccttcggcctccaggtgcctttcttcttcttcgcggccatctgcttggtgagcctggtgttcacaggctgctgtgtgcccgagaccaagggacggtccctggagcagatcgagtccttcttccgcacggggagaaggtccttcttgcgctaggtcaaggtccccgcctggagggggccaaacccccagtggctgggcctctgtgttggctacaaacctgcaccctgggaccaagaggcagcagtcatccctgccaccagccagagcacaggaagagcagtgtgatggggcctcagcagcgggtgcccctggctcgggacaggtagcactgctgtccagccacagccccagcccaggcagcccacagtgctgcacgtagccatgggccgcaggagtgcatacaaccctgcatccagggacacggccctgctgggtgacctcaggcctagtccctttcccttgcgtgaaggacacgccccacagaaggctacggggaggactgagaggacagggctggaggcagccaagtaacgtagtcatatcatcgcgctctgatctggtggcatctggctgtgcaaggaagacccggctttgccctcacaagtcttatgggcaccacagggaacatcctggacttaaaaagccagggcaggccgggcacagtggctcacgcctgtaatcccagcactttgggaggccaaagcaggtggattacccaaggccaggagttcaagaccagcctggccaacatggtgaaaccccgtctctactaaaaaatacaaaaaagctgggtgtggtggcacacacccgtagttccagctacttgggaggctgaggcagcattgcttgaacccgggaggtggaggctgcaatgagctgagatcatgccattgcactccagcctgggcaacgagagtgaaactccgtccccaccccctgccaaaaaaaaaaaaaaaaaagccagggcaaaggacctggcgtggccacttcctcctgccccagcccaacctctgggaacaggcagctcctatctgcaaactgtgttcacccttttgtaaaaataaaggaactggacctgt

SEQ ID NO: 183147 - DNA, 2528 bp, Homo sapiens
  Payload ID: 16081
  Gene Symbol: SLC2A6
  Gene Name: solute carrier family 2 (facilitated glucose transporter), member 6
  Uniprot ID: Q9UGQ3
  ENST ID: ENST00000371899
  CDS Start-End: 79-1602
cggtgccctcggagctgctggccccgggcggctgctccagtctgagcgccctccgctcgccccgagagagacccggccatgcaggagccgctgctgggagccgagggcccggactacgacaccttccccgagaagccgcccccgtcgccaggggacagggcgcgggtcgggaccctgcagaacaaaagggtgttcctggccaccttcgccgcagtgctcggcaatttcagctttgggtatgccctggtctacacatcccctgtcatcccagccctggagcgctccttggatcctgacctgcatctgaccaaatcccaggcatcctggtttgggtccgtgttcaccctgggagcagcggccggaggcctgagtgccatgatcctcaacgacctcctgggccggaagctgagcatcatgttctcagctgtgccgtcggcggccggctatgcgctcatggcgggtgcgcacggcctctggatgctgctgctcggaaggacgctgacgggcttcgccggggggctcacagctgcctgcatcccggtgtacgtgtctgagattgctcccccaggcgttcgtggggctctgggggccacaccccagctcatggcagtgttcggatccctgtccctctacgcccttggcctcctgctgccgtggcgctggctggctgtggccggggaggcgcctgtgctcatcatgatcctgctgctcagcttcatgcccaactcgccgcgcttcctgctctctcggggcagggacgaagaggccctgcgggcgctggcctggctgcgtgggacggacgtcgatgtccactgggagttcgagcagatccaggacaacgtccggagacagagcagccgagtatcgtgggctgaggcacgggccccacacgtgtgccggcccatcaccgtggccttgctgatgcgcctcctgcagcagctgacgggcatcacgcccatcctggtctacctgcagtccatcttcgacagcaccgctgtcctgctgccccccaaggacgacgcagccatcgttggggccgtgcggctcctgtccgtgctgatcgccgccctcaccatggacctcgcaggccgcaaggtgctgctcttcgtctcagcggccatcatgtttgctgccaacctgactctggggctgtacatccactttggccccaggcctctgagccccaacagcactgcgggcctggaaagcgagtcctggggggacttggcgcagcccctggcagcacccgctggctacctcaccctggtgcccctgctggccaccatgctcttcatcatgggctacgccgtgggctggggtcccatcacctggctgctcatgtctgaggtcctgcccctgcgtgcccgtggcgtggcctcagggctctgcgtgctggccagctggctcaccgccttcgtcctcaccaagtccttcctgccagtggtgagcaccttcggcctccaggtgcctttcttcttcttcgcggccatctgcttggtgagcctggtgttcacaggctgctgtgtgcccgagaccaagggacggtccctggagcagatcgagtccttcttccgcacggggagaaggtccttcttgcgctaggtcaaggtccccgcctggagggggccaaacccccagtggctgggcctctgtgttggctacaaacctgcaccctgggaccaagaggcagcagtcatccctgccaccagccagagcacaggaagagcagtgtgatggggcctcagcagcgggtgcccctggctcgggacaggtagcactgctgtccagccacagccccagcccaggcagcccacagtgctgcacgtagccatgggccgcaggagtgcatacaaccctgcatccagggacacggccctgctgggtgacctcaggcctagtccctttcccttgcgtgaaggacacgccccacagaaggctacggggaggactgagaggacagggctggaggcagccaagtaacgtagtcatatcatcgcgctctgatctggtggcatctggctgtgcaaggaagacccggctttgccctcacaagtcttatgggcaccacagggaacatcctggacttaaaaagccagggcaggccgggcacagtggctcacgcctgtaatcccagcactttgggaggccaaagcaggtggattacccaaggccaggagttcaagaccagcctggccaacatggtgaaaccccgtctctactaaaaaatacaaaaaagctgggtgtggtggcacacacccgtagttccagctacttgggaggctgaggcagcattgcttgaacccgggaggtggaggctgcaatgagctgagatcatgccattgcactccagcctgggcaacgagagtgaaactccgtccccaccccctgccaaaaaaaaaaaaaaaaaagccagggcaaaggacctggcgtggccacttcctcctgccccagcccaacctctgggaacaggcagctcctatctgcaaactgtgttcacccttttgtaaaaataaaggaactggacctgt

SEQ ID NO: 183148 - DNA, 588 bp, Homo sapiens
  Payload ID: 16081
  Gene Symbol: SLC2A6
  Gene Name: solute carrier family 2 (facilitated glucose transporter), member 6
  ENST ID: ENST00000414172
  CDS Start-End: 151-588
cgagagagacccggccatgcaggagccgctgctgggagccgagggcccggactacgacaccttccccgagaagccgcccccgtcgccaggggacagggcgcgggtcggtccgtgttcaccctgggagcagcggccggaggcctgagtgccatgatcctcaacgacctcctgggccggaagctgagcatcatgttctcagctgtgccgtcggcggccggctatgcgctcatggcgggtgcgcacggcctctggatgctgctgctcggaaggacgctgacgggcttcgccggggggctcacagctgcctgcatcccggggctgactctcccatctcggccgggcctaggaaccagtattttcagcaaaacctggtgcggcggctgtgtcttgcaggtgtacgtgtctgagattgctcccccaggcgttcgtggggctctgggggccacaccccagctcatggcagtgttcggatccctgtccctctacgcccttggcaaggacgaagaggccctgcgggcgctggcctggctgcgtgggacggacgtcgatgtccactgggagttcgagcagatccaggacaacgtccgg

SEQ ID NO: 183149 - DNA, 727 bp, Homo sapiens
  Payload ID: 16081
  Gene Symbol: SLC2A6
  Gene Name: solute carrier family 2 (facilitated glucose transporter), member 6
  ENST ID: ENST00000432868
  CDS Start-End: 69-727
ggagctgctggccccgggcggctgctccagtctgagcgccctccgctcgccccgagagagacccggccatgcaggagccgctgctgggagccgagggcccggactacgacaccttccccgagaagccgcccccgtcgccaggggacagggcgcgggtcgggaccctgcagaacaaaagggtgttcctggccaccttcgccgcagtgctcggcaatttcagctttgggtatgccctggtctacacatcccctgtcatcccagccctggagcgctccttggatcctgacctgcatctgaccaaatcccaggcatcctggtttgggtccgtgttcaccctgggagcagcggccggaggcctgagtgccatgatcctcaacgacctcctgggccggaagctgagcatcatgttctcagctgtgccgtcggcggccggctatgcgctcatggcgggtgcgcacggcctctggatgctgctgctcggaaggacgctgacgggcttcgccggggggctcacagctgcctgcatcccggtgtacgtgtctgagattgctcccccaggcgttcgtggggctctgggggccacaccccagctcatggcagtgttcggatccctgtccctctacgcccttgggacgaagaggccctgcgggcgctggcctggctgcgtgggacggacgtcgatgtccactgggagttcgagcagatccaggacaacgtccggagacag

SEQ ID NO: 183150 - DNA, 2301 bp, Homo sapiens; identical to SEQ ID NO: 183146
  Payload ID: 16081
  Gene Symbol: SLC2A6
  Gene Name: Solute carrier family 2 (facilitated glucose transporter), member 6
  ENST ID: ENST00000625425
  CDS Start-End: 38-1375

SEQ ID NO: 183151 - DNA, 727 bp, Homo sapiens; identical to SEQ ID NO: 183149
  Payload ID: 16081
  Gene Symbol: SLC2A6
  Gene Name: Solute carrier family 2 (facilitated glucose transporter), member 6
  ENST ID: ENST00000625489
  CDS Start-End: 69-727

SEQ ID NO: 183152 - DNA, 2528 bp, Homo sapiens; identical to SEQ ID NO: 183147
  Payload ID: 16081
  Gene Symbol: SLC2A6
  Gene Name: Solute carrier family 2 (facilitated glucose transporter), member 6
  ENST ID: ENST00000626271
  CDS Start-End: 79-1602

SEQ ID NO: 183153 - DNA, 588 bp, Homo sapiens; identical to SEQ ID NO: 183148
  Payload ID: 16081
  Gene Symbol: SLC2A6
  Gene Name: Solute carrier family 2 (facilitated glucose transporter), member 6
  ENST ID: ENST00000627959
  CDS Start-End: 151-588

SEQ ID NO: 183154 - DNA, 1539 bp, Homo sapiens
  Payload ID: 16082
  Gene Symbol: SLC2A7
  Gene Name: solute carrier family 2 (facilitated glucose transporter), member 7
  Uniprot ID: Q6PXP3
  ENST ID: ENST00000400906
  CDS Start-End: 1-1539
atggagaacaaagaggcgggaacccctccacccattccatccagggaggggcggctccagccgacgctgttgctggcgacactgagcgcggcctttggctcagccttccagtacggctacaacctctctgtggtcaacacgccgcacaaggtcttcaagtcattttacaacgaaacctactttgagcgacacgcaacattcatggacgggaagctcatgctgcttctatggtcttgcaccgtctccatgtttcctctgggcggcctgttggggtcattgctcgtgggcctgctggttgatagctgcggcagaaaggggaccctgctgatcaacaacatctttgccatcatccccgccatcctgatgggagtcagcaaagtggccaaggcttttgagctgatcgtcttttcccgagtggtgctgggagtctgtgcaggcatctcctacagcgcccttcccatgtacctgggagaactggcccccaagaacctgagaggcatggtgggaacaatgaccgaggttttcgtcatcgttggagtcttcctagcacagatcttcagcctccaggccatcttgggcaacccggcaggctggccggtgcttctggcgctcacaggggtgcccgccctgctgcagctgctgaccctgcccttcttccccgaaagcccccgctactccctgattcagaaaggagatgaagccacagcgcgacaagctctgaggaggctgagaggccacacggacatggaggccgagctggaggacatgcgtgcggaggcccgggccgagcgcgccgagggccacctgtctgtgctgcacctctgtgccctgcggtccctgcgctggcagctcctctccatcatcgtgctcatggccggccagcagctgtcgggcatcaatgcgatcaactactatgcggacaccatctacacatctgcgggcgtggaggccgctcactcccaatatgtaacggtgggctctggcgtcgtcaacatagtgatgaccatcacctcggctgtccttgtggagcggctgggacggcggcacctcctgctggccggctacggcatctgcggctctgcctgcctggtgctgacggtggtgctcctattccagaacagggtccccgagctgtcctacctcggcatcatctgtgtctttgcctacatcgcgggacattccattgggcccagtcctgtcccctcggtggtgaggaccgagatcttcctgcagtcctcccggcgggcagctttcatggtggacggggcagtgcactggctcaccaacttcatcataggcttcctgttcccatccatccaggaggccatcggtgcctacagtttcatcatctttgccggaatctgcctcctcactgcgatttacatctacgtggttattccggagaccaagggcaaaacatttgtggagataaaccgcatttttgccaagagaaacagggtgaagcttccagaggagaaagaagaaaccattgatgctgggcctcccacagcctctcctgccaaggaaacttccttttag

SEQ ID NO: 183155 - DNA, 914 bp, Homo sapiens
  Payload ID: 16083
  Gene Symbol: SLC2A8
  Gene Name: solute carrier family 2 (facilitated glucose transporter), member 8
  ENST ID: ENST00000373352
  CDS Start-End: 228-872
ccgacatgacgcccgaggacccagaggaaacccagccgcttctggggcctcctggcggcaggtctacatctccgaaatcgcctacccagcagtccgggggttgctcggctcctgtgtgcagctaatggtcgtcgtcggcatcctcctggcctacctggcagagctttcacctggccctgctgcggcagcccggcatctacaagcccttcatcatcggcgtctccctgatggccttccagcagctgtcgggggtcaacgccgtcatgttctatgcagagaccatctttgaagaggccaagttcaaggacagcagcctggcctcggtcgtcgtgggtgtcatccaggtgctgttcacagctgtggcggctctcatcatggacagagcagggcggaggctgctcctggtcttgtcaggtgtggtcatggtgttcagcacgagtgccttcggcgcctacttcaagctgacccagggtggccctggcaactcctcgcacgtggccatctcggcgcctgtctctgcacagcctgttgatgccagcgtggggctggcctggctggccgtgggcagcatgtgcctcttcatcgccggctttgcggtgggctgggggcccatcccctggctcctcatgtcagagatcttccctctgcatgtcaagggcgtggcgacaggcatctgcgtcctcaccaactggctcatggcctttctcgtgaccaaggagttcagcagcctcatggaggtcctcaggccctatggagccttctggcttgcctccgctttctgcatcttcagtgtccttttcactttgttctgtgtccctgaaactaaaggaaagactctggaacaaatcacagcccattttgaggggcgatgacagccactcactaggggatggagcaagcctgtgactccaagc

SEQ ID NO: 183156 - DNA, 1937 bp, Homo sapiens
  Payload ID: 16083
  Gene Symbol: SLC2A8
  Gene Name: solute carrier family 2 (facilitated glucose transporter), member 8
  ENST ID: ENST00000373360
  CDS Start-End: 1-1236
atgacgcccgaggacccagaggaaacccagccgcttctggggcctcctggcggcagcgcgccccgcggccgccgcgtcttcctcgccgccttcgccgctgccctgggcccactcagcttcggcttcgcgctcggctacagctccccggccatccctagcctgcagcgcgccgcgcccccggccccgcgcctggacgacgccgccgcctcctggttcggggctgtcgtgaccctgggtgccgcggcggggggagtgctgggcggctggctggtggaccgcgccgggcgcaagctgagcctcttgctgtgctccgtgcccttcgtggccggctttgccgtcatcaccgcggcccaggacgtgtggatgctgctggggggccgcctcctcaccggcctggcctgcggtgttgcctccctagtggccccggtctacatctccgaaatcgcctacccagcagtccgggggttgctcggctcctgtgtgcagctaatggtcgtcgtcggcatcctcctggcctacctggcaggctgggtgctggagtggcgctggctggctgtgctgggctgcgtgcccccctccctcatgctgcttctcatgtgcttcatgcccgagaccccgcgcttcctgctgactcagcacaggcgccaggaggccatggccgccctgcggttcctgtggggctccgagcagggctgggaagacccccccatcggggctgagcagagctttcacctggccctgctgcggcagcccggcatctacaagcccttcatcatcggcgtctccctgatggccttccagcagctgtcgggggtcaacgccgtcatgttctatgcagagaccatctttgaagaggccaagttcaaggacagcagcctggcctcggtcgtcgtgggtgtcatccaggtgctgttcacagctgtggcggctctcatcatggacagagcagggcggaggctgctcctggtcttgtcaggtgtggtcatggtgttcagcacgagtgccttcggcgcctacttcaagctgacccagggtggccctggcaactcctcgcacgtggccatctcggcgcctgtctctgcacagcctgttgatgccagcgtggggctggcctggctggccgtgggcagcatgtgcctcttcatcgccggaggtcctcaggccctatggagccttctggcttgcctccgctttctgcatcttcagtgtccttttcactttgttctgtgtccctgaaactaaaggaaagactctggaacaaatcacagcccattttgaggggcgatgacagccactcactaggggatggagcaagcctgtgactccaagctgggcccaagcccagagcccctgcctgccccaggggagccagaatccagccccttggagccttggtctgcagggtccctccttcctgtcatgctccctccagcccatgacccggggctaggaggctcactgcctcctgttccagctcctgctgctgctctgaggactcaggaacaccttcgagctttgcagacctgcggtcagccctccatgcgcaagactaaagcagcggaagaggaggtgggcctctaggatctttgtcttctggctggaggtgcttttggaggttgggtgctgggcattcagtcgctcctctcacgcggctgccttatcgggaaggaaatttgtttgccaaataaagactgacacagaaaatcaggtcagtgtctctgggctttgtgcaagctcagtttgaaaagggtttattcccatcactgcccaggacaccctgtggctttacttgctcatggtcagccaagcttacccttcacactgagaagtcatttctggctacttccttgggctcagttccctgggtcatcagccatcaaatcttgttgagtttaaaaaataaacagcaaaaaaaaacaaaacaaaacaaaaaaaaa

SEQ ID NO: 183157 - DNA, 2172 bp, Homo sapiens
  Payload ID: 16083
  Gene Symbol: SLC2A8
  Gene Name: solute carrier family 2 (facilitated glucose transporter), member 8
  Uniprot ID: Q9NY64
  ENST ID: ENST00000373371
  CDS Start-End: 90-1523
attggctgcgagaggccggtgcgggccgcactcgcagggcccgtggcggttcaggcgccagagctggccgatcggcgttggccgccgacatgacgcccgaggacccagaggaaacccagccgcttctggggcctcctggcggcagcgcgccccgcggccgccgcgtcttcctcgccgccttcgccgctgccctgggcccactcagcttcggcttcgcgctcggctacagctccccggccatccctagcctgcagcgcgccgcgcccccggccccgcgcctggacgacgccgccgcctcctggttcggggctgtcgtgaccctgggtgccgcggcggggggagtgctgggcggctggctggtggaccgcgccgggcgcaagctgagcctcttgctgtgctccgtgcccttcgtggccggctttgccgtcatcaccgcggcccaggacgtgtggatgctgctggggggccgcctcctcaccggcctggcctgcggtgttgcctccctagtggccccggtctacatctccgaaatcgcctacccagcagtccgggggttgctcggctcctgtgtgcagctaatggtcgtcgtcggcatcctcctggcctacctggcaggctgggtgctggagtggcgctggctggctgtgctgggctgcgtgcccccctccctcatgctgcttctcatgtgcttcatgcccgagaccccgcgcttcctgctgactcagcacaggcgccaggaggccatggccgccctgcggttcctgtggggctccgagcagggctgggaagacccccccatcggggctgagcagagctttcacctggccctgctgcggcagcccggcatctacaagcccttcatcatcggcgtctccctgatggccttccagcagctgtcgggggtcaacgccgtcatgttctatgcagagaccatctttgaagaggccaagttcaaggacagcagcctggcctcggtcgtcgtgggtgtcatccaggtgctgttcacagctgtggcggctctcatcatggacagagcagggcggaggctgctcctggtcttgtcaggtgtggtcatggtgttcagcacgagtgccttcggcgcctacttcaagctgacccagggtggccctggcaactcctcgcacgtggccatctcggcgcctgtctctgcacagcctgttgatgccagcgtggggctggcctggctggccgtgggcagcatgtgcctcttcatcgccggctttgcggtgggctgggggcccatcccctggctcctcatgtcagagatcttccctctgcatgtcaagggcgtggcgacaggcatctgcgtcctcaccaactggctcatggcctttctcgtgaccaaggagttcagcagcctcatggaggtcctcaggccctatggagccttctggcttgcctccgctttctgcatcttcagtgtccttttcactttgttctgtgtccctgaaactaaaggaaagactctggaacaaatcacagcccattttgaggggcgatgacagccactcactaggggatggagcaagcctgtgactccaagctgggcccaagcccagagcccctgcctgccccaggggagccagaatccagccccttggagccttggtctgcagggtccctccttcctgtcatgctccctccagcccatgacccggggctaggaggctcactgcctcctgttccagctcctgctgctgctctgaggactcaggaacaccttcgagctttgcagacctgcggtcagccctccatgcgcaagactaaagcagcggaagaggaggtgggcctctaggatctttgtcttctggctggaggtgcttttggaggttgggtgctgggcattcagtcgctcctctcacgcggctgccttatcgggaaggaaatttgtttgccaaataaagactgacacagaaaatcaggtcagtgtctctgggctttgtgcaagctcagtttgaaaagggtttattcccatcactgcccaggacaccctgtggctttacttgctcatggtcagccaagcttacccttcacactgagaagtcatttctggctacttccttgggctcagttccctgggtcatcagccatcaaatcttgttgagtttaaaaaataaacagcaaaaaaaaacaaaacaaaacaaaaaaaaa

SEQ ID NO: 183158 - DNA, 933 bp, Homo sapiens
  Payload ID: 16083
  Gene Symbol: SLC2A8
  Gene Name: solute carrier family 2 (facilitated glucose transporter), member 8
  ENST ID: ENST00000423934
  CDS Start-End: 132-933
caggcctgggggcgcggctccccctggcgggaccttctgggtgccaggcttgaagtccctgcgttatctcgcggtccctcccgtcgaccctgggaaggatcctactgttctctccattttacactgaggtcatgacatgcagtctcggaaaggtctacatctccgaaatcgcctacccagcagtccgggggttgctcggctcctgtgtgcagctaatggtcgtcgtcggcatcctcctggcctacctggcaggctgggtgctggagtggcgctggctggctgtgctgggctgcgtgcccccctccctcatgctgcttctcatgtgcttcatgcccgagaccccgcgcttcctgctgactcagcacaggcgccaggaggccatggccgccctgcggttcctgtggggctccgagcagggctgggaagacccccccatcggggctgagcagagctttcacctggccctgctgcggcagcccggcatctacaagcccttcatcatcggcgtctccctgatggccttccagcagctgtcgggggtcaacgccgtcatgttctatgcagagaccatctttgaagaggccaagttcaaggacagcagcctggcctcggtcgtcgtgggtgtcatccaggtgctgttcacagctgtggcggctctcatcatggacagagcagggcggaggctgctcctggtcttgtcaggtgtggtcatggtgttcagcacgagtgccttcggcgcctacttcaagctgacccagggtggccctggcaactcctcgcacgtggccatctcggcgcctgtctctgcacagcctgttgatgccagcgtggggctggcctggctggccgtgggcagcatgtgcctcttcatcgccggctttgcggtgggctgggggcccatcccctggctcctcatgtcagagatcttccctc

SEQ ID NO: 183159 - DNA, 1030 bp, Homo sapiens
  Payload ID: 16083
  Gene Symbol: SLC2A8
  Gene Name: solute carrier family 2 (facilitated glucose transporter), member 8
  ENST ID: ENST00000430147
  CDS Start-End: 1-831
cagctaatggtcgtcgtcggcatcctcctggcctacctggcaggctgggtgctggagtggcgctggctggctgtgctgggctgcgtgcccccctccctcatgctgcttctcatgtgcttcatgcccgagaccccgcgcttcctgctgactcagcacaggcgccaggaggccatggccgccctgcggttcctgtggggctccgagcagggctgggaagacccccccatcggggctgagcagagctttcacctggccctgctgcggcagcccggcatctacaagcccttcatcatcggcgtctccctgatggccttccagcagctgtcgggggtcaacgccgtcatgttctatgcagagaccatctttgaagaggccaagttcaaggacagcagcctggcctcggtcgtcgtgggtgtcatccaggtgctgttcacagctgtggcggctctcatcatggacagagcagggcggaggctgctcctggtcttgtcaggtgtggtcatggtgttcagcacgagtgccttcggcgcctacttcaagctgacccagggtggccctggcaactcctcgcacgtggccatctcggcgcctgtctctgcacagcctgttgatgccagcgtggggctggcctggctggccgtgggcagcatgtgcctcttcatcgccggctttgcggtgggctgggggcccatcccctggctcctcatgtcagagatcttccctctgcatgtcaagggcgtggcgacaggcatctgcgtcctcaccaactggctcatggcctttctcgtgaccaaggagttcagcagcctcatgctcctgctgctgctctgaggactcaggaacaccttcgagctttgcagacctgcggtcagccctccatgcgcaagactaaagcagcggaagaggaggtgggcctctaggatctttgtcttctggctggaggtgcttttggaggttgggtgctgggcattcagtcgctcctctcacgcggctgccttatcgggaaggaaatttgtttgccaaataaaga

SEQ ID NO: 183160 - DNA, 992 bp, Homo sapiens
  Payload ID: 16083
  Gene Symbol: SLC2A8
  Gene Name: solute carrier family 2 (facilitated glucose transporter), member 8
  ENST ID: ENST00000451404
  CDS Start-End: 196-992
ggccggtgcgggccgcactcgcagggcccgtggcggttcaggcgccagagctggccgatcggcgttggccgccgacatgacgcccgaggacccagaggaaacccagccgcttctggggcctcctggcggcaggtctacatctccgaaatcgcctacccagcagtccgggggttgctcggctcctgtgtgcagctaatggtcgtcgtcggcatcctcctggcctacctggcaggctgggtgctggagtggcgctggctggctgtgctgggctgcgtgcccccctccctcatgctgcttctcatgtgcttcatgcccgagaccccgcgcttcctgctgactcagcacaggcgccaggaggccatggccgccctgcggttcctgtggggctccgagcagggctgggaagacccccccatcggggctgagcagagctttcacctggccctgctgcggcagcccggcatctacaagcccttcatcatcggcgtctccctgatggccttccagcagctgtcgggggtcaacgccgtcatgttctatgcagagaccatctttgaagaggccaagttcaaggacagcagcctggcctcggtcgtcgtgggtgtcatccaggtgctgttcacagctgtggcggctctcatcatggacagagcagggcggaggctgctcctggtcttgtcaggtgtggtcatggtgttcagcacgagtgccttcggcgcctacttcaagctgacccagggtggccctggcaactcctcgcacgtggccatctcggcgcctgtctctgcacagcctgttgatgccagcgtggggctggcctggctggccgtgggcagcatgtgcctcttcatcgccggctttgcggtgggctgggggcccatcccctggctcctcatgtcagagatcttccctctgcatgtcaagggcgtggcgacaggcatctgcgtcctcaccaactggctcatggcctttctcgtgaccaaggagttcag

SEQ ID NO: 183161 - DNA, 854 bp, Homo sapiens
  Payload ID: 16083
  Gene Symbol: SLC2A8
  Gene Name: solute carrier family 2 (facilitated glucose transporter), member 8
  ENST ID: ENST00000439597
  CDS Start-End: 132-854
caggcctgggggcgcggctccccctggcgggaccttctgggtgccaggcttgaagtccctgcgttatctcgcggtccctcccgtcgaccctgggaaggatcctactgttctctccattttacactgaggtcatgacatgcagtctcggaaaggtctacatctccgaaatcgcctacccagcagtccgggggttgctcggctcctgtgtgcagctaatggtcgtcgtcggcatcctcctggcctacctggcaggctgggtgctggagtggcgctggctggctgtgctgggctgcgtgcccccctccctcatgctgcttctcatgtgcttcatgcccgagaccccgcgcttcctgctgactcagcacaggcgccaggaggccatggccgccctgcggttcctgtggggctccgagcagggctgggaagacccccccatcggggctgagcagcagctgtcgggggtcaacgccgtcatgttctatgcagagaccatctttgaagaggccaagttcaaggacagcagcctggcctcggtcgtcgtgggtgtcatccaggtgctgttcacagctgtggcggctctcatcatggacagagcagggcggaggctgctcctggtcttgtcaggtgtggtcatggtgttcagcacgagtgccttcggcgcctacttcaagctgacccagggtggccctggcaactcctcgcacgtggccatctcggcgcctgtctctgcacagcctgttgatgccagcgtggggctggcctggctggccgtgggcagcatgtgcctcttcatcgccggctttgcggtgggctgggggcccatcccctggctcctcatgtcagagatcttccct

SEQ ID NO: 183162 - DNA, 793 bp, Homo sapiens
  Payload ID: 16083
  Gene Symbol: SLC2A8
  Gene Name: solute carrier family 2 (facilitated glucose transporter), member 8
  ENST ID: ENST00000419917
  CDS Start-End: 25-793
ggccgatcggcgttggccgccgacatgacgcccgaggacccagaggaaacccagccgcttctggggcctcctggcggcagcgcgccccgcggccgccgcgtcttcctcgccgccttcgccgctgccctgggcccactcagcttcggcttcgcgctcggctacagctccccggccatccctagcctgcagcgcgccgcgcccccggccccgcgcctggacgacgccgccgcctcctggttcggggtctacatctccgaaatcgcctacccagcagtccgggggttgctcggctcctgtgtgcagctaatggtcgtcgtcggcatcctcctggcctacctggcaggctgggtgctggagtggcgctggctggctgtgctgggctgcgtgcccccctccctcatgctgcttctcatgtgcttcatgcccgagaccccgcgcttcctgctgactcagcacaggcgccaggaggccatggccgccctgcggttcctgtggggctccgagcagggctgggaagacccccccatcggggctgagcagagctttcacctggccctgctgcggcagcccggcatctacaagcccttcatcatcggcgtctccctgatggccttccagcagctgtcgggggtcaacgccgtcatgttctatgcagagaccatctttgaagaggccaagttcaaggacagcagcctggcctcggtcgtcgtgggtgtcatccaggtgctgttcacagctgtggcggctctcatcatggacagagcagggcggaggctgctcctggtcttgtcag

SEQ ID NO: 183163 - DNA, 506 bp, Homo sapiens
  Payload ID: 16083
  Gene Symbol: SLC2A8
  Gene Name: solute carrier family 2 (facilitated glucose transporter), member 8
  ENST ID: ENST00000419132
  CDS Start-End: 1-506
gcggccgccgcgtcttcctcgccgccttcgccgctgccctgggcccactcagcttcggcttcgcgctcggctacagctccccggccatccctagcctgcagcgcgccgcgcccccggccccgcgcctggacgacgccgccgcctcctggttcggggtctacatctccgaaatcgcctacccagcagtccgggggttgctcggctcctgtgtgcagctaatggtcgtcgtcggcatcctcctggcctacctggcaggctgggtgctggagtggcgctggctggctgtgctgggctgcgtgcccccctccctcatgctgcttctcatgtgcttcatgcccgagaccccgcgcttcctgctgactcagcacaggcgccaggaggccatggccgccctgcggttcctgtggggctccgagcagggctgggaagacccccccatcggggctgagcagcagctgtcgggggtcaacgccgtcatgttctatgcagagaccatctttgaagag

SEQ ID NO: 183164 - DNA, 1763 bp, Homo sapiens
  Payload ID: 16083
  Gene Symbol: SLC2A8
  Gene Name: solute carrier family 2 (facilitated glucose transporter), member 8
  ENST ID: ENST00000610552
  CDS Start-End: 213-1157
gcccattggctgcgagaggccggtgcgggccgcactcgcagggcccgtggcggttcaggcgccagagctggccgatcggcgttggccgccgacatgacgcccgaggacccagaggaaacccagccgcttctggggcctcctggcggcaggtctacatctccgaaatcgcctacccagcagtccgggggttgctcggctcctgtgtgcagctaatggtcgtcgtcggcatcctcctggcctacctggcaggctgggtgctggagtggcgctggctggctgtgctgggctgcgtgcccccctccctcatgctgcttctcatgtgcttcatgcccgagaccccgcgcttcctgctgactcagcacaggcgccaggaggccatggccgccctgcggttcctgtggggctccgagcagggctgggaagacccccccatcggggctgagcagagctttcacctggccctgctgcggcagcccggcatctacaagcccttcatcatcggcgtctccctgatggccttccagcagctgtcgggggtcaacgccgtcatgttctatgcagagaccatctttgaagaggccaagttcaaggacagcagcctggcctcggtcgtcgtgggtgtcatccaggtgctgttcacagctgtggcggctctcatcatggacagagcagggcggaggctgctcctggtcttgtcaggtgtggtcatggtgttcagcacgagtgccttcggcgcctacttcaagctgacccagggtggccctggcaactcctcgcacgtggccatctcggcgcctgtctctgcacagcctgttgatgccagcgtggggctggcctggctggccgtgggcagcatgtgcctcttcatcgccggctttgcggtgggctgggggcccatcccctggctcctcatgtcagagatcttccctctgcatgtcaagggcgtggcgacaggcatctgcgtcctcaccaactggctcatggcctttctcgtgaccaaggagttcagcagcctcatggaggtcctcaggccctatggagccttctggcttgcctccgctttctgcatcttcagtgtccttttcactttgttctgtgtccctgaaactaaaggaaagactctggaacaaatcacagcccattttgaggggcgatgacagccactcactaggggatggagcaagcctgtgactccaagctgggcccaagcccagagcccctgcctgccccaggggagccagaatccagccccttggagccttggtctgcagggtccctccttcctgtcatgctccctccagcccatgacccggggctaggaggctcactgcctcctgttccagctcctgctgctgctctgaggactcaggaacaccttcgagctttgcagacctgcggtcagccctccatgcgcaagactaaagcagcggaagaggaggtgggcctctaggatctttgtcttctggctggaggtgcttttggaggttgggtgctgggcattcagtcgctcctctcacgcggctgccttatcgggaaggaaatttgtttgccaaataaagactgacacagaaaatcaggtcagtgtctctgggctttgtgcaagctcagtttgaaaagggtttattcccatcactgcccaggacaccctgtggctttacttgctcatggtcagccaagcttacccttcacactgagaagtcatttctggctacttccttgggctcagttccctgggtcatcagccatcaaatcttgttgagttt

SEQ ID NO: 183165 - DNA, 1850 bp, Homo sapiens
  Payload ID: 16084
  Gene Symbol: SLC2A9
  Gene Name: solute carrier family 2 (facilitated glucose transporter), member 9
  Uniprot ID: Q9NRM0
  ENST ID: ENST00000264784
  CDS Start-End: 55-1677
cttggcagagtctggggtccctggactgagccatcagctgggtcactgagacccatggcaaggaaacaaaataggaattccaaggaactgggcctagttcccctcacagatgacaccagccacgccgggcctccagggccagggagggcactgctggagtgtgaccacctgaggagtggggtgccaggtggaaggagaagaaaggactggtcctgctcgctcctcgtggcctccctcgcgggcgccttcggctcctccttcctctacggctacaacctgtcggtggtgaatgcccccaccccgtacatcaaggccttttacaatgagtcatgggaaagaaggcatggacgtccaatagacccagacactctgactttgctctggtctgtgactgtgtccatattcgccatcggtggacttgtggggacgttaattgtgaagatgattggaaaggttcttgggaggaagcacactttgctggccaataatgggtttgcaatttctgctgcattgctgatggcctgctcgctccaggcaggagcctttgaaatgctcatcgtgggacgcttcatcatgggcatagatggaggcgtcgccctcagtgtgctccccatgtaccttagtgagatctcacccaaggagatccgtggctctctggggcaggtgactgccatctttatctgcattggcgtgttcactgggcagcttctgggcctgcccgagctgctgggaaaggagagtacctggccatacctgtttggagtgattgtggtccctgccgttgtccagctgctgagccttccctttctcccggacagcccacgctacctgctcttggagaagcacaacgaggcaagagctgtgaaagccttccaaacgttcttgggtaaagcagacgtttcccaagaggtagaggaggtcctggctgagagccgcgtgcagaggagcatccgcctggtgtccgtgctggagctgctgagagctccctacgtccgctggcaggtggtcaccgtgattgtcaccatggcctgctaccagctctgtggcctcaatgcaatttggttctataccaacagcatctttggaaaagctgggatccctccggcaaagatcccatacgtcaccttgagtacagggggcatcgagactttggctgccgtcttctctggtttggtcattgagcacctgggacggagacccctcctcattggtggctttgggctcatgggcctcttctttgggaccctcaccatcacgctgaccctgcaggaccacgccccctgggtcccctacctgagtatcgtgggcattctggccatcatcgcctctttctgcagtgggccaggtggcatcccgttcatcttgactggtgagttcttccagcaatctcagcggccggctgccttcatcattgcaggcaccgtcaactggctctccaactttgctgttgggctcctcttcccattcattcagaaaagtctggacacctactgtttcctagtctttgctacaatttgtatcacaggtgctatctacctgtattttgtgctgcctgagaccaaaaacagaacctatgcagaaatcagccaggcattttccaaaaggaacaaagcatacccaccagaagagaaaatcgactcagctgtcactgatggtaagataaatggaaggccttaacaagtttcctcctccacgttggacaattatgtcaaaaacaggattgtctacatggatgatctcacttttcaggaaacttaaaatttacccattattgggaagcttaaatgaattgaagctatgcaagtcttttatattattaaatatttaaaagtaaacctgtactaatctaa

SEQ ID NO: 183166 - DNA, 1866 bp, Homo sapiens
  Payload ID: 16084
  Gene Symbol: SLC2A9
  Gene Name: solute carrier family 2 (facilitated glucose transporter), member 9
  Uniprot ID: Q9NRM0
  ENST ID: ENST00000309065
  CDS Start-End: 160-1695
gttggctctagggctggcaccaggcactggaattaaacattctggactccagaggggcatgaaaactcttcctgaaggagatgcagaggaagattcgaactggaggaaaaccctaaaataaacaataacaacaaaagttcaaaacctgaaaagtgaaccatgaagctcagtaaaaaggaccgaggagaagatgaagaaagtgattcagcgaaaaagaaattggactggtcctgctcgctcctcgtggcctccctcgcgggcgccttcggctcctccttcctctacggctacaacctgtcggtggtgaatgcccccaccccgtacatcaaggccttttacaatgagtcatgggaaagaaggcatggacgtccaatagacccagacactctgactttgctctggtctgtgactgtgtccatattcgccatcggtggacttgtggggacgttaattgtgaagatgattggaaaggttcttgggaggaagcacactttgctggccaataatgggtttgcaatttctgctgcattgctgatggcctgctcgctccaggcaggagcctttgaaatgctcatcgtgggacgcttcatcatgggcatagatggaggcgtcgccctcagtgtgctccccatgtaccttagtgagatctcacccaaggagatccgtggctctctggggcaggtgactgccatctttatctgcattggcgtgttcactgggcagcttctgggcctgcccgagctgctgggaaaggagagtacctggccatacctgtttggagtgattgtggtccctgccgttgtccagctgctgagccttccctttctcccggacagcccacgctacctgctcttggagaagcacaacgaggcaagagctgtgaaagccttccaaacgttcttgggtaaagcagacgtttcccaagaggtagaggaggtcctggctgagagccgcgtgcagaggagcatccgcctggtgtccgtgctggagctgctgagagctccctacgtccgctggcaggtggtcaccgtgattgtcaccatggcctgctaccagctctgtggcctcaatgcaatttggttctataccaacagcatctttggaaaagctgggatccctccggcaaagatcccatacgtcaccttgagtacagggggcatcgagactttggctgccgtcttctctggtttggtcattgagcacctgggacggagacccctcctcattggtggctttgggctcatgggcctcttctttgggaccctcaccatcacgctgaccctgcaggaccacgccccctgggtcccctacctgagtatcgtgggcattctggccatcatcgcctctttctgcagtgggccaggtggcatcccgttcatcttgactggtgagttcttccagcaatctcagcggccggctgccttcatcattgcaggcaccgtcaactggctctccaactttgctgttgggctcctcttcccattcattcagaaaagtctggacacctactgtttcctagtctttgctacaatttgtatcacaggtgctatctacctgtattttgtgctgcctgagaccaaaaacagaacctatgcagaaatcagccaggcattttccaaaaggaacaaagcatacccaccagaagagaaaatcgactcagctgtcactgatggtaagataaatggaaggccttaacaagtttcctcctccacgttggacaattatgtcaaaaacaggattgtctacatggatgatctcacttttcaggaaacttaaaatttacccattattgggaagcttaaatgaattgaagctatgcaagtcttttatattattaaatatttaaaagtaaacctgtactaatct

SEQ ID NO: 183167 - DNA, 1927 bp, Homo sapiens
  Payload ID: 16084
  Gene Symbol: SLC2A9
  Gene Name: solute carrier family 2 (facilitated glucose transporter), member 9
  Uniprot ID: Q9NRM0
  ENST ID: ENST00000506583
  CDS Start-End: 219-1754
ccatgaagagttctagcaccaagtcagtgcaagacccgaggtgttcctgttggctgagtgttggctctagggctggcaccaggcactggaattaaacattctggactccagaggggcatgaaaactcttcctgaaggagatgcagaggaagattcgaactggaggaaaaccctaaaataaacaataacaacaaaagttcaaaacctgaaaagtgaaccatgaagctcagtaaaaaggaccgaggagaagatgaagaaagtgattcagcgaaaaagaaattggactggtcctgctcgctcctcgtggcctccctcgcgggcgccttcggctcctccttcctctacggctacaacctgtcggtggtgaatgcccccaccccgtacatcaaggccttttacaatgagtcatgggaaagaaggcatggacgtccaatagacccagacactctgactttgctctggtctgtgactgtgtccatattcgccatcggtggacttgtggggacgttaattgtgaagatgattggaaaggttcttgggaggaagcacactttgctggccaataatgggtttgcaatttctgctgcattgctgatggcctgctcgctccaggcaggagcctttgaaatgctcatcgtgggacgcttcatcatgggcatagatggaggcgtcgccctcagtgtgctccccatgtaccttagtgagatctcacccaaggagatccgtggctctctggggcaggtgactgccatctttatctgcattggcgtgttcactgggcagcttctgggcctgcccgagctgctgggaaaggagagtacctggccatacctgtttggagtgattgtggtccctgccgttgtccagctgctgagccttccctttctcccggacagcccacgctacctgctcttggagaagcacaacgaggcaagagctgtgaaagccttccaaacgttcttgggtaaagcagacgtttcccaagaggtagaggaggtcctggctgagagccgcgtgcagaggagcatccgcctggtgtccgtgctggagctgctgagagctccctacgtccgctggcaggtggtcaccgtgattgtcaccatggcctgctaccagctctgtggcctcaatgcaatttggttctataccaacagcatctttggaaaagctgggatccctccggcaaagatcccatacgtcaccttgagtacagggggcatcgagactttggctgccgtcttctctggtttggtcattgagcacctgggacggagacccctcctcattggtggctttgggctcatgggcctcttctttgggaccctcaccatcacgctgaccctgcaggaccacgccccctgggtcccctacctgagtatcgtgggcattctggccatcatcgcctctttctgcagtgggccaggtggcatcccgttcatcttgactggtgagttcttccagcaatctcagcggccggctgccttcatcattgcaggcaccgtcaactggctctccaactttgctgttgggctcctcttcccattcattcagaaaagtctggacacctactgtttcctagtctttgctacaatttgtatcacaggtgctatctacctgtattttgtgctgcctgagaccaaaaacagaacctatgcagaaatcagccaggcattttccaaaaggaacaaagcatacccaccagaagagaaaatcgactcagctgtcactgatggtaagataaatggaaggccttaacaagtttcctcctccacgttggacaattatgtcaaaaacaggattgtctacatggatgatctcacttttcaggaaacttaaaatttacccattattgggaagcttaaatgaattgaagctatgcaagtcttttatattattaaatatttaaaagtaaacctgtactaatctaa

SEQ ID NO: 183168 - DNA, 738 bp, Homo sapiens
  Payload ID: 16084
  Gene Symbol: SLC2A9
  Gene Name: solute carrier family 2 (facilitated glucose transporter), member 9
  ENST ID: ENST00000513129
  CDS Start-End: 145-738
catggacatgaatgtgtggcttaaattacattgctgtgtgggcatgaatcagacgctctgcccatgaagagttctagcaccaagtcagtgcaagacccgaggtgaaacaataacaacaaaagttcaaaacctgaaaagtgaaccatgaagctcagtaaaaaggaccgaggagaagatgaagaaagtgattcagcgaaaaagaaattggactggtcctgctcgctcctcgtggcctccctcgcgggcgccttcggctcctccttcctctacggctacaacctgtcggtggtgaatgcccccaccccgtacatcaaggccttttacaatgagtcatgggaaagaaggcatggacgtccaatagacccagacactctgactttgctctggtctgtgactgtgtccatattcgccatcggtggacttgtggggacgttaattgtgaagatgattggaaaggttcttgggaggaagcacactttgctggccaataatgggtttgcaatttctgctgcattgctgatggcctgctcgctccaggcaggagcctttgaaatgctcatcgtgggacgcttcatcatgggcatagatggaggcgtcgccctcagtgtgctccccatgtaccttagtgagatctcacccaaggagatccgtggctctctggggcaggtgactgccatctttatctgcattggcgtgttcactgggcagcttctgggcctgcccgagctgctgggaaag

SEQ ID NO: 183169 - DNA, 2344 bp, Homo sapiens
  Payload ID: 16085
  Gene Symbol: SLC2A5
  Gene Name: solute carrier family 2 (facilitated glucose/fructose transporter), member 5
  Uniprot ID: P22732
  ENST ID: ENST00000377414
  CDS Start-End: 69-803
ctccattcagtgcacgcgttactttggctaaaaggaggtgagcggcactctgcccttccagagcaagcatggagcaacaggatcagagcatgaaggaagggaggctgacgcttgtgcttgccctggcaaccctgatagctgcctttgggtcatccttccagtatgggtacaacgtggctgctgtcaactccccagcactgctcatgcaacaattttacaatgagacttactatggtaggaccggtgaattcatggaagacttccccttgacgttgctgtggtctgtaaccgtgtccatgtttccatttggagggtttatcggatccctcctggtcggccccttggtgaataaatttggcagaaaaggggccttgctgttcaacaacatattttctatcgtgcctgcgatcttaatgggatgcagcagagtcgccacatcatttgagcttatcattatttccagacttttggtgggaatatgtgcaggtgtatcttccaacgtggtccccatgtacttaggggagctggcccctaaaaacctgcggggggctctcggggtggtgccccagctcttcatcactgttggcatccttgtggcccagatctttggtcttcggaatctccttgcaaacgtagatggtgagttcaggacatctcgggagcacccccaccccttcaccactacccttggccccctccttgtgttccaaagccaccaccacaggacaggactttctgcagactggtctcttctaacaggctggatgtccttggggggcccatcctgtcccgagccaacatagcaggccatggacaaaggcgcgataagggactggccagcgtttactatctagtccctcttaggagatggatgaggtggctttgagtgatgggcttccctgcctgctcagcagctgtccatatggaggcccgtggcatagcaatgacagccaccagtgtgccaggctctgtgcttggggcggacccagcatcagttcataggaccctcccagcaacgctgctgcctgggactcagtgattatcccattttgcagaccagaaagagaagtaccaggagtgagggtggcctggccccatgggggaggtggtgaggacatcccagaccctgcctccaccttccccaagacagcctggggcctggcatgcggcaggtgcacagacacctgtaaccggggttgtttttgcacgactttccctttaaactatcatcagtcatcccgtcagccaaaacataagccagttcccgccagggttctacacaccgtctgcaagtcagtcaagtggatcatcaagctctgtgctgcttagacactctctgtagaaagtgcttaccgtgagccaagtgccaagtcttttttagtaactcatgtattcctcagaacagccctattaagcctgtaccagtatcatacccattttgcaggtgcatcacaggtacagagagattggaagactggtccaaggtctcatgaggatgcagacccagcggcacagacctaggtccctgtttaagtaccacatgctcctgcctctccttcactcctgcatgtgttggggacacttacgccaaggcgccgcgttctcattaggagctgggaccagaagtgaataagccaggttcctgtctcagggagctccatagcaggactcagaaccacacacggccctctaggcatttgtgaagctctgtgcttcatttttttgctttgcctctagttttgcctttgcagtaccaatgcagccagcccatgtgtcccctctatgtggaatgttaacgatattcccactgtttctggtgtcctttctgtaatcagagctgccgtgaccattccagttcaggcatcctggtggcctggcttctctgggcatagagctgggagtgggcagttgggtcaggccgggtatgcccagctcctccagcccctgcaagactgtcctctgaaggacacggggacgttctcaccagcacatggtattaccggcctcgtcggtgtggtctgtctgatgggcgcaggggtgcgtcgctgctgatccctgctgcaggtgtttcccgagtgtccaccgtcgggagttgctgttcttagggctgggaaagctgtgccctcctggagcctgcaccccactcaggatgacggggctggggccggctctgcagagggcgccttcggggtggtggggaggccgctggtgccagctcgctgccttcctcccaggctggccgatcctgctggggctgaccggggtccccgcggcgctgcagctccttctgctgcccttcttccccgagagccccaggtacctgctgattcagaagaaagacgaa

SEQ ID NO: 183170 - DNA, 4165 bp, Homo sapiens
  Payload ID: 16085
  Gene Symbol: SLC2A5
  Gene Name: solute carrier family 2 (facilitated glucose/fructose transporter), member 5
  Uniprot ID: P22732
  ENST ID: ENST00000377424
  CDS Start-End: 181-1686
gaagtgaaaggaagaccaggttcctgaaagggttattctgacttaatctggctataaaaatgctattggctgttatttggcatggccaaagtgcacccagaatgtcttctctctccattcagtgcacgcgttactttggctaaaaggaggtgagcggcactctgcccttccagagcaagcatggagcaacaggatcagagcatgaaggaagggaggctgacgcttgtgcttgccctggcaaccctgatagctgcctttgggtcatccttccagtatgggtacaacgtggctgctgtcaactccccagcactgctcatgcaacaattttacaatgagacttactatggtaggaccggtgaattcatggaagacttccccttgacgttgctgtggtctgtaaccgtgtccatgtttccatttggagggtttatcggatccctcctggtcggccccttggtgaataaatttggcagaaaaggggccttgctgttcaacaacatattttctatcgtgcctgcgatcttaatgggatgcagcagagtcgccacatcatttgagcttatcattatttccagacttttggtgggaatatgtgcaggtgtatcttccaacgtggtccccatgtacttaggggagctggcccctaaaaacctgcggggggctctcggggtggtgccccagctcttcatcactgttggcatccttgtggcccagatctttggtcttcggaatctccttgcaaacgtagatggctggccgatcctgctggggctgaccggggtccccgcggcgctgcagctccttctgctgcccttcttccccgagagccccaggtacctgctgattcagaagaaagacgaagcggccgccaagaaagccctacagacgctgcgcggctgggactctgtggacagggaggtggccgagatccggcaggaggatgaggcagagaaggccgcgggcttcatctccgtgctgaagctgttccggatgcgctcgctgcgctggcagctgctgtccatcatcgtcctcatgggcggccagcagctgtcgggcgtcaacgctatctactactacgcggaccagatctacctgagcgccggcgtgccggaggagcacgtgcagtacgtgacggccggcaccggggccgtgaacgtggtcatgaccttctgcgccgtgttcgtggtggagctcctgggtcggaggctgctgctgctgctgggcttctccatctgcctcatagcctgctgcgtgctcactgcagctctggcactgcaggacacagtgtcctggatgccatacatcagcatcgtctgtgtcatctcctacgtcataggacatgccctcgggcccagtcccatacccgcgctgctcatcactgagatcttcctgcagtcctctcggccatctgccttcatggtggggggcagtgtgcactggctctccaacttcaccgtgggcttgatcttcccgttcatccaggagggcctcggcccgtacagcttcattgtcttcgccgtgatctgcctcctcaccaccatctacatcttcttgattgtcccggagaccaaggccaagacgttcatagagatcaaccagattttcaccaagatgaataaggtgtctgaagtgtacccggaaaaggaggaactgaaagagcttccacctgtcacttcggaacagtgactctggagaggaagccagtggagctggtctgccaggggcttcccactttggcttatttttctgacttctagctgtctgtgaatatccagaaataaaacaactctgatgtggaatgcagtcctcatctccagcctccccaccccagtgggaactgtgcaaagggctgccttgctgttcttgaagctgggctgtctctctccatgttggcctgtcaccagacccgagtcaattaaacagctggtcctccactttgctggttcagccttcgtgtggctcctggtaacgtggctccaccttgatgggtcaacctttgtgtggctcctggtaacataacaacaacagttactatagtggtgagatggaaggaatcaaattttgccagagaaactaacttggtggccccgacaggtcttccggggccatgggcatttgtttagagccaaattcatcctcttaccagatccttttccagaaatacctgtctaggaaggtgtgatgtcagaaacaatgacatccagaaagctgaggaacaggttcctgtggagacactgagtcagaattcttcatcctaaattattttgttagtggaaaatggaattgcttctgtgtagtcaataaaatgaacctgatcacttttcaacaagacgtgctgctgttctttgagcaagtagaaggcaggaggaagttccctgctcattcaggcagtgttttttttgtttttatttttgcttttttttttttttttaagacggagtctcgctctgtcacccaggctggagtgcagtggtgcgatctcagctcactgcaaactccacctcccgggttcacaccattctcctgcctcagcctcctgagtagctgggactacaggcgcctgccaccacgcccggctaacttttttgtatttttagtagagactgggtttcactgtgttggccaggatagtctcaatctcctgacctcatgatccgcccacctaggcccctcaaagtgctgggattacaggtgtgagccactgcgcccggccacttcaggcagtttgactgcacgagtgtcagttccttgagggcaggggcttggtcagttttgtttatgcctgaatccccagcatctcgaagagggcctctggaggctgaggtgggaggattgcttaagcctgggaagtagaggttgcagtgagctgaaattgcaccctatactccagcctgggcaacacagtgagatcccatctcaaaaaaaatttttttaattgggcatggtgacacgcctttggggtcccagctatttgggaggctgaaatgggaggatcgcttgagcctgggaggtcaaggctgccctgagtcatgattgcatcactgcacaccagcctgcatgacagaatgagaccttgtctcaaataaataaatacatgtaagattgaggaagcttccaaatgtcctcacatatgtaatgaaatcttgaggagtcttaaaatcttgagactgtggtgggggaggaagggaaaaggaacagggtcttgatatggtttggctgtgtccccacccaaatctcatcttgaattgtagctcccataattcccatgtgttctgggagggaccctgtgggagataattgaatcatgggggcaatttcccccatactgttctcatggtagtgaatcagcctcatgagatctgatggttctgtaaggggtaaaaccttttgcttggttctcattctctcttgcctgccaccaggtaagacgtgccttttgctttctggcatgattgtgaggcctccccagccatgtggaatggcgagtccattaaatctctttttctttgcaatttacccagtctctgatacatctttatcagcagcatgaaaatggtctaacacaggtctctccccaaaaatatagagagctggaggtttttcttagagatatgaataaagggtgtgagtgtgagtgtatgtgcaaaaatatggataaaaccttgaaagtgctgaatggcctgtagcaagaagtgatgtcttctcatagatgggtggcagaggctggtggccgggagagagagcagtgggacttgggagcactttttgtgggtatgtaatggagattccaccagcaacaagctaaaccactcacaagcgggcccagaggaagtaaacagaacactgtggttgaaccatccttggccttctgcagcaaggatctgcagcctggaaggggcacagaaacaaccaaagatgaaggctctcagagctgaggagaggccaggtcagaatatcagaagtcaagaaactgcagcacctctaacacaggggaggctatgaagttcatggttctggatgtctgctccctgggttcaaaccttggtcctgccacattagttgtgcaacttggaaagttacttggcttttttgtatctcagtcttctcttctgttaaatggcactaatagtaaatgtctcacatgtccattgtgagaattaaatga

SEQ ID NO: 183171 - DNA, 846 bp, Homo sapiens
  Payload ID: 16085
  Gene Symbol: SLC2A5
  Gene Name: solute carrier family 2 (facilitated glucose/fructose transporter), member 5
  ENST ID: ENST00000474145
  CDS Start-End: 276-846
accgctgccatccccctcctccatctttgagccactaggcttctcacagtctcccaccccgccctgctcgcggagcctgcaggcctcggcctcatggcggcctgaggcaggggcctggaggctggtccgcccgccacgaaggttggggggtccctggccagaagcaggacccgggcgaggctgagggggactctggcagaagctgaaggggacccggtgcacgcgttactttggctaaaaggaggtgagcggcactctgcccttccagagcaagcatggagcaacaggatcagagcatgaaggaagggaggctgacgcttgtgcttgccctggcaaccctgatagctgcctttgggtcatccttccagtatgggtacaacgtggctgctgtcaactccccagcactgctcatgcaacaattttacaatgagacttactatggtaggaccggtgaattcatggaagacttccccttgacgttgctgtggtctgtaaccgtgtccatgtttccatttggagggtttatcggatccctcctggtcggccccttggtgaataaatttggcagaaaaggggccttgctgttcaacaacatattttctatcgtgcctgcgatcttaatgggatgcagcagagtcgccacatcatttgagcttatcattatttccagacttttggtgggaatatgtgcaggtgtatcttccaacgtggtccccatgtacttaggggagctggcccctaaaaacctgcggggggctctcggggtggtgccccagctcttcatcactgttggcatccttgtggcccagatctttggtcttcggaatctccttgcaaacgtagatg

SEQ ID NO: 183172 - DNA, 455 bp, Homo sapiens
  Payload ID: 16085
  Gene Symbol: SLC2A5
  Gene Name: solute carrier family 2 (facilitated glucose/fructose transporter), member 5
  ENST ID: ENST00000473209
  CDS Start-End: 213-455
accatgagcctgactggtagagactttagcaatggggaaataccgtagactgttccatcaggacaatgctgggcctgcagtccccagggggcacccacttacttagccaaaccccagacgtttcatttaaaagcagaagtgaaaggaagaccagtgcacgcgttactttggctaaaaggaggtgagcggcactctgcccttccagagcaagcatggagcaacaggatcagagcatgaaggaagggaggctgacgcttgtgcttgccctggcaaccctgatagctgcctttgggtcatccttccagtatgggtacaacgtggctgctgtcaactccccagcactgctcatgcaacaattttacaatgagacttactatggtaggaccggtgaattcatggaagacttccccttgacgttgctgtggtctgtaaccgtgtccatgtttccatttgga

SEQ ID NO: 183173 - DNA, 755 bp, Homo sapiens
  Payload ID: 16085
  Gene Symbol: SLC2A5
  Gene Name: solute carrier family 2 (facilitated glucose/fructose transporter), member 5
  ENST ID: ENST00000487835
  CDS Start-End: 258-755
agtggcagttggccagatgccgaaccaccaccaggggtggttggcaaactgcagccacccaaggggctggagtagttttcaaacaggaggaaaagcagacgcgtgacagagtcagagagcaggcatagagtgctgtggcagtcagccagtgcccacatcaacaccaaggagagtcctgcgggtgctgtgcaaggccgggtgcacgcgttactttggctaaaaggaggtgagcggcactctgcccttccagagcaagcatggagcaacaggatcagagcatgaaggaagggaggctgacgcttgtgcttgccctggcaaccctgatagctgcctttgggtcatccttccagtatgggtacaacgtggctgctgtcaactccccagcactgctcatgcaacaattttacaatgagacttactatggtaggaccggtgaattcatggaagacttccccttgacgttgctgtggtctgtaaccgtgtccatgtttccatttggagggtttatcggatccctcctggtcggccccttggtgaataaatttggcagaaaaggggccttgctgttcaacaacatattttctatcgtgcctgcgatcttaatgggatgcagcagagtcgccacatcatttgagcttatcattatttccagacttttggtgggaatatgtgcaggtgtatcttccaacgtggtccccatgtacttaggggagctggcccctaaaaacctgcggggggctctcggggtggtgccc

SEQ ID NO: 183174 - DNA, 889 bp, Homo sapiens
  Payload ID: 16085
  Gene Symbol: SLC2A5
  Gene Name: solute carrier family 2 (facilitated glucose/fructose transporter), member 5
  ENST ID: ENST00000486632
  CDS Start-End: 319-889
cgggtgaagaatgtgggggagagtggcagttggccagatgccgaaccaccaccaggggtggttggcaaactgcagccacccaaggggctggagtagttttcaaacagtttgactcttttcatcaacaccagcaccacattatcccaggaggaaaagcagacgcgtgacagagtcagagagcaggcatagagtgctgtggcagtcagccagtgcccacatcaacaccaaggagagtcctgcgggtgctgtgcaaggccgggtgcacgcgttactttggctaaaaggaggtgagcggcactctgcccttccagagcaagcatggagcaacaggatcagagcatgaaggaagggaggctgacgcttgtgcttgccctggcaaccctgatagctgcctttgggtcatccttccagtatgggtacaacgtggctgctgtcaactccccagcactgctcatgcaacaattttacaatgagacttactatggtaggaccggtgaattcatggaagacttccccttgacgttgctgtggtctgtaaccgtgtccatgtttccatttggagggtttatcggatccctcctggtcggccccttggtgaataaatttggcagaaaaggggccttgctgttcaacaacatattttctatcgtgcctgcgatcttaatgggatgcagcagagtcgccacatcatttgagcttatcattatttccagacttttggtgggaatatgtgcaggtgtatcttccaacgtggtccccatgtacttaggggagctggcccctaaaaacctgcggggggctctcggggtggtgccccagctcttcatcactgttggcatccttgtggcccagatctttggtcttcggaatctccttgcaaacgtagatg

SEQ ID NO: 183175 - DNA, 684 bp, Homo sapiens
  Payload ID: 16085
  Gene Symbol: SLC2A5
  Gene Name: solute carrier family 2 (facilitated glucose/fructose transporter), member 5
  ENST ID: ENST00000484798
  CDS Start-End: 114-684
agcgttggtgacgccatggctgtgcttgcgacgccctgtcactggcaggaaccggtgcacgcgttactttggctaaaaggaggtgagcggcactctgcccttccagagcaagcatggagcaacaggatcagagcatgaaggaagggaggctgacgcttgtgcttgccctggcaaccctgatagctgcctttgggtcatccttccagtatgggtacaacgtggctgctgtcaactccccagcactgctcatgcaacaattttacaatgagacttactatggtaggaccggtgaattcatggaagacttccccttgacgttgctgtggtctgtaaccgtgtccatgtttccatttggagggtttatcggatccctcctggtcggccccttggtgaataaatttggcagaaaaggggccttgctgttcaacaacatattttctatcgtgcctgcgatcttaatgggatgcagcagagtcgccacatcatttgagcttatcattatttccagacttttggtgggaatatgtgcaggtgtatcttccaacgtggtccccatgtacttaggggagctggcccctaaaaacctgcggggggctctcggggtggtgccccagctcttcatcactgttggcatccttgtggcccagatctttggtcttcggaatctccttgcaaacgtagatg

SEQ ID NO: 183176 - DNA, 676 bp, Homo sapiens
  Payload ID: 16085
  Gene Symbol: SLC2A5
  Gene Name: solute carrier family 2 (facilitated glucose/fructose transporter), member 5
  ENST ID: ENST00000464985
  CDS Start-End: 260-676
agatgccgaaccaccaccaggggtggttggcaaactgcagccacccaaggggctggagtagttttcaaacagcaccacattatcccaggaggaaaagcagacgcgtgacagagtcagagagcaggcatagagtgctgtggcagtcagccagtgcccacatcaacaccaaggagagtcctgcgggtgctgtgcaaggccgggtgcacgcgttactttggctaaaaggaggtgagcggcactctgcccttccagagcaagcatggagcaacaggatcagagcatgaaggaagggaggctgacgcttgtgcttgccctggcaaccctgatagctgcctttgggtcatccttccagtatgggtacaacgtggctgctgtcaactccccagcactgctcatgcaacaattttacaatgagacttactatggtaggaccggtgaattcatggaagacttccccttgacgttgctgtggtctgtaaccgtgtccatgtttccatttggagggtttatcggatccctcctggtcggccccttggtgaataaatttggcagaaaaggggccttgctgttcaacaacatattttctatcgtgcctgcgatcttaatgggatgcagcagagtcgccacatcatttgagcttatcattatttccagacttttggtgggaatatgtgca

SEQ ID NO: 183177 - DNA, 758 bp, Homo sapiens
  Payload ID: 16085
  Gene Symbol: SLC2A5
  Gene Name: solute carrier family 2 (facilitated glucose/fructose transporter), member 5
  ENST ID: ENST00000479813
  CDS Start-End: 188-758
attgtctggtcacagaacagcccggagatgtgccagcttgctttgtgggacagggtcttgctctgtcacctaggctggagtgcagtggcatgatcgaattcctgggctcaagcgatcctcttgcctcagtgcacgcgttactttggctaaaaggaggtgagcggcactctgcccttccagagcaagcatggagcaacaggatcagagcatgaaggaagggaggctgacgcttgtgcttgccctggcaaccctgatagctgcctttgggtcatccttccagtatgggtacaacgtggctgctgtcaactccccagcactgctcatgcaacaattttacaatgagacttactatggtaggaccggtgaattcatggaagacttccccttgacgttgctgtggtctgtaaccgtgtccatgtttccatttggagggtttatcggatccctcctggtcggccccttggtgaataaatttggcagaaaaggggccttgctgttcaacaacatattttctatcgtgcctgcgatcttaatgggatgcagcagagtcgccacatcatttgagcttatcattatttccagacttttggtgggaatatgtgcaggtgtatcttccaacgtggtccccatgtacttaggggagctggcccctaaaaacctgcggggggctctcggggtggtgccccagctcttcatcactgttggcatccttgtggcccagatctttggtcttcggaatctccttgcaaacgtagatg

SEQ ID NO: 183178 - DNA, 3381 bp, Homo sapiens
  Payload ID: 16086
  Gene Symbol: SLC20A1
  Gene Name: solute carrier family 20 (phosphate transporter), member 1
  Uniprot ID: Q8WUM9
  ENST ID: ENST00000272542
  CDS Start-End: 540-2579
gcttcggggccggcgcgaggcgcggcggggtcacgcgggtcgctgcgcgggctataagtaggggccggcggggtgctccgctggagtgatggctgccggcgctctctgcgtggttcttcttctcggccgctgaaacccccgcggctgcttcctgggaaggtcgtgagtcccgctgagctgtccccggtgccgccgacccgggccgtgtgcccgtggctccagccgctgtcgcctcgatctcctcgtctcccgctccgccctcccttttccctggatgaacttgcgtcctttctcttctccgccatggaattctgctccgtgcttttagccctcctgagccaaagaaaccccagacaacagatgcccatacgcagcgtatagcagtaactccccagctcggtttctgtgccgtagtttacagtatttaattttatataatatatattatttattatagcatttttgatacctcatattctgtttacacatcttgaaaggcgctcagtagttctcttactaaacaaccactactccagagaatggcaacgctgattaccagtactacagctgctaccgccgcttctggtcctttggtggactacctatggatgctcatcctgggcttcattattgcatttgtcttggcattctccgtgggagccaatgatgtagcaaattcttttggtacagctgtgggctcaggtgtagtgaccctgaagcaagcctgcatcctagctagcatctttgaaacagtgggctctgtcttactgggggccaaagtgagcgaaaccatccggaagggcttgattgacgtggagatgtacaactcgactcaagggctgctgatggccggctcagtcagtgctatgtttggttctgctgtgtggcaactcgtggcttcgtttttgaagctccctatttctggaacccattgtattgttggtgcaactattggtttctccctcgtggcaaaggggcaggagggtgtcaagtggtctgaactgataaaaattgtgatgtcttggttcgtgtccccactgctttctggaattatgtctggaattttattcttcctggttcgtgcattcatcctccataaggcagatccagttcctaatggtttgcgagctttgccagttttctatgcctgcacagttggaataaacctcttttccatcatgtatactggagcaccgttgctgggctttgacaaacttcctctgtggggtaccatcctcatctcggtgggatgtgcagttttctgtgcccttatcgtctggttctttgtatgtcccaggatgaagagaaaaattgaacgagaaataaagtgtagtccttctgaaagccccttaatggaaaaaaagaatagcttgaaagaagaccatgaagaaacaaagttgtctgttggtgatattgaaaacaagcatcctgtttctgaggtagggcctgccactgtgcccctccaggctgtggtggaggagagaacagtctcattcaaacttggagatttggaggaagctccagagagagagaggcttcccagcgtggacttgaaagaggaaaccagcatagatagcaccgtgaatggtgcagtgcagttgcctaatgggaaccttgtccagttcagtcaagccgtcagcaaccaaataaactccagtggccactaccagtatcacaccgtgcataaggattccggcctgtacaaagagctactccataaattacatcttgccaaggtgggagattgcatgggagactccggtgacaaacccttaaggcgcaataatagctatacttcctataccatggcaatatgtggcatgcctctggattcattccgtgccaaagaaggtgaacagaagggcgaagaaatggagaagctgacatggcctaatgcagactccaagaagcgaattcgaatggacagttacaccagttactgcaatgctgtgtctgaccttcactcagcatctgagatagacatgagtgtcaaggcagagatgggtctaggtgacagaaaaggaagtaatggctctctagaagaatggtatgaccaggataagcctgaagtctctctcctcttccagttcctgcagatccttacagcctgctttgggtcattcgcccatggtggcaatgacgtaagcaatgccattgggcctctggttgctttatatttggtttatgacacaggagatgtttcttcaaaagtggcaacaccaatatggcttctactctatggtggtgttggtatctgtgttggtctgtgggtttggggaagaagagttatccagaccatggggaaggatctgacaccgatcacaccctctagtggcttcagtattgaactggcatctgccctcactgtggtgattgcatcaaatattggccttcccatcagtacaacacattgtaaagtgggctctgttgtgtctgttggctggctccggtccaagaaggctgttgactggcgtctctttcgtaacatttttatggcctggtttgtcacagtccccatttctggagttatcagtgctgccatcatggcaatcttcagatatgtcatcctcagaatgtgaagctgtttgagattaaaatttgtgtcaatgtttgggaccatcttaggtattcctgctcccctgaagaatgattacagtgttaacagaagactgacaagagtctttttatttgggagccagaggagggaagtgttacttgtgctataactgcttttgtgctaaatatgaattgtctcaaaattagctgtgtaaaatagcccgggttccactggctcctgctgaggtcccctttccttctgggctgtgaattcctgtacatatttctctactttttgtatcaggcttcaattccattatgttttaatgttgtctctgaagatgacttgtgatttttttttcttttttttaaaccatgaagagccgtttgacagagcatgctctgcgttgttggtttcaccagcttctgccctcacatgcacagggatttaacaacaaaaatataactacaacttcccttgtagtctcttatataagtagagtccttggtactctgccctcctgtcagtagtggcaggatctattggcatattcgggagcttcttagagggatgaggttctttgaacacagtgaaaatttaaattagtaacttttttgcaagcagtttattgactgttattgctaagaagaagtaagaaagaaaaagcctgttggcaatcttggttatttctttaagatttctggcagtgtgggatggatgaatgaagtggaatgtgaactttgggcaagttaagtgggacagccttccatgttcatttgtctacctcttaactgaataaaaaagcctacagtttttagaaaatt

SEQ ID NO: 183179 - DNA, 638 bp, Homo sapiens
  Payload ID: 16086
  Gene Symbol: SLC20A1
  Gene Name: solute carrier family 20 (phosphate transporter), member 1
  ENST ID: ENST00000433924
  CDS Start-End: 1-638
tttattcttcctggttcgtgcattcatcctccataaggcagatccagttcctaatggtttgcgagctttgccagttttctatgcctgcacagttggaataaacctcttttccatcatgtatactggagcaccgttgctgggctttgacaaacttcctctgtggggtaccatcctcatctcggtgggatgtgcagttttctgtgcccttatcgtctggttctttgtatgtcccaggatgaagagaaaaattgaacggcctgccactgtgcccctccaggctgtggtggaggagagaacagtctcattcaaacttggagatttggaggaagctccagagagagagaggcttcccagcgtggacttgaaagaggaaaccagcatagatagcaccgtgaatggtgcagtgcagttgcctaatgggaaccttgtccagttcagtcaagccgtcagcaaccaaataaactccagtggccactaccagtatcacaccgtgcataaggattccggcctgtacaaagagctactccataaattacatcttgccaaggtgggagattgcatgggagactccggtgacaaacccttaaggcgcaataatagctatacttcctataccatggcaatatgtggcatgcctc

SEQ ID NO: 183180 - DNA, 668 bp, Homo sapiens
  Payload ID: 16086
  Gene Symbol: SLC20A1
  Gene Name: solute carrier family 20 (phosphate transporter), member 1
  ENST ID: ENST00000423633
  CDS Start-End: 1-269
ctgaactgataaaaattgtgatgtcttggttcgtgtccccactgctttctggaattatgtctggaattttattcttcctggttcgtgcattcatcctccataaggcagatccagttcctaatggtttgcgagctttgccagttttctatgcctgcacagttggaataaacctcttttccatcatgtatactggagcaccgtggctgaaatctcctagaaggtggctggcctgcgcccatttcagaaggctgcaggctagtgtacgctgagttaacctagatagtttttcaaccaaagagacctgctcagattctaaatcactacagacctttcctctttagtcttcacaggatccactgataatatgatcatctccttccctttctcctgtctatgctaaaaatgctggaattaatactgacctcaactactgaagtcattagttatatctgatcttcagtaatcagtcatttaggactggtttgctggatattctcatttttctctcccaaatggagatactattgtttctaagtactaaacttccatgaatctgcttgaatgagaagagttgggatgtttaccacctgctctaagtgcacttggaagaagaaattcatgcagctaagaggaaaaataatttgtgagaatataaaggttgaaatgtt

SEQ ID NO: 183181 - DNA, 574 bp, Homo sapiens
  Payload ID: 16086
  Gene Symbol: SLC20A1
  Gene Name: solute carrier family 20 (phosphate transporter), member 1
  ENST ID: ENST00000456264
  CDS Start-End: 1-296
tattcttcctggttcgtgcattcatcctccataaggcagatccagttcctaatggtttgcgagctttgccagttttctatgcctgcacagttggaataaacctcttttccatcatgtatactggagcaccgtggctgaaatctcctagaaggtggctggcctgcgcccatttcagaaggctgcaggctagttgctgggctttgacaaacttcctctgtggggtaccatcctcatctcggtgggatgtgcagttttctgtgcccttatcgtctggttctttgtatgtcccaggatgaagagaaaaattgaacgagaaataaagtgtagtccttctgaaagccccttaatggaaaaaaagaatagcttgaaagaagaccatgaagaaacaaagttgtctgttggtgatattgaaaacaagcatcctgtttctgaggtagggcctgccactgtgcccctccaggctgtggtggaggagagaacagtctcattcaaacttggagatttggaggaagctccagagagagagaggcttcccagcgtggacttgaaagaggaaaccagcatagatagcacc

SEQ ID NO: 183182 - DNA, 584 bp, Homo sapiens
  Payload ID: 16086
  Gene Symbol: SLC20A1
  Gene Name: solute carrier family 20 (phosphate transporter), member 1
  ENST ID: ENST00000413135
  CDS Start-End: 1-348
cgtgcattcatcctccataaggcagatccagttcctaatggtttgcgagctttgccagttttctatgcctgcacagttggaataaacctcttttccatcatgtatactggagcaccgttgctgggctttgacaaacttcctctgtggggtaccatcctcatctcggtgggatgtgcagttttctgtgcccttatcgtctggttctttgtatgtcccaggatgaagagaaaaattgaacgctgtggtggaggagagaacagtctcattcaaacttggagatttggaggaagctccagagagagagaggcttcccagcgtggacttgaaagaggaaaccagcatagatagcaccgtgaatggtgcagtgcagttgcctaatgggaaccttgtccagttcagtcaagccgtcagcaaccaaataaactccagtggccactaccagtatcacaccgtgcataaggattccggcctgtacaaagagctactccataaattacatcttgccaaggtgggagattgcatgggagactccggtgacaaacccttaaggcgcaataatagctatacttcctataccatggcaa

SEQ ID NO: 183183 - DNA, 3657 bp, Homo sapiens
  Payload ID: 16087
  Gene Symbol: SLC20A2
  Gene Name: solute carrier family 20 (phosphate transporter), member 2
  Uniprot ID: Q08357
  ENST ID: ENST00000342228
  CDS Start-End: 371-2329
cgcttccggaagcgggcgactcgcagctccacgcgacgccgaggggctccgcgccgggaccgggcgggtgctcggagtttcggggaccgcacgggaccgagggcaggaggagacatcacagctttcccagatcgggaggaaaaatatggaatgtgttttaccgctgactgaacacaaccaaatgaactgtcctgacagtagtttgcaaaccagcagctagcagtttgtccagcctctaacattgtccagcactttccagagcaaactcactgtttacaagaactcttggccttacgaagtttataacctcaagctttgtttatttaaaatattcctgcaaaagaaaagtacccggcacccactttccaaaatggccatggatgagtatttgtggatggtcattttgggtttcatcatagctttcatcttggccttttctgttggtgcaaacgatgttgccaactcctttggtacagccgtgggctctggtgtggtgaccttgaggcaggcatgcattttagcttcaatatttgaaaccaccggctccgtgttactaggcgccaaagtaggagaaaccattcgcaaaggtatcattgacgtgaacctgtacaacgagacggtggagactctcatggctggggaagttagtgccatggttggttccgctgtgtggcagctgattgcttccttcctgaggcttccaatctcaggaacgcactgcattgtgggttctactataggattctcactggtcgcaatcggtaccaaaggtgtgcagtggatggagcttgtcaagattgttgcttcttggtttatatctccactgttgtctggtttcatgtctggcctgctgtttgtactcatcagaattttcatcttaaaaaaggaagaccctgttcccaatggcctccgggcactcccagtattctatgctgctaccatagcaatcaatgtcttttccatcatgtacacaggagcaccagtgctcggccttgttctccccatgtgggccatagccctcatttcctttggtgtcgccctcctgttcgctttttttgtgtggctcttcgtgtgtccgtggatgcggaggaaaataacaggcaaattacaaaaagaaggtgctttatcacgagtatctgacgaaagcctcagtaaggttcaggaagcagagtccccagtatttaaagagctaccaggtgccaaggctaatgatgacagcaccatcccgctcacgggagcagcaggggagacactggggacctcggaaggcacttctgcgggcagccaccctcgggctgcatacggaagagcactgtccatgacccatggctctgtgaaatcgcccatctccaacggcaccttcggcttcgacggccacaccaggagcgacggtcatgtgtaccacaccgtgcacaaagactcggggctctacaaagatctgctgcacaaaatccacatcgacaggggccccgaggagaagccagcccaggaaagcaactaccggctgctgcgccgaaacaacagttacacctgctacaccgcagccatttgtgggctgccagtgcacgccacctttcgagctgcggactcatcggccccagaggacagtgagaagctggtgggcgacaccgtgtcctactccaagaagaggctgcgctacgacagctactcgagctactgtaacgcggtggcagaggcggagatcgaggcggaggagggcggcgtggagatgaagctggcgtcggagctggccgaccctgaccagccgcgagaggaccctgcagaggaggagaaggaggagaaggacgcacccgaggttcacctcctgttccatttcctgcaggtcctcaccgcctgtttcgggtcctttgctcacggcggcaatgacgtgagtaatgccatcggtcccctggtagccttgtggctgatttacaaacaaggcggggtaacgcaagaagcagctacacccgtctggctgctgttttatggaggagttggaatctgcacaggcctctgggtctgggggagaagagtgatccagaccatggggaaggacctcactcccatcacgccgtccagcggcttcacgatcgagctggcctcagccttcacagtggtgatcgcctccaacatcgggcttccagtcagcaccacgcactgtaaggtgggctcggtggtggccgtgggctggatccgctcccgcaaggctgtggactggcgcctctttcggaacatcttcgtggcctggttcgtgaccgtccctgtggctgggctgttcagcgctgctgtcatggctcttctcatgtatgggatccttccatatgtgtgatttgtcttcttccagctgcaaacagctaaagggatggtctggtgttggcgtgtgggagacatgtgtgctcgtgccgcacatacacatcctggccgtgcacggctctctcatgaccagctctctgcctcccttccaggaggctccatcccacactgttcacccaggctgcggagactcaccttcccgagctaacttaactactgtacataataatatgtattaaactggtatcgtggtgatataatgtggtgcagttacttatatattaaatatctattgtatccatagaataggcagcattatttcaaacatattcaagttgggagtggagatcattgcctagaagtcaatattcaataaatcttgtacataactatttcgatggcaaatgttaagccttctaaaaggaaagtgtagattggaaaatgattttttttccaaatgatgtttttgccttctaatatactgtaaggtaatgagcttcagaacaggcaacctgaccctgcagaggtcgcgtgctgtgggatgacagcgggacgggagctcacaagtgctttcactgaagatttgttcatatactgtgtattgattgttgtgtaatatatcatcattgcttttgtaaatacgtaaaactgtaattttttaatggtgtgcttcccttatacttttttgatcagagaattttggaaagtaccaaagaagcaggggaatcattggccagtgttacgttttcacattgtctgtctcccaccctcactgatcacgcctgccccagagcagtgtgtggcggtgacaccgtcacccagcatgcgccacgccgtggctcccaccagcagtgccaccgccaccacaccccagatcccacccaccttgcagtggcctttccttgtcatcagagtagagaatgcacaggtgttggtgagggcgtgtggctgagcactacatgtcaagtccagagtcagtttctatcccaattctccctgcagcctgaagaacggatccttgtctccaatgtcagcacaaaggaggctttttctgtgctttgacattctagcacttcagggatgagagggagggagaatcctggatgctggatggagtatttctctgaggcccacacaaagctggacacccccaggctctactccatcccattggagtctcttctttttttgatagcgggagggaggaagtacgactaatgttggagcctgaaactatggaaatgctgctaaaatttttatattgacaaacattttcttggtacttcattgtcatttttcattaatcaaccatattaaatttataataaaaaatgcccctcagaa

SEQ ID NO: 183184 - DNA, 533 bp, Homo sapiens
  Payload ID: 16087
  Gene Symbol: SLC20A2
  Gene Name: solute carrier family 20 (phosphate transporter), member 2
  ENST ID: ENST00000517366
  CDS Start-End: 322-533
atgatgcaaatcagcgtgttcctgcctgctgcttggctgcagttaattttagccggggaggagacatcacagctttcccagatcgggaggaaaaatatggaatgtgttttaccgctgactgaacacaaccaaatgaactgtcctgacagtagtttgcaaaccagcagctagcagtttgtccagcctctaacattgtccagcactttccagagcaaactcactgtttacaagaactcttggccttacgaagtttataacctcaagctttgtttatttaaaatattcctgcaaaagaaaagtacccggcacccactttccaaaatggccatggatgagtatttgtggatggtcattttgggtttcatcatagctttcatcttggccttttctgttggtgcaaacgatgttgccaactcctttggtacagccgtgggctctggtgtggtgaccttgaggcaggcatgcattttagcttcaatatttgaaaccaccggctccgtgttactaggcgccaaagtaggagaaaccattcg

SEQ ID NO: 183185 - DNA, 751 bp, Homo sapiens
  Payload ID: 16087
  Gene Symbol: SLC20A2
  Gene Name: solute carrier family 20 (phosphate transporter), member 2
  ENST ID: ENST00000522707
  CDS Start-End: 610-751
gccgaggggatgcaatctcagatcagcagccagcagtgtttgtaaacaacaggagggagattgtgctggtgatgtccaactcacaccaatgaagatcaaccggtttgtgctttgggcagcaggctgcagatggacagtgcctcctgagggcatcgccatgttttagggatccatgttgcaggatacctgtctgcaagagagagtcaaggagggctttttaagcccctggggttcaggcctggcatctgggtgttaagtagagtgaatctcctgaagtccaaactaacatatgacattttaaaatgaggaaaacaaatggctctgaaaaggtctataggattataggaggagacatcacagctttcccagatcgggaggaaaaatatggaatgtgttttaccgctgactgaacacaaccaaatgaactgtcctgacagtagtttgcaaaccagcagctagcagtttgtccagcctctaacattgtccagcactttccagagcaaactcactgtttacaagaactcttggccttacgaagtttataacctcaagctttgtttatttaaaatattcctgcaaaagaaaagtacccggcacccactttccaaaatggccatggatgagtatttgtggatggtcattttgggtttcatcatagctttcatcttggccttttctgttggtgcaaacgatgttgccaactcctttggtacagccgtgggctctggtgtggtgaccttgaggcaggcat

SEQ ID NO: 183186 - DNA, 2284 bp, Homo sapiens
  Payload ID: 16087
  Gene Symbol: SLC20A2
  Gene Name: solute carrier family 20 (phosphate transporter), member 2
  Uniprot ID: Q08357
  ENST ID: ENST00000520179
  CDS Start-End: 326-2284
cccttttcagttttttgagccggagagacgcagcggcggccccagtgccgcccccgggcgcgaggagacatcacagctttcccagatcgggaggaaaaatatggaatgtgttttaccgctgactgaacacaaccaaatgaactgtcctgacagtagtttgcaaaccagcagctagcagtttgtccagcctctaacattgtccagcactttccagagcaaactcactgtttacaagaactcttggccttacgaagtttataacctcaagctttgtttatttaaaatattcctgcaaaagaaaagtacccggcacccactttccaaaatggccatggatgagtatttgtggatggtcattttgggtttcatcatagctttcatcttggccttttctgttggtgcaaacgatgttgccaactcctttggtacagccgtgggctctggtgtggtgaccttgaggcaggcatgcattttagcttcaatatttgaaaccaccggctccgtgttactaggcgccaaagtaggagaaaccattcgcaaaggtatcattgacgtgaacctgtacaacgagacggtggagactctcatggctggggaagttagtgccatggttggttccgctgtgtggcagctgattgcttccttcctgaggcttccaatctcaggaacgcactgcattgtgggttctactataggattctcactggtcgcaatcggtaccaaaggtgtgcagtggatggagcttgtcaagattgttgcttcttggtttatatctccactgttgtctggtttcatgtctggcctgctgtttgtactcatcagaattttcatcttaaaaaaggaagaccctgttcccaatggcctccgggcactcccagtattctatgctgctaccatagcaatcaatgtcttttccatcatgtacacaggagcaccagtgctcggccttgttctccccatgtgggccatagccctcatttcctttggtgtcgccctcctgttcgctttttttgtgtggctcttcgtgtgtccgtggatgcggaggaaaataacaggcaaattacaaaaagaaggtgctttatcacgagtatctgacgaaagcctcagtaaggttcaggaagcagagtccccagtatttaaagagctaccaggtgccaaggctaatgatgacagcaccatcccgctcacgggagcagcaggggagacactggggacctcggaaggcacttctgcgggcagccaccctcgggctgcatacggaagagcactgtccatgacccatggctctgtgaaatcgcccatctccaacggcaccttcggcttcgacggccacaccaggagcgacggtcatgtgtaccacaccgtgcacaaagactcggggctctacaaagatctgctgcacaaaatccacatcgacaggggccccgaggagaagccagcccaggaaagcaactaccggctgctgcgccgaaacaacagttacacctgctacaccgcagccatttgtgggctgccagtgcacgccacctttcgagctgcggactcatcggccccagaggacagtgagaagctggtgggcgacaccgtgtcctactccaagaagaggctgcgctacgacagctactcgagctactgtaacgcggtggcagaggcggagatcgaggcggaggagggcggcgtggagatgaagctggcgtcggagctggccgaccctgaccagccgcgagaggaccctgcagaggaggagaaggaggagaaggacgcacccgaggttcacctcctgttccatttcctgcaggtcctcaccgcctgtttcgggtcctttgctcacggcggcaatgacgtgagtaatgccatcggtcccctggtagccttgtggctgatttacaaacaaggcggggtaacgcaagaagcagctacacccgtctggctgctgttttatggaggagttggaatctgcacaggcctctgggtctgggggagaagagtgatccagaccatggggaaggacctcactcccatcacgccgtccagcggcttcacgatcgagctggcctcagccttcacagtggtgatcgcctccaacatcgggcttccagtcagcaccacgcactgtaaggtgggctcggtggtggccgtgggctggatccgctcccgcaaggctgtggactggcgcctctttcggaacatcttcgtggcctggttcgtgaccgtccctgtggctgggctgttcagcgctgctgtcatggctcttctcatgtatgggatccttccatatgtgtga
